United States Patent Application Publication US 2007/0020637 A1 - sequence listing, part 2

SEQ ID NO: 153 - DNA, 4342 bp, Homo sapiens
gactccgtcctggctcacggaccgcagcgcagccggcacccagccgcctctccctttcctccgcacacgggcagccgcggtccaccgtagggcagtcgtcgttggcatcgcgcgtaatcatcggccggcctcctccagtgtctcccagccctggcggacagcccgggtcccagcctaggacccaggaggatgggtgttccgcgcagcttccggggctctccccgagtcccaccccccggcccgccccgatggacttctcttcgcccactcccatccctagaccacatctcggcccccacagttcctgacatccttgcgcttcacgcaacatcgcggcccatgatcatgccccaattcccctcacctctaaggcagccttctccttgccgcctcccgccttccgagcgtgtgcaactccaattgtccccgggctcccttccagcctcaggaccccatctcacacccgcctctcgcttcccgcttcccgctcgcctgaaccccgccgcctctgctccctgtcttgttccctcagcgtggccccttcctccagccgcgggaagtgggagacgctagcgggagcttcctcctcccggcgctcggaggaaaaggaaagaccaagtagaaagggtcgccgctgcggcacgcgagggagctagtcgccgggctccgcgctcccgcttgcgtccctccagccccctgggcctcgtccggggccggatcttctcgggcaccgcctggtgcgaggagtcaggactgcgacctcaccgacctcctcccatccccagcctgggattgggtgggatatctgggatctctgagcttgggtgtcaaaaaaatattgggggtggcatttatagtcactatcgtccctagcttgagggaggcgacggctgccttccgctcgccgccccccggttttcccggctccgaccctatcctctaacccgtttcctgcttcagctgaccacattgttttcctggatgtgtcccgtgccgagcaggctttttcctgcagatttgcccccccccccatcaacattttgctgccaagagaagctagtaaccaaaaacaaaacaactgggaggaggggcgggagaggaagaaaagttgtgccctggtggcttatccctccccggctttgatcccctttgatgtacagggaggtgccccggccgggggtctggggccacgtcgggggctaggtcgggagggctccctcgggctggccgctgcccagcgctggcggggctcaggaggccgccgaggtgccgcagtccccgcctggtgccccgcgttcctgcagtccccgcccggagcccgcgcaggcggctgctccaaagtgttttctttcagccttaaaatccggagggagcttccttcctccccacctcgtagcgccaggctctgcgggcggggagacgttaagcggacaggaatgggcccagggcgggctcggaacgacgtcccctaccccacccccgccgcgattaggatctgcgctctggctgatcgccccctcccccttttcctgcatttacaggcaagtgaaccggagcaaacgacttccgatccagtctgcgctgttgcggctcccgtttgggatttgatttgcagcatctttgagcctctacgacaaaaaaccgcgaagcacgcccagccctcccccggcaccccgaaaagcacccactccctcccggggacacagctgggcgcgtccacacccccgcagccccacaccatgttgtgcggaaggacttccactccccgcctgtgtcgttgatgtcagaccccaggccagcctccgggcgctgcagttctcccggctaatgctgaggctgcggctccggctctagcacaggcaccagccgccgccgcacccggccccagcgcccaccgtctgcatgtgcccgccgtagccgtctgcccagcccgcagcccgcgctccacggagcgctggagaccaccgtggggggccccttctgccctcgagagaagcggtcttggaggtattgatttaggtggttggattttttccgtggatctatcaattcacaattcgaatttggaagaaagaaggaaaacatgacgtctccagccaaattcaaaaaggataaggagatcatagcagagtacgatactcaggtcaaaggtaagggctttgaaaaatagcacactgcaaatgctctgtggactggtgaggcgtgtatttccaccgtgatttgcaggttgttcatttctttgggtggagcagatgggggcaggctgaccccagaggtggtttcatagatgggtctgaacctccaaaggatgggcaatgccagggggccattgacactggaaaggaatttttgcagtgggctgtaggagtatctttgtggggctgaccatgattttggcagccctttcccccccaagccggacagggtggggggaggggcaggaggctcttagagaaaggcagtttgcctccggttctctgggtcaggtttccttgaaagacaactgaaatctgacaggtgtttggacatttgtttcagagattgaagaggagtccagacagaaaggcaaccttgggaaggtgtaccatttggagagccttgggagaggcggggtttttcggatgcactatattaaaacatgagatttgcaatggcattggcaccaaaagtccattgccaccttgggtgtaccttgtacctgcctggtctctggtcggcctgcatacaaacagagatcagagaataaggccacccacgcccggtctccgccctcacctaaatctgaatagagttgggaggatgttagggtagccggttggtgctgattctggaaaatgggaagacataattgtttaacccttctgtgctgtggccctctgctccggaagacatgcttttaaagccccatttccctctcctgaaaaatgtgaagggtaaagcaaaatgtggactaggagaaaccaagtgacctgtcttctcatctagtcgactgacttgactcatgaataagagcccttactcagatagcgttttttaaaccagcagttcccataggaagggttcctgcctgttaaagagctgcagcatgtgtttgtgcaaggcactgtcccttcctggtcagtcactggaaagagccatgtggctccagcccattgagaccttagctggggagtggaagaggtgggtggccttgaatgttacaccacatggttggagctctgggttttcctttgtttcagagtacagagggaggggcccctcctttccctgcaccagtgcaaggagaccttttcctatcagagaggacttgggaagggccatggctcccctctaatgattgctggggggtgggggtaggtgtagagtttgaaatgggcagctcccttatctcttggaaggttggaaggtagtctgaagtcctcattgtacctacaggatcttttttatgtcattagtttggtcagtgctggaggtgccctaaggggccttctatccacttggctgcaaatattggtaggtttattacagagatgggggagttgactgattgatagcttcagttgaactgggattgagagaggtgtggttgtgagttattattgaggtcttggcctcttgtcactgttcataatccaggcttgtttttgtaaacaataggccactggcctccatgtcctgtccagatgcattgcatttgctcttggaatcccccctgcagttttaaccagatatgtctttttttttttttttttttaacacatcctattcttaaactgttgccatcgggagtgttaataactttgatcttcccagatttctctccagaagcacgccatttgactaaggtgcaaagtgactttaaatgtttaatttttggaaggttcaaggctgataggtgttaatagaaccatatctgccaattttttattggcaaaggatttctcaagagtgtctcaaaattaaacactttggatatttacaaacattgctcattgagatgatgtaacgcagtcggctatttgggttctctcttcaaccttgccacaaacagactattttgctttgctctgatattttcccattgatactattcaggatcatagaattttataggtggctgagcatgatgtcttactccgagaaggtgcctgatgaatgcttatggaactgatttgaatagtttagtccttcattttacagctgaggagaatacagagaactgaagaggcttgtccaaggtcacacggccagatggtggcagatctgaaactagaagcagatttaccaactctcaattctctattctgtatctttactatgaaacatcatctgaccagggtgg

SEQ ID NO: 154 - DNA, 4321 bp, Homo sapiens
gcagagcggctggggcggcggcgcggctcccggtgctccccccggcgcgcgccccgagtcggtgagggcccggctctgcggcccccggagccatgggctgcatcggctcccggactgtggggaatgaggtgattgcagtggattggaagggcctgaaggatgtcgatcaaatcaacatggacagcaccagctcactgcacgggagcagcctccatcggccatcgactgagcaaactcgaactgatttctcctgggacggcatcaacctctccatggaggacaccacttccattcttccgaagcttaagcgaaactctaacgcctatggcattggggccctggccaagtcatcattctcagggatctcacggagcatgaaggaccatgtgacaaagcccacagccatggggcaaggccgggtggcccacatgattgagtggcagggctgggggaagacaccagctgttcagccacaacacagccatgagtccgtgcgcagggatacggatgcctactccgacctcagcgatggcgagaaggaggcacgttttctagcgggcgtcatggagcagtttgctatctctgaggccacactcatggcctggtcttccatggatggtgaggacatgagtgtgaactccacccaggagccattgggctgcaactacagtgacaactaccaggaactgatggacagtcaggatgccctggctcaagcacccatggatggcctcactcttacgtgtcccagggtatgtactgtctggggtcgtcagatgcctgggaagccagcgatcagtccctcattgcctctccggccacaggatcctatcttgggcctgcatttgatgactcacaacccagcttgcatgaaatgggaccttcccaaccagcttcaggatactctgctctggagcctccatctttgctggggggagacactgactgggctccgggggtaggcgcagtggacctggcaaggggccctgctgaggaggagaagaggccattggcacctgaggaggaagaggatgcgggatgccgggacctggagtcactttccccacgagaagaccctgagatgtctaccgctctcagccggaaggtgtctgacgtcacatcctcaggtgtgcagtcctttgatgaggaggaaggcgaggccaacaactagtttcctcccccaatgccctgccttccactcccacctgagggccatggctgtgacccataccctccctccccccagcagtacagctgaaactgggcagacaacattggggaacccaggagcttccagtcctctcctggaaatggaggaccaggatgggattttatccaggcttacactctagaaacccacaggcctgggaactgagacctgggcaactagatggccgtgagcttggtgtggctgtggagaaggacctgggctgtgggcttctgggtctgtgccgacaaagcctccagtgtgtgcaccctgaggacgggggcagcgcagctgtgctcaggactggatctcagttcttcacgccccgatttcgtcttccaggagccgtaactctgctgtctgaatgcctcctttctccatttcactcttgcttttcccaactctgttttctctggctgtggccccagctcatccctactgagagaacagacctcaggggctgttggacatggctggacaggcgcaagggggggctgcctgaagggcacgtccatggggagggtggagaggctgcctcagcaggtcatttggcttctgagatcaggagtcgaggaggaggtggatgtggcagctgagatctacagggggcacggatgtggttctttctatcaaggcctgcccggagacaagagagtcactgaggagactaagaacaaacacagccccttgctctgggatctttaatatcccatggctaaaaggaagatcctaagggtctgggaaaagacccagccagggctggctgctccagctcttgcttccctttcagctttcttccatccctgctccgggagcctgaggagggtgtggggacacccatcttggatacaccaacgcaggatgcaggtgtcgccaacagcagggggagcatgagggctgtctccccttattcacccctgtcctctgaagctgtttacacttttctctttgccttttctacatttttataacttcttgggcactcagggttgagtggagtggagggaggagtccggtgctgtcactccctcagccaggcagggttgcagctgagggccagggtgggcactcggcactttctgccccttcttcagctcctcccaggactcccaaacagcctcacagctgtcctccctgcctccccaggcctcctaccagaggaagagaggaaaatcagcggattcttccttccaggatggtgtatggtgaggcacaagcttgccctcccacacttggcatccatgctggtggggactgagcagcatatgcgccccagcactaccgtgagagcacaggcagaggatgggcggagcaaagcagcggtgctgtggggttggagagcacttggccctgccactgcccaggtagcccctccccagcccttggcacaggcagagttcgggtaggagagagaggcctaagaggctcactgccctatctccttctttcctcacgcccttccaaggctccggctcccaggcctgtgtcctacccacactctgtcaggagtcctaccacttgcatcctctgctggaagggagcactgttgtcctctcctggccctgggcacaaactttgccctcacccccaggccccagaacttattattttggagtgagaaggttgagagttggggtgtttctgtccatctatggtcctgtcccgccatcaagttcatactctcttactcacacttctgggatgcaagcagggcagggggttctgtgtcttccatggaagggggacaatggttatcctgaggttggtttttggaggaaacatgggcgtaggcaaggtgaaccaaggcaggtgcagtcacctaaccgaatgctgcctgtacaggggaagagtcctcttgtgcttgctaacgtgtgctgactccatgtcccaggacctcatttccaggagctctgagaggtggtctagcatgcccgccctggcagctattccccacccgtctcctgctgcaggctctggggttttgcatgttcatgtgaccttccttccatggggtccctggttcctcaccttctccaatgtgtgctattcccacatcacctcttcctgtcgtctcatcctctcagtgcccatatcatacccccagaccacggtggacagctcacctagtgagtgcgttcattcattacagttcgtttttgctcaggcccgggggagttaggaaaggtagaccacagcagctttcgttcctccttccctttcccaaggaagccaaatggtccctgacaaaagatgactaaagatctgaaggactctagcagggttcatacatgaacctgctttccccagggtgctggcatattgctgcagatggaagtcaggtgggggtctgtcttctgcaaggagctcctactcgctctgaagagggagactgaggagctggcctgggaccatcttaggactcttctggtgctgggggcagggtgcatgggggttgcttatcgtctatttcagggggtggggaggggcatgtgcaggaagaggctgtttcggggtgggaaagggttgcttttcctttggggttaaggctgtgcagcacgttttacagcagtcctggaacagggctgtttttatattcttgtgaatgaaactgctcttgctaaatgattttctttttttggagggggggtgcactttcattttcaattgactttattaaatgaaaatccaaatcttccactcctccccctccattgtcccctcccccaccacacaccttccttcttgtccttgtgttgaagagggtatcttggagaatgagtttattatcttctccacgacctcacctatacatcccacacaccatcctccaggtctgggaaatatccatttttctggccagtcttagcatgttttcttaatgtcacattcccacgccaggcccaagagagattctatgacatatattatagagagaattctatatcaatatatataaatattagagattatgtacacaagggcatgggctcaaatgcccactgccagtcccccacccaggcttcagcatctctcttggcctggggaagtgggagggatgtgatgctggagaaggctacaggctgtgttcaatgacactaaacagaatgtggtggc

SEQ ID NO: 155 - DNA, 3600 bp, Homo sapiens
tttttacctgcccaacaatgttccatctaccatctaaaaggtaatataagaagaagttttgaaacccactttaggaaaaccatcttctttaaatccttcaattatctgaggcctctatatgtcaaaactatttttcagttgcaggggattgggcaaacttgttctttcttatacttgggttcaaagacccattctccagtttcatatttcccaaaccaaaatgcttgacataaagccaaatcaactgccaagcacactttattttgcataggagtatgcagcctagggaaccttggttgaaaagcagcagtctgctatgcaaaatattggaaatcactgacagtgtagcattcatattatctgtcaatgagggtatattgggaacgtgctctcgtgaataataaaaagcaacatatttttatttggccttataaattgggttgtggtaatgtaaactttgatatatagtctttttatttttctcttattaatctgccaaagatgggaacagatacaagaatttttcaaattggcttttgtaagacagttgatgattgtaatagtgtttaatcttccagaaagctttatatgttgttccacaataaaattgatatttgtttcagcaaagttttcctgacactcacaaacccacaaactgttcctcttaatgcagatattgtagaatctacaaagttcaaatccatttttgatccaaagaaagtagaggagtatttgagacatgagtgtacccagccctttttttaatcacaggcaatgcatgggtctggctggttacactttgccaagaagacttgtcttatgaaacccaaggtatattttgttatgccattttatgtccttttcttttaacattgtggaaagtggtatgttgaatcaagtgtaagctgagttttccagacaactgaagtagctacatcatgaatgttattttgttattaaagggtttttactcagtgctttgtgccaatggatgtccttttccttggagacacataactacaaaattacctcagcttggcctggttttctctcctgccctcttggggaaacatgggcctggcctgggaaaaggcaggtcatgggctggaaggtaggttttggtactaggaagaaatctctgtatctgtcagctttaaagagaactgggccaaaaatctctaacctcactctccagctggactccaacacttccctgcaatcctttggtcttgagcatgtgccagcatgaaggcagactccagttcatacatgaaaggcaagaaaaagaaaatagtaaccttgaatcttctgtgggccaccaggcactcacctttccccaccttgcacactatccagtcaaggctgttgcagcccatctggtggctttacatgggacattaccaaaggcttcttcctccatcctggggttgcaaaggatccaggtcccctccatccagtggggctcttccacatcagaagtccccctcccaccatcctctgcatcctgtttagctatcccatctataccttttggagatgattatttagaaaacaaagaaaggtatggaatggggtttcctattgtttgctaggttatattttagcaattctcaattctttgatctggaaaaatacaagagggaaaaggagaccccactatctccctgtgctttgctcccatctcagggggcaggggcagtgcacattgcctatgctgttgatctgtcttgggcgacaggctgaatcacagctattgccccagccaaaaacatggcccatcaatgcctactttatctctgcttgaaaatcctattcaaaaagttgtagagtttgaggtttttatccccccatatcctttgctttggtccagtttggcctttagcataagagtcagctttatctctaggaaagttttttcagattatgacaaggaacctgccacctgggaagaaaagagtccgaagactatctagcaatcggataggtagtcataccattaacagatacttccttgaaggtagaatattatttcctttctttacagttttgtgttacacaagtccaagtggtgccagcaaacttcttaccgtgaaatgttgtaaaacacctggcatactgaaatttctgaaacaaaaacacaagctccacattgataacttgataaataaccactaaagtttagatgcagggactgagatgatacaggcaaaatcttggtgttggtttctcttttaattcgtatcttcgatcacctaacctttctcaatccaagagcagttcagtcttttctccccaagtctaggatgccaaagagcatcataggaaaagataattagggattgaccagcatttcaattagttctcttcttcatctttgcatttctcaaaagtgttctcctggaccagagagaaagagctggtccattttttttcattctttctattcaaatttttccacccagacaatactttattaacacagatactgtagatccttccttggtcagtgaattattacaagaggagctatccttccaccaaagtgagtgaaaacaagttccagtatcttttcttccatccagttttgttctcagaatccaagtcagtcctgggtcttttctcactttagaccctggcctcagatgtgtttattcttgctatttaaaaatacctttaaatttcacatgctggcctgcagaacttgcatcctttgttctatactgttgactgcttgatggtattgaaaggtgactataatgagggaagaaaggaggaggtaaagagagaagaatttgtcccagatctgtttaaagtttcaaaatttaaaaagggacccattaaattatgggaaaatggctatagagtgtgagcctccgttgaccatatgctcaaagaccgtactctgccacctgccttccaggtagctattctagaaactcagtcctttgtggaaacccaactaccttttaaaagtctctttccagattccaaaaggacaagagatcagagagtcacatatacacctcttgttttattttcttgctttcacgggtattattgccaagaaaatcgtagggaaaaactttaaacttttcttttcagttgatccctttgacatcacctctcatgtttaaaatcaggaaaacacacccctaaaatttgcactctcttccgttttgaaaaagaaaacccacacacaaatgcacactattaccgtctttcaccctgcgctatatttccaaagtgtattataatccagatattgccccatctcaaacatgttaagtcagactgtgctgaaagactttccagggacggtcaacagggtatatgttcagtggctgccctgaaatcctggtggggatgaggatcacgcttcatcatcaaggggatgcccatcccctgataagctcccagtccttttggaagatttctttgaatgttaattgcattttcagttttgctcatttcccaccccaatgttttgtctgcaacatcgcttacactggattctttctatttttattcctatcattaaatggtagtgctgtaaattctgcattctgcaattaatgttaaataaactgctttaattcattg

SEQ ID NO: 156 - DNA, 4607 bp, Homo sapiens
gtgcatgagtcgccactgagagcacgggccagaggatggagaagcagcgggcactcgtggccgccaaggatggggatgtggcgacgttggagcggctgctggaggctggcgccctgggcccgggcatcaccgatgctctgggggccggcctggttcaccacgccacccgggctggccacctggactgcgtcaagttcttggtgcagcgggcccagctgcccggcaaccagcgggcccacaacggggccaccccagcgcatgacgccgctgccacgggcagcctggccgagctgtgctggctggtccgcgaggggggctgcggtctgcaggaccaagatgcctcgggcgtctccccgctgcacctggccgcccgttttggacacccagtgctggtggagtggctgctccacgagggccactcggccacgctagagacccgggagggagcccggccgctgcaccacgctgccgtcagtggggacctgacctgcctcaagctcctgacagccgcgcatggcagcagcgtgaaccggcggacacgcagtggcgcctccccactctacctggcctgccaggagggccacctgcacctggcccagttcctggtgaaggactgtggcgctgacgtgcaccttcgtgctctcgatggcatgagcgccctgcacgctgccgccgcccgtggccactactccctcgtcgtctggctggtcacattcaccgacatcggactcacggcacgggacaatgagggggccacggccctgcactttgcagcccgaggcggccacacgcctattctagaccgactcctgctgatgggtacccccatcctgagagactcctggggtgggacccccctccacgacgcagcagagaacgggcagatggagtgctgccagaccctagtctcccaccacgtggacccctccctgcgggatgaagatggttacacggcggcagacctggcggagtaccatggacaccgggactgcgcccagtacctgcgggaggtggcccagccggtgcccctgctgatgacgcccccaccaccaccgttccccccacctccactgttggccacgaggcgctccctggaggatggaagaagaggaggcccagggccagggaaccccagccccatgtccctcagcccggcctggcctggccatcctgaccagcctcttcccagggagcagatgaccagcccggcccctccgaggatcatcaccagtgccacggctgaccccgaggggacagagacggcgctggcgggggacacctcagatggcctggccgcactacagctggatgggctgccctcaggcgacatcgacgggctggtgcccacgcgggatgagcgcggccagcccatcccagagtggaagcggcaggtgatggtgcggaagctgcaggcgcgcctgggcgcagagagctccgcagaggcccaggacaatggtgggagctcaggccccacggagcaggcggcctggaggtactcacagactcatcaggccatcctggggccctttggggagctgctgacagaggatgacctggtctacctggagaagcagattgcagacctgcagcttcggcgccgctgtcaggagtatgagagtgagctgggccggttggcggctgagctgcaggccctgctgcccgagcccctggtcagcatcacggtcaacagccacttcctgccccgggcgcccggactggaggttgaggaggcctcaatcccagcggctgagcccgcagggtctgcggaggcctcagaggtggcccccggggtgcagcccctgcccttctggtgcagccacatctcccgcctggtacgcagcctgtccctgctgctgaagggcatgcatgggctagtacagggggatgagaagccatccacccggcccctgcaggacacctgcagggaggcctcggccagcccccctcggagcgaggcccagcgccagatccaggagtggggggtgtctgtgcggacgctgcggggcaacttcgagtcggcctctggcccactctgtggcttcaaccctggcccctgcgagccgggggcccagcacaggcagtgcctgagtggctgctggccagccctgcctaagccccgcagtggcctggcttcaggggagcccaggcctggcgacacagaggaggccagcgactctggcatcagctgcgaggaggtgccaccagaggcgggtgccgcagccggcccagacctggccagcctgcgcaaggagcgcatcatcatgctcttcctcagccactggaggagatcggcctacacgccggccctcaagacagcggcctgcaggaccctaggagcccgccacgcggggttgcggggccaggaggccgccaggagccctgggccaccctccccgcccagcgagggcccccggctgggccacctgtggcagcagcgcagcaccatcacccacctgctaggcaactggaaggccatcatggctcacgtgcccgcccggcagctgcggcggctgagccggcagccccgcggggctttgtcccccgagcagtttctgccccacgtggacggggctcccgtgccctacagcagcctctcactggatctcttcatgctgggttacttccagctgctggagtgcgacctgccggcggaggagcggaagctgcgccacctgctgtgcttcgaggtcttcgagcacctgggcacccacggctgggaggctgtgcgcgccttccacaaggccgtgaccgacgaggtggccgccggccgccgggcctggaccgacggcttcgaggacatcaaagcccgcttctttggctccagccagcgtcccgcctgggatacggagcctggccgcaagtcaggcctgaccctgctcgggcccctgcctcacgccaccgtcccctgcagcggccccgagcccacagcacagcggctggggtcccgctcccagcagggcagcttcaacggtgaggacatctgcggctacatcaaccgcagctttgccttctggaaggagaaagaagctgagatgttcaactttggagaatgaccctactggcagcctgctttccagaatgtggtttgggggtgacttggagtttctcttttcttttccttgctcacacccttggtgttcaggtgagccgggcaaggctgcctccagtcctaccagttatcggaggctgcgggactgttctgttgtggcatggttctcctccgagctgggactcagactccttctcaccactgcacccaggaagccccttggcaggtcctgaagtgaggcaatgggccaccccagtccagggcacctctgcccagccggcccccgagacctgggatgctgcctgtttctcacttgtccttccccagtgtcaccagttaccttggcgtcctgtccctcagtttctgtggtgctggtggcctcggccacatccatctttcatgtgagtctgaggtggccccaggccctggtcctgcccctgtttctcctgctgaccttgggtcacaccccttcacctcccatctgtgaatttgggggagctggagtgattccgaggacagattccatgggcaggaggccttcctgccaggccatccctgctggtcacacaccgatgcccgccaggccagtgccccagcccagggtgctccggaggccctgcttcctcaaaggaggctccccatggggcccctgtcctccagcctgaccagccctggcctagtcgtgggccccagcaaggctggagagcagggacgtgggagtagcagtggctgagagagtcctccaggcagggtggctggtgcccactctcaaaggctgctgcacacagaggagaatgccggcaggggtgggcagcagccagacctcagtggggcgtggatactccgtgagggcacctgggtgtcacccacagtgcacctcttcacaggggcctgggtactggagggagggatacaggaagggagatggagtccgtcctcgggggctctgggtgctgcggagtattcctgggcatggtgctgggcatggctggcatagggtgtggcttgtccccagcttctgatggcagccaggagaatgggtcatcacccaggctctggggctgaggagggctgggcccaagcccacagggactttggaggtggggctctgcagctgtgagatggcccagcagggagtggcagggacgggaggcttcaggaatattcctcctggcatccaggccccctgggacagaggagggtgcagtcaggcgacaggcttatctggactccctgcctcaatccctggggattgtccaggcaaaacctggagggcagcgggcaagctgttggatggaacagagagaccctcgcagctgactagggcccaaggggacggacactcaagaagatgtaaaattgggaggggtggtattggccattggggcaggcagggccgggaagggaagtagcaccggccgcagccccaagccagtggcttttccacaagggcctaccctgcagccggcccgctccggcttcctccactgctgaagaccctgctgtagagctgaagctgaacatgtgtttgctaaataaagattcccattcctagcgc

SEQ ID NO: 157 - DNA, 3521 bp, Homo sapiens
gttgtcctcctccaagtagcggtaactgcgcaccttgtgctggggccacgggatgcggggctggcgcacgccccgccgcagcttctgctccatccgcaggtaggagaccgcggccgccaccagcgtcaccagcagcaccgccagcttagcctgggggtaaggagagggatgccagggagccgcggccgcctcgccccgcaccttccccgcctatgcccctcgctgagataggcccttccctcctccgggagcctcccgggccacgcggccctcaacttctccagcccctccatccacgcttcctggaccgcctcctgcaggcgaggctcacatccagcactgtcccttacagtcgtcatgcccctggcgacctcagtgtcccacgctgtaagggaacaatacaaatcccttcgcctcatagggtgcatgcgccagtgttgataaagtgctggacacaggccctgccttcccagggctcacaacactgtgtccctgacacacccgtgggctgtagtgatgctcttcatggggttttgactataatccgcagtcaggaatgattttacaccatagctcaggacatacacacatatctgtatgcatacttcctgctcttttcttttttccagacacagtcgctccatttccccaccgcgccccctccctcccttcccccacccactgctggagcgccagtggcacgctcacttcagcctcaatcttccaggctcaagctatcctcccacctctgtttcccaagtagctggaactacaggcatgcgccaccacgcccagctaatttttaaattttttgtagagacagggtctcctatgttgcccaggctggtcttgaactcctggcctcaagcaatcctcctgcctcagcctcccaaagtgttgggattacaggcgtgagccaccatgcccagcccactcactgcttttcttttttcttttttttcttttttttttttgggagacagagtctcgctctgttctccaggctgaagtgcggtggcgcgatctgggctcactgcaacctccatctcccaggttcaagccattcttgtgcctcagcctccagagtagctgggatcacagggacgtgccaccatgcccagctaatttttgtgtttttagtagagacagggtttcatagcctgttacccaggctggtctcgaactccagatctcaggtgatacacccacctcagcgtctcaaaatgctgcgattacaggcatgagccactgctcccggcccactccctgctatttttagttctatttttatttttatttttattttgagacggagtttctctcttgttgcttaggctggttggagtgccaagaccccgtctcggctaactgcaacctctgcctcccagttcaagcgattctcctgcctctgcctcccaagtagctgtgattacaggcacctgccaccacgcccggctaatttttgtatttttagtagagacaaggattcaccatgtcggccaggctggtctcaaactccctacctcaggcaatccactcgcctcggcctcccaaagtgctgggattacaggcgtgagccactgcgcccagcctttagttctatttttaaaaaatgtttagcaactgggacttgctagaccgagccaccatcttttgggagcagagcatgagaagcctgctcccgttcaggccatgaagggagacagacccaacatctggagaacagggtaccaaacagcccacaggatggctgtgatgcacccacaaatcccctcagagatgggcaaactgagactggctggaggtgggccagtaagtgaggtgctgagttgggggccacccagtgggctgcaggaatggggccttggcccagagactggcttgggaaggggtggcgtttaggaagctgtgaagccagggcaggggctaaggaagtatctgtcattcggcatggggcccccaaccctgcccagtctcaccttcatgtgcaggctcgagcccaggtacacagtgaagatggccacagcctgccaccagtggtagatggtgaagatgaagtcctgtctctccttgtcttcgtacaagactcccaggagtgctgcaggcaggcagtacagggcaggcaggggagaggtgtcacctggggcctggggctgccgagctaccatctacgaactttactaagccctgtatgtgtcccagcccgggaccagagagcgcctagaaagtgctgtgaggcggtcctggcctgccccctggtggagaccctggtcaccacactgctcacacgctaagcagaagtaggagcaggtgcgccgggctgtgtggctgcaggtggtcccgctccgcaccacatgcgtggcctcaaaagaagaaagctctgtgcttagtcatgtcctgtccccaaccccaggtgtacagtgccaagcttgcaggcgctgtttctcctcctcagccgggactagagagatcgaactgtttgcagctgccaactctgcaaatcaaacctgaagctaagcatggagaggggggcttcctttccagtgagtcctcccagggtgggcagcaagagtaatggattgggagtcagaagatgcacactcattctcaggactgtaatgttggctccgtgggtgatttgggtacttaactccccagagctgcttttcccaatggtgagatgagcttatgcctattgtgtgctgtgttctgaagttctaaagtgagaaagagggcatggcacctgccagatcataggggccactataaacaccttcaccaggcactcaggacatgaacactcctgtcttggggccttgcagggtgactttacccccacagctatactcactgctgagtccagtcttgttcagggtgctgcccacaagcccagcaggcccaggagtgaggcgactgaggcgcccaggctgtaagccatgaggaggtccactgtcctccctgtgtggtgcaccatggaggctcagactccgtcctcaaggctggcaagaagacaggatgagacatgagcctcctgatacaggtgacgggagtggagcccacaggactggaacctcacactgcagggctggaggcacagactgactatttactattctgtggcctggggggctcaaggcacagagctccttattagccaaagtcacccaagttccccaacctctaaggatttccttataataatgcaagaagaagaagagaaaagtgagtgtccatagaagctttggggctcttcctcgaatcaggagaaagctggaggtgttcttccctggacgccatggtgttccctgcacttgggtgtggaccatcttcttcttctccctgggctgactgagatgctaggtctgaccccacaaggccaggccgacattcctgagtgatcactaagaaccagtttctcaaccaccactgggattctgggtcctcctgggctgctgcctgttctcctgtgacccacctgtgagcaagaaggtctccttccttcctgttgtctccatctattt

SEQ ID NO: 158 - DNA, 3474 bp, Homo sapiens
atgtgcgtggtgaccggctcagatgatgtgtatgatgaccggctcagatgtgcattgatggccatctctgatgtgtgcgatgaatggctcagatgatgtgcgtgatgaccggctcagatgatgtgtgtgatgaccagctcagatgtgcatgatgactggctcagatgatgtgcatgatgatgaccagctctgatgtgcatgatgaccagctctgatgtgcgtgatgaccagctcagatgatgtgtatgatgaccggctcagatgtgcgtgatgaccggctcagacgatgtgtggcaacaggctcagatcatgtgtgtgatgaccggctcagatgtgcattgatgaccggctccgatgtatgtgatgactggctcagatgttcattgatgaccagctccgatgtgtgtgatgacccgctcagcatccagtgtgctattgccctggccaggagcaggagcagattgccgaccaggagccagctcccagcagtgccagccagcgccgcgaggtggcgccagggaccacacgaacggagagcgtttccctgcggctgctcactggccgggtctcccctgagaggcttgcttcgtccagcatctccctcccagtgtattgtaaccacgactctcctgtcttctaacaagcaagttaggtgcaggtggaagtgtggggttggggtgtgggtaggagaggtgccccaagcctccctttccccctgtgctgcagcaggcggctacgcgggtggaactgaactgtgaaaccccaaatccgtctccataaaggttttgtgtgtttgagaaaaaatgcctttgcactctgctatgttctatctcttgctcatatcacagttcattgtgtatattttacaactcctacatattttgggggcacaggtgcaattttgttacatgtgcagactgtgtagtggtcaagttggggctttggtctccatcacgatgcacttggaattgcaaattttggtggttctcttgcttggtagtttaggtttggggaaaggaaatgtgtgttcgttaactgataaatattcctatttagtaagtacatgtcaggataaatgagaaggaatcctttctcctcagagaagctctgcaggagtcagtgtctcagtcagcagcagcaggttatgctcagtaacaaacaaccccacatcagagatctgtagcaattgcgggttgatttctggctcatatgcatcttggttcctgagggtgttgtgctgtgctgttgccctcactcaggacccaagctcatagagccactgcccgatgcttgccagatatcgggaagagagggtgtggtactgcacacactgttggttctgcaaacttcggctggaagtgacacccctctgctcccattttgttgggcaaagcaagtcacgggatggtgcctaacttaagtgggtgggaagggcagctccccgtggctccagcaggaacaggagccaggagattatgaacaacctcagtgacagccacaagacacctgtaccaccgacattaccatgcacctgtgagtggccgggccctgcgctcactaccgtgtgagagttagcttatgaatcttcacaactccacaatgaaagacggtgaaatcacctgcccaggatcacacagctagtaagtggcagggctggaattcagggccaactggctgcaaggtccgtgtgctgagctgcctctctctgctgtgtgagtttggattctggaacaatcgttggcataactaaccactgagaaaagagacgggggtgaggaggctgccccagttttctttactgttagctctgtgatgtgctgttgttggctccatttcacagaggaaggtgctgaggctaaaagagtttgcccaaggtctcgcagcgggtccgaagtgcccgggcactatgggaaccctgttgcttgtcggtgtctgtttccaagacggcagaaagcctgaccatcgcggggccctggcgggagcgttgccatacaagtttccttccaccagggggagcacgtgccttctcagcaaacccgcgacctgtgagcttcagaaccgggaaggaggggacctggggcttgtccagcctggagccttttttttttaacagattcggaaaccgaggatcagagcgggggtgtgctgtcccccaaacacatgcgtactggttctcgttgtcatgcatgttggtggtcctggtgtctccacataccccccaccctaactcacacgtgcacacagactttcctgtgcccacacacgctcacacgcacatatatgtggatgcacaggcaggcaagtacacacgcatgtatgcacatgtgcacgtgtacatgtacctcactgggcctcatttcttcattcctaaaactaaattcctaattcctaaaagtgaatcagcacctgtgaggttggtttcgggtgagattaaaatcggtggcatttgccgtatttgggcggacaagtcatgaacttgacattttagataataattcagggagatgttatgataccacccattattaagcagaggagactgaggctcagagaagttaggtaacctgcctgagtgttcaccaatcgtgggaaggagagctgaagcttgaacccaggtgtgctgggtttaaatcctccctttttctccccctgagacagctggtcattgagggtcaggtgagaggtgctggagctgagaccccagcttgggggttgcgctaaggaatttggatttcatcctgcaagcagtggggaagtcgctgacggttgaagagaagctggagtttgatacagtggtagtgaggttttagaaaagttaatcagactgtctggaaaaagagaggctggtatcagggagcctggctggcaggggttacaggccaccagacccgaggtgcgaaggctcccatggcagtgggtagaagagagactttgaagagacagcgagaaagccttccagggaaggatctatgggaatcagggggctgtggagaagaaagcgggaagagagaagggagaagcagagctggctttgggtgggtccaggaactccctgccggcacccgagcagtcccaccaggggctcatcccgaggtgtctgggcaggaaggtgcctcctggtgaggggttccgctgcctcaactctcagatgctccatgcgctcctccagtttcccactgccaggatccccaccctgaactcgcctctggcaaactttgaatgggccatgcgttgggaggccgagacgggcagattgtctgagataaggagttcgagaccagcctggccaacatggcgaaaccctgtctctactaaaaatacaaaattagctgggtttggtggcaggcgcctgtaatcccagctacttgggaggctgaggcaggagaatcacttgaacctgagaggcagacgttgtagtgagccgagattgtgccactgcactccagcctgggcgacaagagcgagactccatct

SEQ ID NO: 159 - DNA, 3562 bp, Homo sapiens
agctctcgttgcccaggctggagtgcaatggtgtaatcttggttcaccacaacctctgcctctcaggttcaagtgattctcctgtctcagcctcccaagtagctaggattacaggcatgtgccaccacgccctgctaattttgtatttttagtagagacggatggggtttcaccatgttggtcaagctggtctcgaactcctgacctcaggtgatctgcccctattagcctcccaaagtgctgggattacagtcatgagccaccgcacctggccccaaacttttttttttttaagcaaagaaattgtttcctggataacctcacataaagcatcccagtatgtaaagcagataatagtgttggaagtgacaacctggaattctgtccatggggactcttctccttgtactccccacacagaaacccttcagcttatgcttccaacctcagtgtccaaagaaactttagacaaatccagccccttcattcacagatggagacattattgttagttgtagtaaatgttagctaactaccagtacttacactttaaacgtgcctggcataggagaatgattttatatgtctgatagtatcaaatccccacaactacctgataaactaagtattataatgaccctcattttgcaggtgagtaaacagaagtctagagaggtacaatcacttccgaaagtcacccagctggtaagtggtgaaggcagaattcagagcccagtgtggctgactcaatagcctgtgccatccacccctacatgagttgcccagggaggttagagactgtcccacagtctcataggagctgagcagggacaacgaggtggcctggtgtggagggaaggtcacgggtgtgtggggctggagctctgggtccaagatgttcatcagctgcctgtcctggctggtaagagactgagggtgagtggtcagtgagcatgagagggggaagggagccttgggagaccacactggagaacctggaactagggagctatagcaggtgtctgagctagagaattaatcctactgttggctgcacatcaatactgggacaataggcccagatgtgtcattcctaataatcacaatggggcaggatggtgctcaaagcactttactggcatgatcttaatcatcacaaagcctctatgagagaggtgatgtcatgatacccattttacagatgaggtcgctgggggctcagggaagtgaagtgctttgtccagggtcacgtggctgaagagtgggggagctgacacttgaagccaagactggctgactttcaagcccacatgcctctgtcagttaagtgtggtgatggtaatgctgtgtaacaaacaatcccccaaatctctgtgctgtaggacagtaagtgttgatttagctcgcatgtctaatgtgggttggctgagccaggctgggctcagctgggcagctgtgtgctcatccatgtgtctctcatcctgtcctgggatcagtggactagccttggcatattcccctcctgctcatggcaggagtgcaagggggtgagcagaaacacacaaagtctcttgaggcctagactcaggaccacacagagtcactcctgcctcattctattgaccctagcaagtcacagggccaaacccagggtcaataggtgggaaatggtactctgttcttttaacgggaggaactgcaaagtcgcttggcaagggtgagaatacaaagaagggtaaagaattggaggcaagttttgcattatatcatattgtctgtgctggtttaaaatatgttcacacagtctttgataattccttcaaaagatggagcctaattctacatctcttgagtgtgggctagccttactgactcccttttaatgaatagaacaaagtggaagtgatggtgtgcaacttccaaggcaaggtcataaaagacattgtggctccctcctcgctctcttgaggatcacccactctagggaagccagctgccatgtcgtggggatattcaagcagcccagtggagagacccatgtggtgaggacctgtgatctccagccagcagctgtgtgagtggcctatcttggaagcagctcctccagccccagttcagtcttcagatgagactgcagctgcagctgacatcctgactgcaacctgatgagagacccagagtcagaactgctcagactaaagttgctcctgaatttctgacccgcaggaactgtgagacaacaactgtttattgttttaagttgccaagttctggggtagatttgcttgcagcaatagatacgaatgctgtgtctaagtattctgccaactcactgctgccatagcaaggcccatcataacaagcgaggcttggatggaagcagctttgtcttctacccagagaaccagcaaaatcccaacaatttaccaagattatagaaccaaaaatacccatggaaactatagttgttaagaaacatctgtttttgagctgtctaaattgggtagttctcaaaaggaataaaaatgtatcagaggatggggacagctgggtggggactgatgccaactgcctggcaggctcagctggtcactcgggttccttctcagagctgaggcagggagaaagatccaaataaagatctgatggggcagattagacagagctgcctgtagcaaggcactgagggctgtgtccagctgcaggggcagtacttaagcttactgcacccctactatgtgccaggtgcagggtgggcacctgcatgtgaggaccagggattggggtgttggaagattttggcttttggccaggactaaagggtgagaggtagtatggagaaggaattaaggccctgtggagaggcctgggcttaaatcctggcattgatgtttaccagctctgaggcttgtacgtggccaatcacttaaacactctgggccagtttcctcaactgtaaaacgggcatagtcacagtgcctacttgatccatccttgtgttcctctcaggcttgctttgtaagactcctggactccttaggttttatcaatcctggtgcccttccattgtatcacatccttggatcacagtgatgggttcaggaatagacacatgacccaagggaggctaatcaggtgaatatagggagatgttctttctttcttaaggtggctacgtttaggacatgagccagggttgccagtgtcacccatcacatgtaccatatgaataactcttgtctaagatctggcaagagatggtggagcctaatgacattgttaaagatcctggatacagccatacctgaagcgtatccagaattccggctgagtatctgtactagtcaatgttctccaaataatatacacaggcataactcagagatactgtaggtttggttgcaggccacctcaataaaacaaatattgcaataaagtgggtcataggaatttttgatttcccagtgcacgtaaaagttacactatagtgtattaagtgtgcaataccattacatctaaaaaccactgtacataccttaattaaaaatactttattgctagc

SEQ ID NO: 160 - DNA, 4216 bp, Homo sapiens
tttaatgaaaacttgaaaaaaaagcctcattttaaaacaagctctcttaccattctcacattttagtttagaggttaaaaaatagaccagaattctggaaatagtatatcagaataaaattgagatatttctgatttatttgaggatcatcttgagaagggttagatttttaactcattcagagggcctaatatttaaagcaggatgattttatgcttagacaggggacatggtgaaatggcatagcaattgctcttcggtttctgttctttttctttatgagacaggtatgtttggctcaggcagcggctgtttgtttttcctctgcttatcactgtacatttttctatcaaatgctttggttgcttgttttattgagatccttttttggttttcttagcaatagaatgaaaacctcagaactctgggtaaattaaatgcaggtatttttaatcttttgataatgaagagctcttatcctttaaaagattcagatgtaatctttggcaatcactgatttatttctaggaaaccccacttgtgaactttctatctgtacaaccctagggacctgggactccctgtttcttgcgtggggtgattgagagcacacgttttcttcaaaagaaggtgtgtctctctttggcagtcccagtagcccttaggagacatgggtgggtgagggaaacagcacactcttctctcagttgttggaaaccggtttggtggttcccacagtctctggctctgtcactcttcttgatcgttggcaggctctcagccagttgagaatcatcactgctttagggacccgctactggttatgtgagtatgtagcaagcacaagttgggaatcgctgatctaagtaattatgaaagtaagctgttacccacccagaaggggtaaggtcgtgcataggatgacctggggtgggtctcatgtgctgccgtccctgtgaggtgaggggagtacatttcaagagcaaaattagcaaactcttgaatcatcataactgctgttgtggtagatattctgaataccaaaaattaaaagtgaatttaaactgtcagtggaaacacagcagtctgcattttaaaaacttagagctgtccaggcacatagaaaagttaactgtctgaggggaaatagaatgtggttaagtttaaagaatatgcttagtattataaatgttgagtgatgagttgtttaccatttataataaactgttaaatgtatttctgggaacattccatggcagcatattctgggttgttgtttatgtgttccaatgtagacaaattatatttgccttgggaaaaattctaagtaatcaaaattatatttaaatattaaaaaatcacattgaagttcaatttgtgttagctgtattaaatatcttggtcactattgttcttgtaacatttgcttttgacaacacattttgagatctaagaaaggtagtacattaacagtgcattaattaatgttttgttagaaactaaatgttaacaaaaagttttgtgtgtatgtgaaggtggcaacttccttttgtattatattaacactttttaaatgtattcagtcagtgaaaccaatgattattatagcaccaacactttcattcaaggaagcatttgagtcttataatttgttttgcatggtacaatggttctactaaaatatacttgtgtaataggtactagatgatttaaaaacaaaaccggagaaaccatttaaaaagttccatagcttgttatacaaaatatgcattgctaatagtagaagccatatattgccattgtactgttgtaatacttaacagtgctcatctggtgctacctgtagactatttggtattaacgtctgctagacccttcttcctatttcttcttgaatgtataatgtgtgccttttaagttacttctagtgttgaatggtaaaatctttgtggtatttttgtattatactctgcactttacactttcttggaaaggaaaattccagactatccagtttaaatagtcttttaaaaatatttataatgtttacaataaatattttacatattttaattcaacatctgcaaattagaaaaaatattttatatggtttgttgctatttaatgttgctctatttattttctatcttttagaatggttaaaatgagaatagcaatgtttgtcttttgatgtggaagtgaacttttacaaaaccatgggtataattggattgtcttaccagctgttccaacgtatcaaccttttattttagtcatgtcaatatgagttagatgttactctcagccacctgttaataatctcttcttactgtttttttctttttaaagtagactgatgaggtttaattgattgattcaggtcgggaataaatttccagggctaaatgaaaactatatagagatgttaatagttgctttttacctagactaaatacaaaaagtgactagaaagtattagattttttttccttttttttctttttttgaggcggagtctcgctctgttgcccaggctggagtgcagtggcgcgatcttggctcactgcaagctctgcctcccgggttcacaccattctcatgccttggcctcccgagtagctgggactacaggcgcccaccaccacgcccggctaattttttgtatttttaatagagacggggtttcaccgtgttagccaggatggtctccatctcctgacctcgtgatccgcccgtctcggcctctcaaagtgctgggattagaggcgtgagccacccggccgggccaaaagtattaacatttttttaattcaaaatcttggcttatgctgttagacctttttactagatctttactcctatcctcaacttttttctaattctctagcttttggtatgacatctcttgcctcaaaaatctcactttttaaaaactgacaaaacttactgcactattaacaacatctgtagcaatgagtgtgttataaggtggatgcaaggtatcttataggagataattttaaaatgttacaataataatcaaaaacagtattttatggttgaaatcttgagaacagaattatgccaagcatttgtataaggctaatgtttagcaggaagcattcatgatcaacgatttatcttgaaaataagattccttcgtctgagggattgatctgtatgtgtgtgtatatttagtttctcatgacaagaaaaatggtattcagtcagctataatatcagtatctataatctatttctcggtaaacatatttgtacatatacacgtttatttttctaatttaacagatgtccttggtatttatttgcattttgtcatagcattcttgctcatatgacctgcagtaaaacaaaaacaaacccaacttttaaatgcaaaactgattttaaagccattttcttttttttattttttattgaaacagagtctcgctctgttgcccaggctggagtgcagtggtgcgatctcagctcactgcaacctccacctcccgggttcaagcgattctcctgcctcagcctcccgagtagctgggattacaggtgcccaccaccacgcctggttactttttgtatttttagtagagacagggtttcatcatgttggccgggcggtctcaaactcctgacctcaggtgatctgcccgcctcagcctcccaaagtgctggggttacaggcatgagccaccacacctggccttaaagccattttctaggattttgttgttaatttttgtagagatgtagtctcgctatgttgcccagactggtcttgaactcctggcctcaaccaattctccccccaacccccccacccagcttcccaaagtgttggggttataggcgtgaggcactgcacccagctagatttttattttatgagtttaggaagcagtggattaggtgcattagttttaattacgcattaaagtttgagtaaaaaattactttttcaaattgcttttaattaaaagatagtattatttttccctatctgattatcagtttgtcttgattatcagtttgtcttgttaataacttgcatccatccaaaacattagtatttggttttagtcatttcttttggcctttatcaagggaaatatttatttaaagaaggtctcatttactccacctcatttagaatgacttttcccccccgtgtgttaataaacgtatttctttacattgcttt

SEQ ID NO: 161 - DNA, 3996 bp, Homo sapiens
acatttgtcctgagtcacctgtccagagcaggtggtgaatattgtgtcctactcacggcatctcaactatcggagcctgggatctgactcaaaggccggcctccgtctgagaactgagcgtccatttctcaatccttgccggctctgacccaggcctgggccacaggctgtccgggaataagtggtgctgcaatccctgctgggcagatggagagaggagcaagggagatggcagccccgggggactgtccagcaggaaaggctgcgggaacttcgagaccaacacggtccctgagcacagctcagctcgtgcagccatctgggggcctccaggcttcagtcatctccaacatcgtgctgatgaagggccaggctaagggtctgggcttcagcatcgttgggggaaaagacagcatttatggccccattgggatttacgtcaaaaccatttttgcagggggagcagcagcagccgatggaaggctacaggaaggtgatgaaattctggagctcaatggtgaatcaatggctggactaacacatcaggatgctttgcagaagttcaagcaagccaaaaaggggctcctcaccctcaccgtgagaacccgcctgacggcgcctccttccctgtgcagccacctgtctcccccactgtgccgctccctgagctccagcacttgtatcaccaaggacagcagctccttcgccttggaaagcccctcggctcccatcagcaccgccaagcccaattacagaatcatggtggaggtttctctgcagaaagaggccggcgtgggcctgggcatcggcctgtgcagcgttccctacttccaatgcatctctggcattttcgtccacacgctgtcaccaggatccgtggcgcacctggacggacgtctccggtgtggggacgagattgtggaaatcagtgattcccctgtgcactgcctgacgctcaatgaagtctacacgatcctgagtcactgtgatcccggtccagtccccatcattgttagccgacatccagacccacaggtctctgaacagcaactcaaagaagctgtggcccaggctgtggaaaacaccaagtttggaaaggagaggcatcaatggagtctggaaggtgtcaaaaggctggaaagcagttggcacgggcggcccaccttggagaaggaacgagagaagaactcagcacccccgcatcgcagggctcagaaggtcatgatccgctccagcagtgacagcagctacatgtctgggtccccagggggaagtcctgggagtggcagtgctgagaagccgtcctctgacgtggacatcagcacacacagccccagcttgcctctggcacgggagccagtggtgctttctatagcatcctccaggctgccccaggagagcccacccctcccagagagccgggacagccacccgccgctgagactgaagaaatcctttgagattttggtgagaaagcctatgtcctccaagcccaagcctccacccagaaaatactttaaaagtgacagtgaccctcagaagagtctggaagagagagagaactcctcatgctcttctgggcacaccccacccacctgtggccaggaagcgagagagctgctgccactgctgctaccacaggaagacacagcagggagaagccctagtgcctctgccggctgcccaggacctggtatcggcccacagaccaagtcctccacagagggcgagccagggtggagaagagccagcccagtgacccaaacatccccgataaaacacccactgcttaagaggcaggctcggatggactatagctttgataccacagccgaagacccttgggttaggatttctgactgcatcaaaaacttatttagccccatcatgagtgagaaccatggccacatgcctctacagcccaatgccagcctgaatgaagaagaagggacacagggccacccagatgggaccccaccaaagctggacaccgccaatggcactcccaaagtttacaagtcagcagacagcagcactgtgaagaaaggtcctcctgtggctcccaagccagcctggtttcgccaaagcttgaaaggtttgaggaatcgtgcttcagacccaagagggctccctgatcctgccttgtccacccagccagcacctgcttccagggagcacctaggatcacacatccgggcctcctcctcctcctcctccatcaggcagagaatcagctcctttgaaacctttggctcctctcaactgcctgacaaaggagcccagagactgagcctccagccctcctctggggaggcagcaaaacctcttgggaagcatgaggaaggacggttttctggactcttggggcgaggggctgcacccactcttgtgccccagcagcctgagcaagtactgtcctcggggtcccctgcagcctccgaggccagagacccaggtgtgtctgagtcccctcccccagggcggcagcccaatcagaaaactctcccccctggcccggacccgctcctaaggctgctgtcaacacaggctgaggaatctcaaggcccagtgctcaagatgcctagccagcgagcacggagcttccccctgaccaggtcccagtcctgtgagacgaagctacttgacgaaaagaccagcaaactctattctatcagcagccaagtgtcatcggctgtcatgaaatccttgctgtgccttccatcttctatctcctgtgcccagactccctgcatccccaaggaaggggcatctccaacatcatcatccaacgaagactcagctgcaaatggttctgctgaaacatctgccttggacacggggttctcgctcaacctttcagagctgagagaatatacagagggtctcacggaagccaaggaagacgatgatggggaccacagttcccttcagtctggtcagtccgttatctccctgctgagctcagaagaattaaaaaaactcatcgaggaggtgaaggttctggatgaagcaacattaaagcaattagacggcatccatgtcaccatcttacacaaggaggaaggtgctggtcttgggttcagcttggcaggaggagcagatctagaaaacaaggtgattacggttcacagagtgtttccaaatgggctggcctcccaggaagggactattcagaagggcaatgaggttctttccatcaacggcaagtctctcaaggggaccacgcaccatgatgccttggccatcctccgccaagctcgagagcccaggcaagctgtgattgtcacaaggaagctgactccagaggccatgcccgacctcaactcctccactgactctgcagcctcagcctctgcagccagtgatgtttctgtagaatctacagaggccacagtctgcacggtgacactggagaagatgtcggcagggctgggcttcagcctggaaggagggaagggctccctacacggagacaagcctctcaccattaacaggattttcaaaggagcagcctcagaacaaagtgagacagtccagcctggagatgaaatcttgcagctgggtggcactgccatgcagggcctcacacggtttgaagcctggaacatcatcaaggcactgcctgatggacctgtcacgattgtcatcaggagaaaaagcctccagtccaaggaaaccacagctgctggagactcctaggcaggacatgctgaagccaaagccaataacacacagctaacacacagctcccataaccgctgattctcagggtctctgctgccgccccacccagatgggggaaagcacaggtgggcttcccagtggctgctgcccaggcccagaccttctaggacgccacccagcaaaaggttgttcctaaaataagggcagagtcacactggggcagctgatacaaattgcagactgtgtaaaaagagagcttaatgataatattgtggtgccacaaataaaatggatttattagaatttcatatg

SEQ ID NO: 162 - DNA, 4470 bp, Homo sapiens
atgtcagaaacatccgaggactacagagaccttggtgataagtgtgtctttctttctctcctcttcttcctctcctgcatggcctccctctctgccagcactggaaagtcctgtttgatcagatgagcaacaagcgttccaacagcttccgccaagccatcctgcagggcaaccgcaggctaagcagcaaggccctgctggaggagaaggggctgagcctctcgcagcgacttatccgccatgtggcctatgagaccctgccccgggaaattgaccgcaagtggtactatgacagctacacctgctgccccccaccctggttcatgatcacagtcacgctgctggaggttgcctttttcctctacaatggggtgtcactaggtcaatttgtactgcaggtaactcatccacgttacttgaagaactccctggtttaccacccacagctgcgagcacaggtttggcgctacctgacatacatcttcatgcatgcagggatagaacacctgggactcaatgtggtgctgcagctgctggtgggggtgcccctggagatggtgcatggagccacccgaattgggcttgtctacgtggccggtgttgtggcagggtccttggcagtgtctgtggctgacatgaccgctccagtcgtgggctcttctggaggggtgtatgctctcgtctctgcccatctggccaacattgtcatgaactggtcaggcatgaagtgccagttcaagctgctgcggatggctgtggcccttatctgtatgagcatggagtttgggcgggccgtgtggctccgcttccacccgtcggcctatcccccgtgccctcacccaagctttgtggcgcacttgggtggcgtggccgtgggcatcaccctgggcgtggtggtcctgaggaactacgagcagaggctccaggaccagtcactgtggtggatttttgtggccatgtacaccgtcttcgtgctgttcgctgtcttctggaacatctttgcctacaccctgctggacttaaagctgccgcctcccccctgagggctggaggcccaaggtcggggaggggagggaaaagcagcacccacagggagcgcctgcgaggtttcttctcatcaccagctcagctaggccgggcagacaaggacagaagactctgggccactgtaatgtttgtgtttagatttggacacacagtggagacccttttctgaaaggcatctggcggaggagttgatgtggctgctgtcgtttttctcggctgctctgatgacatcgggccagggtgaaggtctggggtggggtgtgagagtggccctccctcacctgggctgggcttcttccatggggccagggggtgccccctcactgctgcggattgagcagcagcttcttcctcctcctctaccctcagagaccctaagagacatgggaaggctcgaaggttgttgcgtccaggcatggcccctctctagctcagaaataattgcaggccatgtggtgtctccttgacacctgctgtgtctggggctccagtaagaagagggcctactggacatgtcagctgtgacctggctgaaaccagggtgccctcctgggctggttggtgtgcaccggggcatgatctgttgtgcctgggttgggcagagcagggagcctgtaggctctaggacccctcttgtgctgggggtacccagtgagagggacccatgcagggggaataaacttcattccaagttccaccctggagaagacagacccaggaccagcttcagacttctccctccctttcttccaggatattggcatctcacacgggtgccccagcctccatgcccagccttgttttagggtctttttctttccttttgctgccctgacactactttgtgcctctctttggttatggagacagtgttttgaaacattcatgcgtgtgtgtgtgtgtgtgcgtatatgtgtgtatgtgatgggaaaggtaactggggcacgacagcgcctgcagagaaggcatggaggatgcagggggcccatgtgggcatccgtgagaggtggcagaccgtggtgtgctgtggttgctgaatgtccttgctttgacaaagcctgcccccttccttcccatctcctgtcccttccacacctgcccctgagcatcactgaccggtggcagaatggccctgctggagggagagctcaagccctccaaggatccctggatgctgaggtttgccaggttcagctcttgtttccgtctgagatggccttcatatccaaaaaggttccatcctatctcccttaggagagaaagagctttgggggcgcaagagaggctggggtaggaatgttgaggccatgtgtccatttaagttagggggacaggaggctacaggaagaggaattccagtttagttggaaaactttgcctcaggagaattgttgggtgcatggatgaacctcagagggagggcagccagtagcctcggaggcttggatgcgggagagaacatggtggttatcaaatccaccccaccccattacacaggtgagaaaacaagatggagggaatgaccctcctaacaggagctggtgcaggccccgaatggagggcatgaggatgacctttgacaaaagatgacactccctttatcgtgctcttggaattctcaaccactgacagcccagaagaacaaagaacgccaggcctgggaggaggcaggggggctgggcgtgtccagaaacaggggcaggagtgtgggaacggtcttcctccagcctggtgcccatcctggcccttgagtgtagcagggtccagggtcagtcaggccaggcatttggggtcttgggccacagtggcttcccatcctggtgactacatgtaaatgggctcactcactcactggcaggcgaggcccagccataccgcatcttggcccactgctaaatagattgccctggcctcatccacatatgtagttccctaggtcctgctcccctgcaccagtgccatgctgagggccgcagcctgtggcactgtgggcccacgcctttggcggtgttgcgtcagcctggggcgtcttgtgtgtgccctgcccaccgttctctgccctagtgatagaaagatgtagatggaagtcagtgcctcagaggaggaggctctgaggctgtggagctgggctcagggaagaccaggggaggatgcagatggagtcaggacattgctgcctctgcctgggctgcagccgcactaagctgagcgatgaggtcctttcctggagggatggagaatcccctccagattcctgtcctggcccctggggattctgtggtgtgggtggaatgagcagagtgccacctctgtctggtatgacctggagagggggcttcctctcttaggggtgagaaagcattgaactagaagattctagaaatccctcatagaagcactcagctccctcggggactcccagggaagcttgttactgagaaggacagtggaggcggaatcgtgtctcccaccatgttaagtgtgtcctctgctgccaaggaccctcgtctacaccttagaccaccagccccagctgttctctgtcagcacacccacctccatcccctctcccaaccatgacttccaagcggggccacagggtggggtcatagggtcacttcacctgacccaggcctctccccaggtcaggaggcagctgtctggtcagaggggttctctttgtggcatctggctttctcctcagcaggtcccaccaccctctcagcagcacttccccatggccaaggctggccgtgtcctctgtgcctctttccttgtctgaggtggctgccagcccagggggtggtgtgtaaatcttcaggctggtggaggtaggttggccttttatccacaggatacagaaactgaaagctggggaatccccaaacagcagccatagactcactggctctcattaaacgggagaggaatcacagaaactggggaagggaaaacaaaccttcaaaggagaaatttcgctttaatgacaccattcatcattcgttttttaattaggaaaagctccctaatgaggctcttttgccagctaataggactctcgatttccatgagaaccattcttgcccagaggattaggggagctgttgctcaccacaccaggatcttcccccagcgtccaatttaatttgcaaatacgtaatgcagattccctgggtgccgtgaaagcctttcctggcatcattcatgttgctccccgtgctggctggaaagcacggttctcctctgccttaaaaacagtgcccaacagtgaactgcccctccgaggacttgagtaagtggaaaaaacaaaacacagactgcaatgtttgtttctaagtatttttgtattgtgtacattctgtatatttttgttgtaacatattatttgagcacagattccattaaatattttttttctttttc

SEQ ID NO: 163 - DNA, 5053 bp, Homo sapiens
gagctggacaaggtgtggcagctgcaggcagccgggatagggacgcagactttcctacagggagaggcactgctgagaccggggcccacgtgggaggggctgtcggtcatggccagtctcaatgacaccctggttctggaggggacaccattttctctaggaaacacacatggactgttctgggtgcagggaagtccagtcggcgactgactcttaagtgattcaggaggaagttctttgtactcttcttccagcttttctgtaactgtgattgcctcagaattaaagcagaatggccaaggaccccacagagagagtgacccccccaaaggaggtggcaccttttcagaggagtgaggctggggagagggaggcgtccgaggcactgcgagggaggaggcaggcggtgtcccctcgttgtgctcccgctctggccccgtgttgagttttcagccgtccactggggccccttctgtacacatcttttgtagtcaggatggggagcaccttgtaaggtccctcctgtgcgacctgctgaagactggggagctctgggagcaggcaggtatttgtgctcatggtgaagggagaggggctgtcctctcctggagggcagggtcaggacttcctcactgtgcccttggcacctgcaaggtagccggctgtcatgagcggcttgttgaatgagtgacagcttaaatgaggctttgagagtgacagtagctggcacttagagtctgcagctgtgccaaccctgtcgctccggggatatttccacccacactacacatcaggcaccaaatgtgtgggttttccacaccaacaattcgccagtcctctgcagacaccagccaggcatcctgtaattcagttcagtctgaccctgccgcggttatcagggaccccagcgttaggggctcagtcaccccccacttcagatgctaattgcaagtagtgggtccctggggtacccacacttctgtccatcttggctacacattgggagttcctacgaccccttcaggtttgatgatttgcggtagtggctcacagaactcaggaaggcacttggtttgcattgccagtttactataaaggatgccacagcgggcacaggcaggcagctgggtgaggaggggcacgggcgaggcccagagggtcctaagcataggagcctttgtccccagggagttgtgtggctggccttacagcacggggatgagttcaccaaactgaaagctttccagagcccctagttccaggatttccatggaggcctcatcatggagacatgatcagttatgaactcagcctccagcccctctgccctttttggagggtgggggtggggccgaaaggtccaggcttctcatcgtggcttggtctttatgatgaccagccccctcccaaggccatccaggagcccaccaagaggtgcctcattagaacagaagactctcctgtcacctgggaagtccaagggatttaggagctctgtgtcaggcacccctatcgcccctgtcactcaggaaattaccagcgttctgagagctctgtgtcaggagccaggagcaggggccaagtgtgttcttctcattctatcggtgccgcagccagggccgcggttgtgcagccgtgtggatcagctcagcccgtcctcacccagccgtgtgaggaggccgaggccacacaggtggatggccttcccttagagttactttccagagcctgggtgcttagccgctatgccccatgtttaatattcttgtgttccaatgtaacaactttaaaattacacaggataacactcttgataacattttaataaatgggtgtttttcttttcaagaaattttgacttgcacttcagatttcctttttaatattttcgttgagcggatccttgctattccataagaggatgtgtccagtgttgtggaagatttcatgttttaaatcctttgtacagaaatcctgctcccaagtcacagataggctgacgggtcagagggcaagacgtgacccagggccgagagggtgagtgaccaggaaaatcggattcatcagttcacttgtttgtttcagaaacgtgcacaaagacctgctgcatgaggccctcgtcttcagtttctgtttcatgcccagcattaaaccaagtatctcattttgccaatttgacttctgtaggggccatggcacctgcaaggtgtttctcagcaagattgaggaccgtgtttcagggcgtggggcattgggctttgtccacatgggctggcctgaagcccagccggctactgccacagcgggcttctcccaggctgctctcggtcggccgtgcggacctcgccaagcatcaggaactcccggggaagaagctgctctctgagaaaaagctgattgcacctaccttagtgacctacagaacagctttcctagccgggcacagtggctcacgcctgtagtcccagcactttgggaggccgaggcgggtggatcacgaggtcaggagatcgagaccatcctggccaacacgaaaaggtactttgtggactatcggagagtgcttgtctgtggaggaaacggaggcgctggggcaagctgcttccacagtgagccccgcaaggagtttggaggccctgatggaggggacggaggcaacggtggacacgtcattctgagagttgaccagcaagtcaagtccctgtcgtcggtcctgtcgcggtaccagggtttcagtggagaagatggagggagtaaaaactgcttcgggcgcagtggcgccgtcctctacatccgggtccccgtgggcacgctggtgaaggagggaggcagagttgtggccgacctgtcttgcgtgggagatgagtacattgccgcgctgggcggggcaggagggaaaggcaaccgcttcttcctggccaacaacaaccgtgcccctgtgacctgtacccctggacagccaggacagcagcgagttctccacctggagctcaagacggtggcccacgccggaatggtgggattccccaacgccgggaagtcctcactgctccgggccatttcaaacgccagacccgccgtggcttcctacccgttcaccaccctgaagccccacgtcgggatcgtccactacgaaggccacctacaaatagcagtggccgacatccccggcatcatacgaggcgcccaccagaacaggggtctggggtccgccttcctcaggcacatcgagcgctgccgctttctcttgttcgtggtggatctttctcagcctgagccgtggactcaagttgacgatttaaaatatgaactggagatgtatgaaaagggcctgtctgcgaggccccacgcaatcgtcgcaaacaagattgacctccctgaagcccaagccaatctgtcccagctccgggatcacttgggacaggaggtcatcgtgctgtcggcgttgaccggcgagaacctggagcagctgctgttgcacctgaaggtgctgtatgacgcctacgcggaggccgagctgggccagggccgccagccgctcaggtggtagccacgccagagcggggtcgcctctgggcctctgtctgagcaaacctgggtgtgaattcggtggttttgaatgcataaagtgccttgtggacacgggggagttgtggtgcttctgggtctctgggccccgcctgctggcctgggatgccctcatgttgggaagcattccatgccccccaccccgcctgccctccgtatttcctgcacctgtcagcctgcgccgactgatgagccagttgctcatttgtgctgattaacacccctaataaggggttggggtgcccataacggggtggccctgccgctgactcgggtctccgccatgcacgcgtggactctcggatgagctcagcagaaccgcacagccagagccccaggtcagaagtgcagaccagggttctcagcacagtgcccgtcgtgcttccatggcttgctacggagagagacctctggatccacactggggctgcgtctggcccgttgtccagcagccctgcggtaccgcaagcccaggcaccagtgtctcggggggcctcactgctgcgcaaggggtggggccgaggatgcaagtccaggcagagcggcgcaggcagctgtgagcttttctccatcagccgtctgagaagagcagtgaggccagctgcttcctgtccttcagaacacttctctgtgctcagtgggagccaggaagcctcaggcttcacgactgaatgcacccaatatccgacctggctgcgtgtttctggctgggctgccgtgtgcacagcaagttaactagaggggctgtgggccatggaactgtcagcgttattctcagaaggcggccgtggcatgggcagggtatagtgaggagtggaaggagacgtgtgcctggtaatatggggcggaatttccactcagctccatttgctggggatttaaagagaacccttgtgctgcgccaggcagttaccgagccgaagggagatgatgggccttcgcccctcagtgggatggcagctgagggggccctgcatttgaccctcgagactgcagcagtgcctttcctgtctgtggtttaagtctttgcagtcaagtactgatgcatccaagccaggcctatgcctggtgtctccctgactgcagaggagccccagggcaaggacagctcagctgctggcagcctgcctggcccatagacatcccccaagtagtctcaggcctctgacatgtccctgaggggcccctaagaaagaaagtggaggggacactccagaggctgtcgtgggaggatcatgtgagcctgggaggtcaaggctgcagtgagccgtgattgcaccactgcactccagcctgagtgacagagcgagaccctgtctcaaaaaacaaacaaacaaaaacagaacattctgggcacggtggctcatgcctgtagtcccagcactttgggaggccgaggctggtggatcacaaggtcaggagattgagaccatcctggctaacacagtgaaaccccgtctctact

SEQ ID NO: 164 - DNA, 5146 bp, Homo sapiens
aatgtttccgtaagtatctgcacaacggcttcacttccttcccaggccgcggtgctcaaaccacaaatggcgtgggctgggctcaggctcacgttaggagtacatcttcctccctttctcttctggtgggttcgtatgggggtggggaagtgggtgggagagaatgttttgcattcattctttttgaatattagtcaaattgggccgttaaatggaacatcccaaattttcataggtactttcaatcctagttgccattctttctgactataatctttcatccaaacgtgacacaaatgtgtaatatgtgcttgagagccatgacttggtgggcttgcaagaggacaatggacacccgccttttccacatcagctgggcaggatgcagacaggggcaccctctccctctattttcaaagtcctcaaaatggcaaaaatgtggctagggtcctatctgtgcattaatagacaaaagaagcagagagaatgactagggcattatatgttattttcaaagaagcagttgttgacacaactagggaagaaatacgaaccgatcctccagcacacacgtaacactgaaaagcagtgtttagacattatttatttttatttttgagatggagtgtcgctctgttgcctcagctggagtgcagtggcgggatctcggctcactgcagcccctgcctcccaggttcaagcaattctcctgcctcgagtagctgggattacaggcgtgggccacagcacccggctgatttttgtatttttagtagagatagggtttcaccatcttggccagactggtctcaaactcctgacctcaggtgatccgcctgcttcggcctcccaaagtgctgggattacaggcgtgagccaccccacccggcctagacattgtatttttatatcacctttcacaacctcaagatgcttttgtgtgtattatgggattgtatttatggccttgtccctgcattgtggatgtcaagggccagttgccacgtgcttagtcatatacctaaactcagggaacacacacacgcatgcttatggactcacacacactcacactcttacccacactcattctagccacactcacactcatatatactcaccaatacgctcacactcacacatatccttacacacccacactctcacatacccttacacacccacacacccttacacactcacactcacggtagccacactcatgtataaccaatatgctcacacatgtacccttacacacccacactcatactagccatactcacactcatatatactcaccaataagctcacacacatacccttacacacccacacaccgccttacacacacatactcgtacacgcccacacacacccttacacacccacacacatacccttacacagccacacacatacccttggacacccacactcactctagccactcatatatactcaccaataagctcacacacacatagccttacacacacatccttacccacatttacacactcatacccttacactgtcacactcacatgtacccttacacacccacactcacacacacccttacccacactcacacacacccttacacacccacactctcacacctttacacacccactcacacacatacccttacccccacacacccttatacacccacactcacactctagctacacccacactcatatatagtcaccaatatgctcacactctcgcactcacatgctgtcgtgctcgctcacataccgttgcacactcacatgctctcacacactctcacggtgaaatctgtgcctgccaccacactcaggttgcgatgtgtgtttcacttttagctcctctaaggttttactcacctggctccaccaaactggattttaccatagtctatacttaaatactgttcatctcttcttctacacaaaagtattaagaatttacctgcctgcaagttattggaatatcctgggcaaaagcaaataaaactttcccttttcccttgtttgacaccccctcatcagtgacccccacgacacgaccccaccaccctatctggcttggcatgtgatgcttcaggaagggcacagggtttccacggctcctgttaccctcttaagcctcagaaaacattggcacaggcagagaggagagctgtcatctgagtctctctgtgggatcctgggctcttagggaaaggccagacagggaggggcgggagagatttctgtggcctccaagattcctgggaaggcgaagtctggatttccttggaggggaaggagggcttaggccagccacataattagggtgcagtagacaaacagaaatcatttcttttggtccctcatctgcctcaaggctgtgtttgctccacatggccgcacaggcacttgcgtctgtgccctttggggctggcagagatggaggagaaagccttaagcaccatctctcctgattagcgctccacgcagcttctcttcacagcccctcccacacactgtgtcccactactcagacacatgggccgtgggcacagagggaaagggaccttgggaagaatagggagccaagccactcttcaccctcccaggtgtcgcccatagtggggcacatggggacacggtggccactcaccccctgccactgagtcccacagtgcagctgggcctgtggtcagatgccacagggacaccatagcacccgtagagtgtgtcatttccttggtgcacgagggccggatgatgtccccagaggctcactggcttcccacagcacagagggacctggcaccgctaccctaagatggaattgttaaaactacctccatttttatttttaaaagtatgatgtcaatgcataaaataaaaattgctttctgtcagatgcttctttattcaagcccctaaagaaatgttttcttgcctaagacagctcatattaaaatgtctaaagcccaagagaagtctaataaatttcagctttatgactttgtttactctgggtgtagaaaaagaattcttttatacgtagcctagtttccagaacttccagggtcaaaagttaacaaatttggggaaaacagaagagaaaagatagcatacagtattctgttttcctattaaaatgaggaaaacaaaggagtcatcagaactataatttacgggaaagtgtgcagacatccatctgcttttattgaaaaaataccctgcagatgttgggcctaattatgaatcctccattttcttgatgaaaaactttagtggcatctcaatctctgatcggtaaactgggtgtcgtagcacttacaaaatagaattatttcattgatctttagccatctattatttttttgtagatgagagagcattcagcatgaaggctgtttctatctgaatactaaatgttggtttcattcccacaggttcacagcaaacaggattcctaaatgcccttaaggacagtcctgcaagcgtcctggaggctgtggtgtgcttcttctctgtctggtccatcgttggcctctcaggattccacacctacttgatcagctccaaccagacaacaaatgaggacgattatctgcctgcacttaatacagatggagaggaagtatgaaaataggaaacaaggccgggcgcggtggctcatgcctgtaatcccagcacttcgggaggccgaggcaggcggatcacgagattaaaggatcctggtcaaataaaagaggtaaagaaaattacaatccctacagctacggaaatatctttaccaactgctgtgttgccctgtgtgggcccatctcaccaagcctgatcgacagaagagggtacatccagcccgacacgccgcagccagcagcaccctccaatggcatcaccatgtacggggccacgcagtcacagagtgacatgtgcgaccaagaccagtgcattcagagcaccaaattcgttttgcaggctgcagccacgcccctgctgcagagcgagcccagcctcaccagcgacgagctgcacctgcccgggaagcctggcctgggcacgccctgcgccagcctcacactgggcccgcccacaccgcccgcctccatgcccaacctcgccgaggccacgctcgcggacgtgatgccccggaaagatgagcacatgggccaccagttcctgacgcccgatgaggcgccctcgccccccaggctactggcggcgggcagccccctggcgcacagccgcaccatgcacgtgctgggcctggccagccaggactccctgcatgaggactctgtgcgcggcctggtgaagctcagctccgtgtgacccacatggccccaggccgggggacaccagaggctcctccatgggcagcaggagtgagcggaggggtgtgtcccacagcgactttcccagccaatgccacggtggagatgacagccccaggtctggggtacagagaccacttaggatggcacagggtggctggccccggatgctgagagcttggtttcatttgaattttcttccccaacctgagtgctttgacaacaatggaaatagagaagtggctgctttcttttggtgaccctccaggggtggaatcggagtgtgtctgcccgcccttgtgacagacacacggaaggcttctgacgcttgtggccagactgcaattgcacttatgtgttatgctactaatatttgaaacagacctgccattccatttgttaattaaaaaaaaaaaaaatcctaaagggaaaaaaccgaccaggtgtggatctgcatgccacgctgccgtctgtgttacagtggtgttgctatttccaaggaagtgctgctttctttttctttttttaattttgtgaattttcaagtgctgttttgttggaagacagtgcaacgaactgagactaatggacagtgtcatcactcagcttactgggctgaggcgtctgtggagaggtggcaccggggctgcagagggcggctggggttccgtcgtgtcgggtgtcacttcaccttctgtttggccgctcgatgaggtctcgtgttgagatattgtgtgccacaacccccacagtcttcacctccgtgtgtgatgaaacttcccgtggacagccaataaaatgacgtcctctgtt

SEQ ID NO: 165 - DNA, 3425 bp, Homo sapiens
catatatttagggcacagggaaggaggagttgttggctgttaaaaaaaaaaaaaaaaaaagtcctgcaaatggcctttcaaagtctagacatcttcatcatcaacacaaacattcctcttcacaaagggacctcaagtaaccttaggctggagggcccacctgcgtatgtctttcttctcattctttcttaccttccctccagcccacacaactcacattcagtgaccaagtcacgtaggttttacctcctaaatctctcatatccttcactgctcagccactctcctgacaccaccataaaccaggccaccatcacctccagctgtttgactgcaaatgcctccagactggcctctgcttttccctggccctgtgacaatctgcactcctcacagggaccaaagcaatcacttcagaaggtgcatccaaacagatcactcaactttcaatggctccctctgctgtgtgggttaacaatgataaaagctcggccgggcgtgggggctcacgcctgtaatcccagcactttgggaggccgaggcggtcggatcacgacgttaggagatccagaccattctccctaacgcggtgaagccccgtctctgctaaaaacacaaaaaaattggccgggcgtggtggcgggcgcctgtggtcccagctgctccggaggctgaggcaggagaatggcgtgaacccgggaggtggagcttgcagtgagccgagatcgcgccactgcactccagcctgggtgacagagtgagattccatctcggaaaaaaaaaaacaacaacgataaaaggtcaccttttctgagcacacactatctcagtccatccctacatcagccctttatttcaccagtggggaagctgggacagagagtagttacgtgggatgcccaaggtgggaccactcgtgtgaagtttccacaccctaatgtgagaccctctatgacctagcccctgtctttctccagcctcatttcctgattctctcgcttgccctgcaggcttcagccacagaaacttcttgaaagtcccttaaatctggctgagcaaagtggctcacgcctgtaatcccggcactttgggaagctgaggcgggtggatcacctgagatcgggagttcgagaccagcctggtcaacatggtggaaccccatctctactagatatcccagaattggccacgtgtggtggacggcacctgtcctagctgctcgggagactgaggcaggaggatcgcttggactcgggaggcggaggttgcagtgagccgggatcgcgccactccacccaagcctgggcgtcaagagtgaaagtccgtctcaaaaaaaaagtcccttaaatctgctgtatgcctatcaacctcagggacttcactatgctgttcctcaccctgaaatgctgttcctcatttctccacatagtgaactcatcccaccccctaggcctctccttaagtgtcatctcttccaggaagattttactttttttaatataactattaaaatataattcaggtactgtatgatttgccaatttaaagtaaacaaatcaatggtttcagtgcattcacagagctgggcaaccaccatcatgatcaattttaaaacattgtcatcaccccaaaagaaaccctgtatctatgagcaggtacctgccatttcctcctcccactaagccctgacaatctacttttttgagatggagtctctgtcacaggctggagtgcagtggcgcggtctcggctcactgcaacctccgcctcccgggttaaagcgattctcctgcctcccgagtagctggaattgcagggctatgccaccacgcccatctaattttgtatttttagtagagacagggcttctgtcttcatagatttgcgtgttctggacttttcatataaatgaaatcttataatatatgaccttttctgactagtttcttctacttagcataatattttcatagttcatccgtgttgtagcacgtgttagtacttcattccttttgatgactgaataatattccattgcatggtcaaaccatgttctatttctccactcatcagtagacaagcatttgtgttgttttcactttggcgctattatgaataatgctgctatgagcatttgtgtacaagtttctgcacggacatatattttcatttgtttcataaactggagtggaagtggtgggtcatagaactctgtgtttaagcttttgaagaagtgccagactgtgtaagaaagaaagcctttcctcaccctgtgagactgagctccctctctccatttatacattctctttatgccctttgcttctctttcagagcaattcactttgacctgggtcaccctcaacttaaggctcataactcccctagatcctcagggtccacactaaatgtgatgaaatatgatgcaagccacatatttacttttgcattttgtagtaaccacattttaaaaagtaaaacaaaagaagtgaaggtaattggaataatatcagagatttaaacaaatctatccgaaataccaggtctacaagtataaaatattttaacattaacaaaatactttgctttctttttatattaagtcttttcaatctaatgtgtatttgacacttctcgcacatctcagaatgatggcagcaccccatatggggggccctcccatgatgccaatgatgggccctcctcctcctgggatgatgccagtgggacctgctcctggaatgaggccgcccatgggaggccacatgcccatgatgcctgggtgcccaatgatgagacctcctgcccatctcatgatggtgcccagtcagcccagaatgactcgaccagacagataaggatagaggggaggcctcatacatcagtgttgttttgttgttgttattgttgtgttttctttgtttgtaatgttttgttttatttttgagacacaatcttcctctgtcgcccaggctggagggcagtggcacgatctcagctcactgaaacctccacctcccgggttcaagcaattcccctgcctcagcctcctgagtagctgggactacaggcgtgtgcaccatgcccgactaattttttttattttagtagagacagggtttcaccatgttggccaggatggtctcaatctcctgacctcgtgacccgctcgcctcagcctcccaaagtgctgggattacaggtgtgagccactgcgcccggcctatatgagttttatatttacctgctcccttcaccaggagatcatgctgctgtgatgctggcttttcttaacagcataaggaagacttgtccccttgccctatcaaagagaatagttttggaggggagaagtgggaccaaaaaagatgcagtattcatttctattgggaaatatgaaaataaaattgtcaactcttttagtt

SEQ ID NO: 166 - DNA, 4983 bp, Homo sapiens
aacggcaagtgctcacggggcatgggtgattttgtctagtctggtccttttggacgtggtgatttcctgtcatcctcgtggtctgacattgcttctcactggatactggttgtggcctttgactcattagctgattgttggatctctttgtgaggttcgattttttaaaaatccatgggtccctatggactgtcacctgttgcagatgatggtgattctcttcttttttttgtctccaatagttgcctggacgacttcatgggtcagtccacatgattgcaggatttcccattgctcatctgtgaatgttgattggccaacctgtctgagctttcagcagatgcatccttgagcttactttcaggaattcctcctggaattggttttccttggtggtaatttctcatggtggagcttgtttctgaggcatggtacagtgctgcggaggcaaggcaaggctgtcatggtgattttcacagcatctggatggcaaattgccttcacgtagggaaaccacatgggactgatagctttctcaagggatctccaagcatctctgaatttggggatttcatcagttactcctggaatcaaaatgagtgtggagtcataatatatattttttttgggacagagtctcgctctgtcgcccaggctggagtgcagtggtgcgatctcgtctcactgcaacctctgcctcctgggttcaagtgattctcctgcctcagcctcccgggtagctgggattgcaggtgcgcaccaccatgcccagctaatttttgtattttagtagagacggagtttcactatgttggccaggctggtctgaaactcctggcctcaggtgatccacccacctcggcctcccaaagtgctgggattacaggtatgagccactgcccctggcctcaaaatctttaaggaagttatttatcgtcacaagtgttgtcatctgtgactcatgggccacttgatgaacctgaaccattagtggttgtccagatcctccaactttttcaggcagtattccaatcagggttttacgacaccagggtatcccaccttttttgcaacataggcagaaacaccaagctgtgggtaattgatgtgcgtgtcactgattcctgcaacagctttgaatgtattaaatctgttttcaacagcccttgcataggtgttatctctcaaatctctgtaaagagcactaagagtatgtagtgttgcatgatataatccaagcctgtgggctgtgtcatccgggattgttggaattttgcatgtgtctgttccatatcccgctggtaaccagcttacagaccttctgtcaggttggcttacattatcatcaacaggttgccgtagtgatgatatgatgctggacacaatcattgtgcactttgttaatttggtatggtggtgccacacattatcactgtacagcattaacaaggctggaatatggccctctgctgtagggggcgtggcacctgtgacttgcactggaataagtaggaggctttccccaaaggatatggagactgatgtgtgctccatatcttgaggggagctctcttggtttcctttggccgggtctgttagttacttttgaaggccatgccaacccttttaggccattaaatttttctcaaacaatagccagcctcatttctgcttcatctctgtggtaggaaccattccctactcttactccctcctcttgtccaacttccaccaaacactcaatccgagtcctggctgctttcttgcttaggtctgtggctggtaactgtggtgaaagagtcaaggtgggcagtgtttggggtaggaaatgagtagtggtgaagcagcagcagtgtgtgtgtgggtgtgggtgtgtgtgcatgcgtgtgcatttgcatgtgtgtatgttgacaaatgagagtgtagccataagatttcattgttactactagtctttgtgtacctatctggagggacattaaaaaaatatggccattctcccatctagggggttcccatctcagacttctctgataagagtaatttgagaacaaatacagattcatctatgggaaaagatgtttaaactcagcatgaaggagaaacaaatttaggagtggaaagcaaggcaggtagttaggtgatttccatgaccacatttgcttgggccagggaagtggtgcacctcttttataacaatgggagatttcagaaacagtttgagtgttggcagaccaatgccctgataagcttgtggtatagaggtaggaagggagggaggccagagattagataaaatgatggtgggtgggatcttagctctaaatgaaaagaactggacttactaagtgggtggattacttgctagccataacttttagggaagggtaggtctggagagaaggtgaagaccagcagaaatatactgtgaaattgccaaatatgtttggttgcagaaaacacagcctggctctttgtggctagatgtgacttccaacttctgaagacaggattgccaagagatgtgatctttccacatacagctcctgtccccatctctttatgtgtagagacctggatttggggtagtggggtagtaaaccatatatttccaaaagatggtgtgaagagtcgtttctcttcgtctgggatgtgattggcttctgttttttgttttttgtttttgagacggagtctcgctctgtcgctttgtcaccaggctggagtgcaatggcacaatctcagctcactgcaacctccgcctcctggcttcaagtgattctcctgcctcagcctcctgagtagctgggactataggcgcgcaccaccatgcccagctaatttttgtatttttagtagagatgggatttcaccatgttggccaggatggtcttgatctcttgacctcatgatccacccgccttggcctcccaaagtgctgggattacaggcttgagctactgcgcccggccagtgattggcttttaaattaatcacaaatgtttgataaaattctggtatgtgctaagtcccaggcttggttgatatctcagactatgatagctgtgaccttcaagaaatttctggcttggggaatctgtagtttctggttgtccaaaaaagatagttcttagtcctactttattttctacccactcaactctccagacttccctcttagtaaaggaattcataattctccctgcatcttctctgtttatttcaatgtccatgttctgagtctcaagttttcctgaagcacaggagcaggcttggccccagagcccctggctttttcaacgagcatcagaaatgctatcaatatattctctctgttgctttatcagtttctctaaatttattttgtaaggaagttagcacctccttccaggactttaaacagttgtctttgccaatttgttcctggattttccttgaacttctcaggtttccaagccacatcctagcagggcatccaggagccttgcactgaacctctcagctcttttgactttcttctggtcataggtgttgggcctcccattaggtagaagtcctttgagcagacccgaaatggccaaatgagacatcatccaagttcctccctcctttactgtctcggctttttcaagcacccctttcacctctcttttctgccttttcctcagtctgtcaagttctttggaggaaagaagttcttggtcagaggtcctaaaaccaccaccagctgggggtgctgagaatggtgaggagttggacagtcccggggcttttttgaaaggggactttatggtcatttcccctgtttagggtgagggactaagaattctcaagccttcagtttcatccatatttcaatgtaagcagaaaagcacatctcaaagccaaatagaaatgattttctactaagcctatcctttgtgattcttggttcccttggtctcttaatattaattatagagaatgggcagttgagtcagttaacatcttttcatcagaaaggagggtaatattcataaccaaaagagatgtaaaggaagtatattactgcttgaagtgtgaaaagaggaaaggagtgttatgtgaaccttttcagtagggaaattcagaaaatggaatgattcatccataggcataattcttttaggagattctgtgctcaaagggaagggaatggtttctgatccttctgaagagaaaaggaatagcatttttcttaaacctaacccagtttcagcattggagaatacagaactttttcttctagctgatggcattaatatttcttgagagagagaactcacccatggcacttttctgagcccagcagaaatcagcggagcttgggcttcgcttagcaggtttgcaattgacttcaacatgcaggcttttcacatgtgcaataatgctggaaacagaagcaccaaactgattgtgcaattactccttttgtagaagaggccaaaatcctcctcctccttcctttctcctatattcactcctccaggatcataaagcctccctcttgtttatctgtgtctgtctgtctgattggttagatttggctccccttccaagctaatggtgtcaggtggagaacagagcaaccttccctcggaaggagacaattcgaggtgctggtacatttcccttgttttctatgttcttctttctagtgggtctcatgtagagatagagatatttttttgttttagagattccaaagtatatatttttagtgtaagaaatgtaccctctccacactccatgatgtaaatagaaccaggaataaatgtgtcattgtgataatcccatagcaatttatggtaagaacaagacccctttccctcaccaccgagtctcgtggtctgtgtctgtgaaccagggcaggtaattgtgacactgcatctcatagaactctgcctgcccagatttttgtgtgctcacctcaatgggtgaaaaataaagtctgtgtaaactgtt

SEQ ID NO: 167 - DNA, 4000 bp, Homo sapiens
agtgttatgatgcagttccacaacacacagccacattcacccacagaccgaggagcggaaagagaagagagaagagtgagcagagagattgagagattgagagagagagagagagatagacggagatctctggagcagacctcaaggtgagggggcagcccttctccaaatgaatttttttctctttgcaaatttcctcctcctgctgcgtgttgctttctcccctttgcaaaagcattattcatccaccctttgtcctcccttccccctccccgctgcctccgctcctctctctcggttcctccatccctctccaagctctgacgattcccgcacttatttcccggcaactttggctgcagcatcaggcatcactgtttattgttttgctgctggtgcagacccccaaagcctgccctgggagctggcggtgctgctaattatttggaccataccatactgagaataccagcctggggggtgccaaaacctcagagcagatgagaaaatccattgtgagcaggtgtccccccccttttcttttcccccctgagaagcacgagattcgcacctggttcctccagcctccgcctcggcgcctctgctgtcagctgtcagttgcccccgccagccctccctctcccctttctcctacggtccagccccgtctcacttcaggggaacatctctccccagcactcggcttgcctttgttttttctccagtcatttgcccaacttgcttctccctgtgatccgagatgggtgaaaaaatgacccctactcccctttgtgattctctggccttctgtgcagcctttccttggcttgactgggaattaggggagagggagggaggcgtgacggccggaggctggagaaggagctcaggattggggacccaagctgccccattctccatgccccttgaagaaggtgtttcaaggtggtgcatgtcagaggggaactcgctggcaaagttgaaggcaaacctgtgaagcagagactgaaaggtggtctcttggcaaggagggcccgtttcctgcagccggagcccaatgtcaccctgaactcagcccaaggtgtcttcctgggacccagcccggaggagaggacctgaaactgaagatagtctctatggaggttttgcggagagactgcctggcggccttcagagagagtggaacagctgggtgcctgtggccactgcggaggacaggacgaggagagcctgtatgccctggctaaccagagccaacactgcctcttctctgcttagtgctctagcattgccagagtgcccagctggcatctctgaaccagacttaggctaaccacccacagtgggctgggaagccctatgaaggagaaagcagcagctcacctgcttatcggagccaacaggggccacctcccttcttatcctctgcctccagcaccttcagccactcggaggctggcgcgtgggcagaaggcaatcttcctctattcctaatcagaacccagcaattacttcatcttcagtcacccacagagtcactgctgtttgtccctgcccctgggagaaggtagaaagaaacattttctgccttgtgccccaaagcacagctgttaaaaataagagtcccccttctgctgttcgttgtggccgttgctctcaccctaccacacagccctgcccagcccaggaatcaggctcctctgacatgctacccatttcccattggctccagctgtcagattgcctgaagaaaatgtattttctgcctaagtctttaaccaagggctaaggcaacagttagtaaagactaggagagagaaagaccaaggggcccacaggctgggaagacaggcaggtgcttattctgggccagaatgagtgaaccaaggtgcgagaatgggcggccacacgtgagggctttggtactgttggaaacatctataaagttctagtgaagagtcccagagcacaggaccctgacctcaggagagaaccgaatcagggtttgtatacctgcctgcatgctctccctcccctcaccttacacctcctgcccccctccccaaaatgtataaaggaccaattgtattgcaaacaaagaccatgtaaaagaaagaccttcaggcatccccaactcttaaaaggctctgatcccctgagacacagtgcctgtgcgatgcagagcctcacgaagaactgaaaaccaaggagagggcacttgcagatgacgttgctcccatggcagcgtctgtgcccgtgggcttctctctgtggaaaatggtggaggctgcttctgccccaggagggagaaacaccgactccctggctttggcgccagaagcctggatcggctgccaggtttgccagagcagaatggggatccaggggacagggcgacaatgcaactggatgctgtgggggggtcgatggtgatggggaaagtagaggtatgggtgagctgattcccttttcctccattccctcaggaggggtcctcctgaggtcgcagctcccctgatgtcctttcccctcttcccaggtgacttctatttctatctggttctcgtctgggggggccctggccgggcagccccccaacacttctcctgccctgaaacacggctctagccaacctgctccgctgcttcacctgcgaccgtctctgcgggggctgcacggcgccagcccctccagcccaccagggcattgtcctccagcccgtcatgcccagctgtgaccccggtccgggccctgcctgcctccccaccaagactttccgcagctatctgccccgctgtcaccgcacttacagctgtgtccactgccgtgcacacctggccaaacacgatgagcttatttccaagtccttccaagggagccatggccgagcctacctgtttaactccgtggtcaacgtgggttgcgggccagctgaacagcgcctcttgctcacggggctccactcggtagctgacattttctgtgagagctgcaaaaccacactgggctggaaatatgagcaagcttttgagacgagccagaagtacaaggaagggaaatacatcattgaaatgtcacacatggtgaaggacaacggctgggactgaggggctcaggcagggtgtgcccttcctccgcatgcccctccctccccacggccctgccaagcagtctataccagcatgagtactgccccacccctgggggaaacctggctccaaccaacccctcccctgcctccaccatatccactaccaggcaccctttagaacaggggtctgggggtaccccaggggtgttaaggctcaggagtgggcagcagtcagggagagacagaactgggggaaagggatggttgtgggtctttctgttcccaagatcctgaacatggaagcgatggcagggcatagactcaggcagagaggattgtgggaggaatccgtttttgctccacctctttttgagtgaacagaggacaaaccttgggtcacagggcaagtagatcatggaccacagaacagcagatgagaaaagacttgggttggagtgaaattctggtctcagacaccaggagaccagagtctctgaggatgaagtttcctacccctatttgtagggaaaaggacttgagtgcagggaaaactcaaatcccaggccctgggaaatagtaaaataatcaaagggttttccatttcactccacttgttagtttatcttggcactgaagaggcactttcgagtatctaacttttgccattgggtggggtggggacagctgctcgcggaacagcccctagtcggctgcttccagagtaagcagtctttatgggctttctctgaggcccagtcactgctcctgggacccagtcccctggaggggaggtggaaaatcagtgctacggggccagtctttcccgtggctgccaccagcgaatgaaacttttgtatgatacataaagtgcttgagtctatttttaataaaaagggaaaaagcaacttg

SEQ ID NO: 168 - DNA, 5057 bp, Homo sapiens
ctataaatagaattgttttgtaacttttattttcaggttttcattgctagtatgtagaaatacaactgatttttatagatggatcttgtatcctgcaatctactgagtttatgagctctggggattttttttgtggattctctagggttttctgtatatggcaaatcatgtcatctgcaagtggaggttgttttactttttcctttccaaccacgatgccttttatttatcttttacttttatttttatcttttcacttcccgtcccactgcaggactttcatttgtttttctcgcctaaccgccctctctggaactttcaatacagtgttgaatacaagcggcaagaacagacatccttgtctttgttctgttcctgatcttaggaggaaactttcagcctttcaccatgaaggatggtgttcactgagggtttcctggaggcgccctttatagggttgagaagtgcccttctagtccttttttgtcatgaagaagggttaaatttttcaagtgctttctttttctcttttgagatgattattgagttttgttctgttaccatgatgtgttcatagatgtaattacttccattgatagaatatattaatatggtgttgatttctgtatgttgaaggaactgtgcattcctgagatgaatcccggttggtcgtggtgtatgatctttcttatacgctgctggattttgtttgctggtattttgttgaggaattgtgtgtctgtattcataagagatactggtcagcacacttctttccttgtaacgtttctgtctgcttttggtgtcaggacctcattctgtcctcatagaatgagttagaaaatgttcccttcttggttcttttttctttagcatttctgtttttgtgttgaaagccctgtgcctggagtcactatcatcatattttcctttaattctttggctcatttacggtagccgctctggagtccttagggaatgcgatctgggccgcacagcgtgggcctctgccatctgcccttttccctgagtgtggtcacgcttctgtttctttgcttatcccataatttggggctgcaatctggacaacctgggtactgtatttgtcccagcaagtctggattcttgtatttttatctaaggttgtttgattggtttttgtttgcttgggtattttacctggacctaagctggagaatctgtgtccacggcagccgcagatgtgtccgctcatggtttctgctcttttcttgttgagctgagatgtcccggggtgtccgcctgtctttacagctcagcggttggccgctgctctgtctgtggttgtgctccaacaccacgcatccctgaggctccccatggccaatgatctgtgcatgtggggagccgatatccagtcagttcctggtcccctgtggcatcacttctgtggccgcgctggatccccctgcacaggcctgtgctgcttctgtcggccagggttccagggaagctgcctctgtctggctctcttgttctcagcatttccccgttatttttctgactggtccctgccctccttacccctccccagccaggactgtgggcctctccaggtcctgcagatggacccctcgtggctgatgaaagtgttcccctcccaccttgagcccaccccctctggaagcaaggctgctggtcctcagctacccaccctggtgcagctgtgctcttgctgggtagagtggggtagggggaggtggagcagctgcttatatgctgctggatttggtttgctggtattttattgaggaattttgtgtctgtattcaccctcaggctgggaagccaagtcccgctcctcccagagctgcaacgggatttcaggagtcagtgtattctgatttcaggagtcaatgttttctgatttgttgtctgccttgaattgatttccagagtcctgaatggttgtttctaccattttgtccagtttcgcacttggcttcgtagagataactcattgatttctactccactgtagccagcagtcctcctcaacaagcactcattgaatgagttgttgaacggcaggtcctggacccctcacatgctggagtggcaggcgggccgtctgtgcgttgtctgcgctgcagactcactgagcagtgtgtggggctgtctgacctgtcagcaggggcgcagggcgctcactcttcagtacgcggtcccctccagaacacagcacagtggatctggcatcacagggaaacaggctgctgggcatccagatggtgaaatttactctcttcaaatgtcagcatgtttcagttaaatttttcaaatggacatctttgtgaaacacattaaatagcattactcccctgaatggagaccgctgcgccggaaggtgttgtgggaatgggttatccctctggtcacctgcttcttagtgggactgaaacatggcgcccccttggcaccctgaggagctcctcccacctcaaggctgctgtgctctcgagagctggcctggctctgggtggctttcaggccttcctctagcatccctggcggcccctttctctgagtcactgctcttcaggatgatgcctggtgtgacttgattctcagcagaacctgaaggactcctcaggattctccaagccctgtgggacacacagcgggctgatcggcaggggtctttcgggtctgagatcccatggcccacacttggctctcttgagcactgcttgccagaccctgggtgaattgttggcctcttgggtcctcagtctcttcatctctgttgataatagttatcttgaaaaatttgcattgagtaaataggaaacaatttcttttttttttttttttttttttgatggagtttcgctcttgttgcccaggctggagtgcaatggtgtgatctcagctcactgcaacctaaccttagcctcccaggttcaagtgattctcctgcctcagcctccctagtagctgggattacaggcatgcgccaccacgcctggctaattttgtatttttagtagagacagggtttctctgtgttggtcgggctggtcttgaactcccgacctcaggtgatccacctgccttggcctcccaaagtgctgggattacaggcatgagccaccacacccagcctacaatttcaactgaccatacagtattgagcataagttacttaacaaaagatacctgccatcgttattatttgtggttctgtgtgttcaatgtacagggttttgttttaatcactggtgtgaggctgacggatgaggaggcaacggctatgaggaaaggagtttccactcatagttccccagagacccccagggagggagtgaggggagacctagcaccttggttgtggttctcatgggaggatcagacagggtgagtggaacaggccgccaggcttggggttggctctgaacacgggctctggatttgttggctttcatatcagaagtgtgctcaccgtggcctcctgcctctaggaactggctgtccctaggagggcagtctctgcagggtccacaagcctccagatgccaaaccgtgatacaaggcagaagtgaaggcagcattcacacagcctagtaagacagctttccttcttgctcttagctgttctttggagccttctcagggtcacctgcagactgaggagttacgatgcctcccgcaggcagcatcctcacaaggtctgcacagccccggggcaaagacaagacccctgtcgggggcacggaggctgccttgtgctcggggcctcctgccccacaagccggcaaccccccgacgtgccgcagcaggcagggcactggccagtcacagtcactgcgctggggaagcctaatgcttgggctccctcactgggtggctttcccatcctggggtccaggagcaggtgttgcttgagaactcagtcgtcacatctcccctttcatgttacaaggcgcctggagaaagcaaacacgggtggggcactgaaagaaattctggacgcgcttttgcccttccggcagttctcagggtagcaggagccaaggcttgggagaggcgggggaggaagctcgtgctccagatgctcattgagtacctgtgtatgccaggcacagtccgcatgcccacagctgcccccgtgacgggcaggctcccctcgcagagcccacgggccgaggtcccctcagtgaggctgaaactcagctgggactggccagttcgtttccaggtcttgctatccagctgccgatgattcagatggcttacatattctctaagctgcagaggtgcataaaggtagaaagattaaaatgtaggatatttacgccctcatatggaagacccagggcttctcagagtgtcgtgttggcaccagggctacccgcaacctaagaggaccccgcgtgcctgtgtggctctgcttgccactgccctcgtggcagggaggcagtgacagctacggagaagctcagcaggctggcctggtcgtcgtcctcaaagcaccgtgatgtgttaacatgaatgactcgtgttttattcttgttccaccacaggcagcgtctcctcccggggccccgagcatcccggcctgacaacgagtcagaggagcgtgggaaagcctctcaggattccacctctgcaaattccctacaagggacccccactaacgccaacaccacagttaccagggagagcaggaagaggggactctccaagcttcgggggctcccaggccaggctgcccccccggccgcccatcagcatctccagcctgctgcagagacagtgtttagtgtgaagttttgaagtcatttcaaagacaaagttgtgtttttaccgcgacttccatgcctcctgcgggacctgctcaccttggggcagtgacacctgaaagatgagcacccagccacccgctctgcccccttccagtcctccagccttcgtgcccaccagcatgtgtacgttagacagccagtgcgactgtactttccctcttgttgaaataattaagtaatgtagtggaataaagtatttttctgattatcagg

SEQ ID NO: 169 - DNA, 3673 bp, Homo sapiens
tttttgtttgagatggagtctcgctctgtcgcccaggctggagtgcagtagtgcaatctcggctcactgcaacctctgcctcctgggttcaagtgagtctcctgcctcagcctcccgagtagctgggattacaagtgtgagctaccatgcccagctaattttctgtatttttagtagagatggggttttaccacgttggccagtctggtctcgaactcctttcctcaagagatctgcccgcctcagcctcccaaagtgctgggattccaggtgtgagccactgcgcccggccccggctggttatttttaagatgggactgaagttgagggctgggctgcaggaggaaaatgagctccgttctgatttccgctgttggaaccccagtgcctccctcccagccactcttcagttcttggctgcgagcagtagctttgctgtctgtccttggtttgctgtatttgtaataaggaacctttgctatgaaattagtgggatacattggcttctcctgtctaattttgtgtagctctgtctacacagtttgggtcctaacttgactgctctggggctgctggtggcagaggaccctggggcttgggagtcgtgtctgcggttgaatcctctctgtgggaggtggcctgtggtgcagccttgtggcttgaagatctctgatgttggaatggttgcttgtcagcacagacagggcatgaagtccaggctgcgttcctcacatttagaccattctctttgtcctgccaggtgtaggtgagggtgcactaggttggaagtcgtggaaacccacccacctgagcccaaccctgaagggcactgttgaggcagagcctcaggtgtgccttagggcctggcacctttgctttgtgccattctgactttgcctgcctggtgggcgacttcgtgggctttgtgttggaggtggctgctgcagtgaccttgggctctgggctcccttgtttacagatgcttcccgcagctctgacggatgggcctgctgttgctctgaggagggcacgtgtgccgctgtgtcccgtctgtctcagcacagtcacggtgcgtgcgctgggggctgtgcagcagggtcactcctgaaggaaagtgggttctccacccagacagacggctgctccccagtggggagctgggggcagtcctccaaaggaaggctgcgggtgatgcaaagggaaaaggagagtgggtactgaacaggcggctggtgagcattgctaccacaacagggcctggagcttaggcctcacgtgttaggggatgcatatcctgtggagagccggttagtcgtcccggtgtgtccggaattggtgggttcttggtctcactgacttcaagaatgaagccgcggacccttgccgtgagtgtcacagttcctaaaggcggcctgtccggagtttgttccttctgacgttcggaggtgttcggagtttcttccttctggtgggttcgtggtctcactggcttcaggagtgaagctgcagatcttcgcggtgagtgttacagctcataaaggcagtgtggacccaaagagtgggcagcagcaagacttactggaaagagagaaagaacaaagcttccacactatggaaggggacccgagcgagttaccactgctggctcccgcagccagcttttattctcttatctggccccacccacatcctgctgattggtagagtccagtggtctgttttgacagggcgctgattggtgcgtttacaatccctgagctagacacaaagcttctccacatcctcaccagattagctagatacagagtgtccacacaaaggttctccaagtccccaccagagtagctagatacagagtgtcgattggtgcattcacaaaccctgagctagacacagagtgctgattggtgtgtttacaaaccttgtgctagatacagagtgccgattggtgtatttacagtccctgagctagacataaaggttctccacgtccccaccagaatcaggagcccagctggcttcacccagtggatcccgcaccggggttgcaggtggagctgcctgccagtcccgtgccgtgcgcccgcactcctcagcccttgggtggtcaatgggaccgggcgctcgtcggggagactcggtccgcacaggagcccacggagggggtggggggcttaggcatggcgggctgcagctcccgagccctgccctgcaggaaggcagttaagacccagcgagaaattgagcgcagctccggtgggccggcactgccgggggacccagcacaccctccgcagccgctggcccgggtgctaagcccctcattgcccgcggccggcagggctggccggctgctctgagtgccgggcccaccaagcccacgcccacccgggactccagctggcctgcaagcgcatgcagccgcggttcccgctcgcgcctctccctccacacctccccgcaagctgagggagccggctccggccttggccagcccagaaaggggctcccacagtgcagtggtgggctgaagggctcctcaagtgccaccaaagtgagagcccaggcagaggaggcgctgagagcgagcgagggctgtgaggactgccagcacgctgtcacctctcaccggggtggaatttgcgtggaggaacgtgccaggagggccagccctcgggtgctgacccctctgtcctggaggctactttgcctgcatctctgccacagtcgctcatcccctgcggtggggctgctgcggtccagcacggccacaggcatccagttcccctgtgggacgcctgagtgcgggtccttgttggtccgtgtgtgagccgcgtggtggtttcacatacttgatttgaggaaagtgaagtgttctgcttaggtctttgtctcagcctaggaaagagctccattcctggcccttttctgtgtttgtcccactcacccactgtcattttgagctcctgggccaaggtttcatggggttcctccctggctcccccgctctgcctctgtgggaacactttctgcaccctcgggtctttgttcccattgtcagtggaactttgaacagagctggctggttcacctcgtcatttcagcggtgtggatcagcaggcaggttctgctgttgactgagtgttgggcgggaggcccagggcctgcactccctggctggcgggctcaggctctgcttcccttcagggtggcttggcccaccaggtggccttcagggttggccttgcatgcccctgccaggtccgcttggtcaagcccgcagtctcctcgccgctggccccttctgttgactgccctgaccttccttgatgactggggacagggtcttcctggatattttcgtgtgtcttcccgggccagtccagtgatgcacttgtggatagggctggtcaatgtggctgtggccagagagtggacaacagacatgtccacagcaggagcaacatggtggcttgtcttgggctgctggttcctggagctgctcagaggaccggtgggtcctttcgaggtgggcagccagcccttgccgttcaggttcccgcaggggtgcgtgaggaaccgtcggacctgctcattagtttattgactgtgtttctggtaatggcctaaaaggttaagagaagaaatggttaaaaaaaaaaagaaaaagaag

SEQ ID NO: 170 - DNA, 3382 bp, Homo sapiens
atgttagaaagcgcgtagccttaggatctggcagacccaggggccacttaattaaccctttgcctctttgaccctcaatctccttttctctaagccataggtcacctgaaagcctacctcacagggctgttgtgagggccgagggtgggtgtgtttcaacagtgtgcagatgctggctttccctgggaatgggcatatgttgggatttgtcttgaaagcatgagtgatggctttactagtcctaagtgaataaaaagtcagccctgaccttacgctgggattgcatttcccacagtcagtggcatgtgcagaccactggcagagcagcctgcaggtgcttagcgatgtgggcccagagtaaatatttgtttgattgatgagtgatggctttttccttcctcagagtttgccctgccccccattccaacgtgggctgctgcttctccccagcgggttgtagctggcagggccgttgtgctttggggtttgctgtacctgtcgctgccgtgaggggacgatctgtctgcccggaggggtttctgcaaacattcatgtatgcccctgctttcgtttgttagggagaaggagtggggtgacctagagagaggatgaggaaggggttctgggtggcatccttggggtaccaaccctgcttccatcctgcgctctgaatttcctcacagcccttttctgtctctggtagaaggtgcagaaggtaggctttgccaccttccctgggcctggcaccaagctcgggggtcttgtacacactttcccttctctaactggggtgtgggcccatttcctagatgagcttgctgagaatcaggacagctggtatcagagccaggacttcccagtcttgcacaaacaacctgtgcatttttgagtccaccaaataaggcctcctgcctggtccggctcacccctgccagcccccagcaaatgcagcctggtgcgtccccacccctgccaagagcccaggagtgctctggcagagaagtgcagggatgaggaaggaggctgtgccctccaggggactcagctgcgttagaggaggtgctgctgcagtggcaggggtctccagacatcccacgcaggggtcctttcagatcaggcatctcttcaccagaccaccgtattcctttttcagccctcgtctcttgcacgtgggggtgcagtgtttggctctcacatccccacattccagctggtgggggtttgagctgggtgttccttctgctccccactccccactcacggcccccaccccacgcaagcctcccttgcccccactctttgtctccagctttcacagccttggcgggcaggctgctgcgcctgttgctgccccggctctcttccacccgcctcttctttctcagcctgagctttaccgtgaggtctgggcgccacaccttggcccctgccatgcctgctcccagaagcacccacgtgggtcccctgattctctcctcccctgggctttgctaaggagccctttcattgtggcctttggtgtctgcctcatgcccatcccctgttcttgagaacttggaagcagagggggcccctcctattgctcccaagaggctccacagtagggagcccctcccaggagattctgagtctgtgtttaggtgtcgattcctgggtgggccttggggtcccctcaggccaggcctgtgtgtgacctaaggctggggggctctgtcaggcacctagtgtcccttggaggtgggcggggctgggtcctggtctcctgaggacgggtggggagacaggctcagggagatttccacgaagctgcccttgaacccctcctctgaggcccacactgccctggccctttacaccctgcctcctgcactagtaggcacataatagatgctcgccacctgtggagggcagggtttaaatggctggaaagagctgagtgggctgtttggctagcgtacgcgcatttgtttaaaaggaaagggtgtgtttcttggcaaagactcttcggaggaaacgctgaactggggatgggtctctacctgttctggggcctcactgcccttcctgccggggacaggcagtcactggtgggtttccccccagtggaaacacaatattttggaaatatttgtatctaggataaaacttcatctggaccaacatgtctttgttggtgttgtggcccaggtgattttgagaatgtagaatacatttggcaatttccaaacggagtgatgacctgctcctccgccccccatgccctccctgaggctggaggcttcagaagcccctgccttgggaggaggctgttctacctgagaagtctttgtccccaccgttggtgacaatcagcattgacctgtgaggcacctgccaggtttgggacgcagctttagacatccagaaaaccgggggtggaggggtggggtgggggcttaagaccccagagcttgattccttttaactgtctcatccccaaagaatggtacatgggtaccaggtaggttacttgaatcaccctgagcctcgattttcccacccgttagaaacagggtaattcatgacagtgtccgcttgggagacggctgtgacccctgagaattctcgctgcatgccgtgggctggctcgtgagactcaaggtctgggttcgaggcccccgcaaccccttctgactgtgtggcctgggcgagtttgttgtttgtaacctggaaagcgtcacacctgcctggcacggttattgtgggcttcaatgagattgtttgtgtgaaataaacgctttgtgactggcacacaggcgctctcatcccggctctcctggtgggcccggaccgctgggtgctggctgcggaggccctgtgctccctggaactgtctgcgctggtcccagggactcttgggcagagtggagggcaagggggaaagcaccagcctgctctggggagacagtggcagagggaggtgtttgcttttaaatacactcagcaggttcagacaggagaggatccgaggggaaatgtttagagccctcaggaggaggaagagaccgagttttaggaaaaacatcaaagctggataggttgggcagaagagctggggatagcatttagagagactctggacccggggcctccccttgagtagagacccgccctctgactgatggacgccgctgacctggggtcagacccgtgggctggacccctgcccaccccgcaggaaccctgaggcctaggggagctgttgagccttcagtgtctgcatgtgggaagtgggctccttcacctacctcacagggctgttgtgaggggcgctgtggtgcggttccaaagcacagggcttggcgcaccccactgtgctctcaataaatgtgtttcctgtctt

SEQ ID NO: 171 - DNA, 4349 bp, Homo sapiens
tctctgtctgccagggtctccgactgtcccagacgggctggtgtgggcttgggatcctcctggtgacctctcccgctaaggtccctcagccactctgccccaagatgggccgtggggctggccgtgagtactcacctgccgccaccacggcagagaatgggggcggcaagaagaaacagaaggagaaggaactggatgagctgaagaaggaggtggtcattgtcactggctgcttctcctactaccaggaggccaagagctccaagatcatggattccttcaagaacatggtacctcagcaagcccttgtgatccgggagggagagaagatgcagatcaacgcagaggaagtggtggtgggagacctggtggaggtgaagggtggagaccgcgtccctgctgacctccggatcatctcttctcatggctgtaaggtggataactcatccttaacaggagagccggagccccagacccgctcccccgagttcacccatgagaaccccctggagacccgcaatatctgtttcttctccaccaactgtgttgaaggcactgccaggggcattgtgattgccacaggagaccggacggtgatgggccgcatagctactctcgcctcaggcctggaggttgggcggacacccatagcaatggagattgaacacttcatccagctgatcacaggggtcgctgtattcctgggggtctccttcttcgtgctctccctcatcctgggctacagctggctggaggcagtcatcttcctcatcggcatcatagtggccaacgtgcctgaggggcttctggccactgtcactgtgtgcctgaccctgacagccaagcgcatggcacggaagaactgcctggtgaagaacctggaggcggtggagacgctgggctccacgtccaccatctgctcggacaagacgggcaccctcacccagaaccgcatgaccgtcgcccacatgtggttcgacaaccaaatccatgaggctgacaccaccgaagatcagtctggggccacttttgacaaacgatcccctacgtggacggccctgtctcgaattgctggtctctgcaaccgcgccgtcttcaaggcaggacaggagaacatctccgtgtctaagcgggacacagctggtgatgcctctgagtcagctctgctcgagtgcattgagctctcctgtggctcagtgaggaaaatgagagacagaaaccccaaggtggcagagattcctttcaactctaccaacaagtaccagctgtctatccacgagcgagaagacagcccccagagccacgtgctggtgatgaagggggccccagagcgcattctggaccggtgctccaccatcctggtgcagggcaaggagatcccgctcgacaaggagatgcaagatgcctttcaaaatgcctacatggagctggggggacttggggagcgtgtgctgggattctgtcaactgaatctgccatctggaaagtttcctcggggcttcaaattcgacacggatgagctgaactttcccacggagaagctttgctttgtggggctcatgtctatgattgaccctccccgggctgctgtgccagatgctgtgggcaagtgccgaagcgcaggcatcaaggtgatcatggtaaccggggatcaccctatcacagccaaggccattgccaaaggcgtgggcatcatatcagagggtaacgagactgtggaggacattgcagcccggctcaacattcccatgagtcaagtcaaccccagagaagccaaggcatgcgtggtgcacggctctgacctgaaggacatgacatcggagcagctcgatgagatcctcaagaaccacacagagatcgtctttgctcgaacgtctccccagcagaagctcatcattgtggagggatgtcagaggcagggagccattgtggccgtgacgggtgacggggtggacgactcccctgcattgaagaaggctgacattggcattgccatgggcatctctggctctgacgtctctaagcaggcagccgacatgatcctgctggatgacaactttgcttccatcgtcacgggggtggaggagggccgcctgatctttgacaacttgaagaaatccatcgcctacaccctgaccagcaacatccccgagatcacccccttcctgctgttcatcattgccaacatccccctacctctgggcactgtgaccatcctttgcattgacctgggcacagatatggtccctgccatctccttggcctatgaggcagctgagagtgatatcatgaagcggcagccacgaaactcccagacggacaagctggtgaatgagaggctcatcagcatggcctacggacagatcgggatgatccaggcactgggtggcttcttcacctactttgtgatcctggcagagaacggtttcctgccatcacggctactgggaatccgcctcgactgggatgaccggaccatgaatgatctggaggacagctatggacaggagtggacctatgagcagcggaaggtggtggagttcacgtgccacacggcattctttgccagcatcgtggtggtgcagtgggctgacctcatcatctgcaagacccgccgcaactcagtcttccagcagggcatgaagaacaagatcctgatttttgggctcctggaggagacggcgttggctgcctttctctcttactgcccaggcatgggtgtagccctccgcatgtacccgctcaaagtcacctggtggttctgcgccttcccctacagcctcctcatcttcatctatgatgaggtccgaaagctcatcctgcggcggtatcctggtggctgggtggagaaggagacatactactgaccccattggaagaagaaccaggcatggaaagatggggagctctggaggtgttgtggggatggtgatggagagggatggaaataacgggtggcattgggtggcaacatttggggagagataatggggcaactcagcaggctaagttgcggggtatataaattggggtgatgaccccatagacctaactgtgaacaatcagattagacactatgtgttagagtccccccgaccagatccttttccatcccactccactatgttgtctattttttctgaggaattaagggttaccccaccctgcccactcccatcccttcaaccccacttcctactgtaatagatcagcatccaaaagcaggaacccatctaaaccagaaggaagccctctcagatcaccccagcctcactccatttcccacttccacccccgttagcttcctgcaggactctatccctggcttccccttcagaccttgcaatcacaaaaggttcttctggtgagtgcaagagcctgagactggaaaaggtggacttgtctcccagtcgaggctggtaagggaccttcagggagagctgggcagacaggtgggagatggaggtagggctggctggaggaaggaaacaacaaaggaagtgaggtagtgccaatgacaggacatttgacatgagtctccagatagatgtcatggactccagctctacgtcccacattttagaataccccaccagcagaacaaactcagatctcatcagggtagcagcagaggcaggaccagaaggcaatcaagagcttccagaaatgccacacttgtgtgccacagagttccccgctgacccttggttaggggtcctcttagtccacaaggtccggatgtcactcatgtacttaataacacttcaccttctgtaatactaagtcctcagagctccatgctgttctgaaagggatggccacaagttctttcccagcctcttccattccctttcttttcatgcccatcccgatgaacctgcatcattccccgacactgccaagccaaccctggaaaaggagttcgctggccattggctagaatcagggtggagaagttccctgaaccttcctgtctcccagggacatgtatgcttccagggacaagcttaggtcatgaacatggtcagaacctttggacaagaggaaaaatactaagagatttgctttttctgggtgcggtggctcatgcctgtaatcccagcactttgggaggccgaggcaggtggatcacgaggtcaggagttcgaggcgagcctggccaacatggtgaaaccctgtctctactaaaagtacaaaaaattagccagtcatggtggcacacgcctgtaatctcagctactcaggaggctgaggcaggagaattgcttgaacctgtgaggaagaggttgcagtgagctgagatcgtgccattacactccagcctgggcgaaagggtgagactccatctc

SEQ ID NO: 172 - DNA, 3364 bp, Homo sapiens
agtgctgcccctgctcccccacctccctctggagaactttttgcagctcagccctcaccagatccaggccctggaggatagctggccagcagcaggtctggggccagggcatgcccgccatgtgctgcgcagcctggtaaaccagagtgtccaggatggtgaggagcaggagctgtcagagccccagcttagagccatgcttcctgtcctgcagggaactagtgttacacctgctcaggctgtcctgctgcttggacggctccttcctaggcacgatctatccctggaggaactctgctccttgcaccttctgctaccaggcctcagcccccagacactccaggccatccctaggcgagtcctggtcggggcttgttcctgcctggcccctgaactgtcacgcctctcagcctgccagaccgcagcactgctgcagacctttcgggtatgagagtggcaaggaggatgagataatcagggataccggctctttctggttgggaggaaggcatcttccctgaggccagggaaggcctttcatacctccccacttacacacacacacacacacacacacacacacacacacacaaccaattctcatgcaggttaaagatggtgttaaaaatatgggtacaacaggtgctggtccagctgtgtgtatccctggtcaggtaagtgtgagatctcccaactgagctcctctccccattctggggcagtttcatatggctggtgctacctcccacactaccctgcagtggccctgagagttctggttagctctgtgcccattagcagccctccccagcgccagatgcaggacagcatgatccactcacattgtcctagactaatgtcaaagctggaagggcctgagaaatcttccaggccacccaccctgctttcagatgaaaagaccaaggctgggagaagctaagggactttgtttgcctggtgcctaactagcagcaacacttgaccacagcagcctgcagtgtgaggctcttaggcgtttattgctacagtggcaaatgccattccacttctgtcctagctttggtccctttccacccccatggttccttttctctgagtgctaagtacagactctctcacctatcactacactgctatacccatcaccgccagcagcctattcccaccacctggccagactgcctgcttcccctgctcccattaaagctgctacaactggattccttggctcttctggcaaatcgaagacgctactgggagctgccctggtctgagcagcaggcacagtttctctggaagaagatgcaagtacccaccaaccttaccctcaggaatctgcaggctctgggcaccctggcaggaggcatgtcctgtgagtttctgcagcagatcaactccatggtagacttccttgaagtggtgcacatgatctatcagctgcccactagagttcgagggagcctgagggcctgtatctgggcagagctacagcggaggatggcaatgccagaaccagaatggacaactgtagggccagaactgaacgggctggatagcaagctactcctggacttaccgatccagttgatggacagactatccaatgaatccattatgttggtggtggagctggtgcaaagagctccagagcagctgctggcactgacccccctccaccaggcagccctggcagagagggcactacaaaacctgattcctgtctacaaggcctggcccctgttttgcctctgggttctgttccttgataatatgcttcacgttacttgtccatacctcttggagtccgagaaatctcttggagtccacctctcagtctttctgcctgctcctatctgggctcattgcttaaggaagtgaacaaaggctccaaaggagactccagtctcaggggaagtgctggagaccttaggccctttggttggattcctggggacagagagcacacgacagatccccctacagatcctgctgtcccatctcagtcagctgcaaggcttctgcctaggagagacatttgccacagagctgggatggctgctattgcaggagtctgttcttgggaaaccagagttgtggagccaggatgaagtagagcaagctggacgcctagtattcactctgtctactgaggcaatttccttgatccccagggaggccttgggtccagagaccctggagcggcttctagaaaagcagcagagctgggagcagagcagagttggacagctgtgtagggagccacagcttgctgccaagaaagcagccctggtagcaggggtggtgcgaccagctgctgaggatcttccaggacctgtgccaaattgtgcagatgtacgagggacattcccagcagcctggtctgcaacccagattgcagagatggagctctcagactttgaggactgcctgacattatttgcaggagacccaggacttgggcctgaggaactgcgggcagccatgggcaaagcaaaacagttgtggggtcccccccggggatttcgtcctgagcagatcctgcagcttggtaggctcttaataggtctaggagatcgggaactacaggagctgatcctagtggactggggagtgctgagcaccctggggcagatagatggctggagcaccactcagctccgcattgtggtctccagtttcctacggcagagtggtcggcatgtgagccacctggacttcgttcatctgacagcgctgggttatactctctgtggactgcggccagaggagctccagcacatcagcagttgggagttcagccaagcagctctcttcctcggcaccctgcatctccagtgctctgaggaacaactggaggttctggcccacctacttgtactgcctggtgggtttggcccaatcagtaactgggggcctgagatcttcactgaaattggcaccatagcagctgggatcccagacctggctctttcagcactgctgcggggacagatccagggcgttactcctcttgccatttctgtcatccctcctcctaaatttgctgtggtgtttagtcccatccaactatctagtctcaccagtgctcaggctgtggctgtcactcctgagcaaatggcctttctgagtcctgagcagcgacgagcagttgcatgggcccaacatgagggaaaggagagcccagaacagcaaggtcgaagtacagcctggggcctccaggactggtcacgaccttcctggtccctggtattgactatcagcttccttggccacctgctatgagcctgtctctacagtagaaggagattgtggggagagaaatcttaagtcataatgaataaagtgcaaacagaagtgcatcctg

SEQ ID NO: 173 - DNA, 3940 bp, Homo sapiens
aatgtgatcagcaagggacctttgagagccgaggttccgcttaaaatggaaagcacagtggaaacatcatgaaggactggttgtttgaattgggtcacttactgtggaactccggcaccagccacatgctctcggtagtactcagccaccatgcagtcaagtgacctctggttgtgtcatcttcatactgtgttacccccggaggtgagagggacaggaggccacccccccaacccccaggccagcccttggaaggcatgtgtcagaaaggggtccctaaatccttgttttacctggacccttggaggttcttgagaagtggactctgaaataaataactggtagaaattctacagtgtggaatttcttgcagttagcaaaagcttaggggtccaggtttttgcaggattcctgtcttggtcctttcgaaccaaggagctctgctggctctgccaggccgcctcacatgcccagtgggattctgacccggcctccttggtgcggcagcttctcccgttaacggaagaagacgcttagcccctctgacagggccatggttgttttttcaattaaaatgtcctggagggagcatcgtgctcattatctcctgcccctgccctctaccccagccagaggtcttgatagcagaacttttttaaaaacagtagcatgtgtagttatttttgtatacacgtggcttagattgggttgcagacttcattaattccattcgaacccaactaaaacaggagacacaatccttgttctgacatcgagtgcagcttgtggtttaaaatgagcctgccggctgcatgggtgcgcgacagtacaagcagggcttcaaggagtctgcgcccagtgttttaagggactacgacactgacaatttggggaaagcgtggtcttgatatacggggcagaaagagctctgtacagtgcacacacctgctgccgtccctgggcagcccctgggtccccccagccatgactgttctgcgcgagctcctgagctgggcgacctcagtgtgggtctcgccttccaagccagacagtcgttggagtccagcttgcccggcgccggccttcactggttggctggagcggcacttggcgtcgccgccggcccctcatgggggttttccgtttgtggagtgtttggtaccgcgtggtagttaaccctccatgccaggcgactgcattgctgcattcaggtaggaaagggtgaaagaatttttttttgtttttgtttttttaaagtacaaggaccgctctgctttgtaagcaggaaccgcagtcccctgaggagggtgtgtgaagactcgctcatttgagttctttgaaatgggtcccttggtcctgctgtcacattgccttgagctaacggatcctgttcccatcataggccggtccttggggcattgggcaggtgggggctttgtgcctctgtggctgctgctgtctgttctctaacaggcagaactgagggattctgaactcaggatgtgcagctctccagactgagaccccaaggctgactccaggtggatccattgtctctttattctcattacgatttatcagaaaagtgagacaaattcaggattctcaaatgctgaggcagccccggaattggggggatctttctgttgttagtccacccatattttcaagcaggcattaaaggaaggtcagccactgcgcctagaataagtaggtcaggcctgctccatccattgtccccggccccgcaccctcctcctgagaagactgtggctcctgacacgtctagagaggaagggccccgggctgctgagcgaacacagtatgaagattgcttactgatccaaatgtccattttattgcatgtttgttactttttttgttagatgtaatgtaagattctcttatcacatccattccctctgacattagttttgagttaattgagattctttaagcgttagcctggggaaggtaagtctttatcttccattagacattttaaatttaaaaatctaagtaaaacaccagccgtgtttctcaggtatgagttaaaagcacaggtgggcgggctccaagcagtccagagggcgatgaggatgccgattgctgggaagatcctggtccctttttgtccccatgttttcaagaggaaggaggacgctgccattttacttgagtgaaagacccttcgtcacgcacgaaacccccgagggctctgggctcggtcctgctgccccgcagtgggcgggctctgtgtgtcttacggttgcatctgttgtacctgagaaacattttttaaacaaaaaaattcaacacaaaagaattttttaagaaaaaaatgctactggcctaaataaggtttatagttaagtatttagtcttaagttgtaagatgctaagtgtagtcataagttacccgagggtgtgtctaaagggaagggggtgctgggacccgcagcctcgccctaaaccagagctcggtttgtttaggtggaagttaaacgagctgagcctcgggacagcaagagccaagcgccgggacagccaggtgccagccagtgggggagccgggttgtgcccaacgctgccaatggctgggcaggccagcccccgcccacgtggcagcaaggatatggcccgcaaggaatgtgggtgccggcaggacaggcgattggtggctatggaccgccccctgcaggaagaggagcccccccgccacccccaccgttcacctcctacatcgtgtccacccctcctggaggctttccccctccccagggcttccctcagggctacggtgccccgccacagttcagttttggctacgggcctccacctccaccgccagatcagtttgcccctccgggggttcctcctccaccagccactcccggggcagcacctctggctttcccaccgcctccgtctcaggctgccccggacatgagcaagcccccgacagctcagccagacttcccctatggtcagtatgcaggttacgggcaggacttgagtggcttcggacagggcttctcagaccccagccagcagcctccttcctacgggggtccctccgtgccagggtcggggggcccccccgccggcggcagcggctttggacgagggcagaaccacaacgtgcaagggttccacccctaccgacgctagcccgcggcgccgcgacgtctgcacggcccagacccaggattccaaacttgtgaactcgtgacaatcacaaacttggcggcaaagtggcgactcaaccttgggggggggggcggggggagggcgcgaggcttttggagcggctgtgggtgtcgtctggactgaggtttttaaatatttctttctctaacccatcagcacaataaaaaaaagtcactggttcaacaacagggtttaaaaaaaatgtcttcagctttaattcaaaacttcaggtttctttttcttccttttttttggaaattattttcctgagccttttgttttacggtatattgtaaacttttatgttaaagaaaaaatatacatttacaaattgtgagatttttaagagaaattttctacgatgtatactggcttattttttaatttaaaacggggtttccgtcggcactggtggagggggtgcgctgttagtcccctcgctcctggctttgggggttgggacttggtggtccagaaactctgggagcttctagaagaaatctactgagtgtatttctgttttttgtttaattccttgcttttgtcgactgacctgcttggtagtgtctgaggtgaactgtgggggttgcgcacagccagccgcgtggatcccacgcagcgctgaaccgaaccgagtaggaagcctttctccccaggcacgtggcttcagggcgtttcccattgaccagtttgaccctggtttgaataaagagaagtgcgtttggattag

SEQ ID NO: 174 - DNA, 3547 bp, Homo sapiens
ttttttagtagggatggggtttcaccatgttggccaggctagtctcaaactcctgacctcaggtgatctgcctgccttggcctcccaaagtgctgggattacaggtgtgcctggccaatttttttttttttttactttttaaaaaactattattacttttttgagacagagtttcactcttgtcgcccaggctggagtgcaatgacgcgatctcagcccactgaaaccccatctctactagagatgcgaaaatttgccgggcatggtagcagctatggtgggcagcatggtgggcaagtagtcccggctacttgggaggctgaggcgggagaatcgcttgaacccgggaggcagaggttgcggtgagccgagatcgtgccactgcactccagcctgggtgacagagcgagactccatctcaaaaaaaaaaaaaaaaagtttattggtaagaattttattctttttattctttttcattgcttttataaatgaaattgttttcttaatttcctttttggatttttcattattagtgtatagaaacaactaatttctatgtgttaattttgtatcctgcaactttgctgactttattaattctaataagtgtgtgtgtgtgtgtatgtgtgtgtaatccatcttggttttgtttttatttttacttggagactcaggcagggacaggttttcttgtcatcttccaaagcctgtgggtagactttttctaggtccctattcattgaagaagcaggcttcaaggatcccagctgtcctcaagagtactggttccagcttcctgcttcatgaaccggtcatggcccctgcaaggtcaaggtcattataatgccagcacctgactgctaaggctatttcccttccaataccttcccctcagagctcctggtgcatcagctcattcaaccttctgcttttctgctctctcttgatttaagaaacagacacattatatttctacatagttagagcacaggggtcccagcatcccacttccaaatgagcatgtcaagcacatgcattcagagaggatacctggaagccaaaattttgccatagtgaaaggccttattcctgaatacagctagagtggggaagaccttggcctctccccccgcaggcaagaatgttgcctccacagggggctggtagcctgctaaggcccaggccacatgagtgggttgtctactgttactgagggcctactatgtgccagacaccatactaggtgctttacatacattatatgtcattgaatcttccctctagtcctgtgagataggtactattattgtcactgattcacttgagaaagctgccaaaacacagatagcaaggggcagaaccaggattctgatttaggttggctcagccttttatcaaatacatctggtcttcctctgtcctttcaaaagcctatagcttcctcatcttgcccactcctctgtgggtagggtctgtggtttcctttctcttatctatcttcaacacacagtgggtgtgacctgggtgcaaccagtcacagctctgcagaggttactgtgattttgcccctgaaggatctgtccacaacttaggaactcacacagcttttggcctgagcccccgttaccaagagaaaggaggtttttgccaaggactccaaggggagtgcacttgatgctggtcgggacccaaagcacccagccctccctgagacattgtgtgagtcgggctgggcctcaaacacggcccccactgccccaccccagccagggtggtgcttgtgtgggaaggactttaaatccagctgccagacccctggacgggagaaggagagacggctggccaccatgcacggctcctgcagtttcctgatgcttctgctgccgctactgctactgctggtggccaccacaggccccgttggagccctcacagatgaggagaaacgtttgatggtggagctgcacaacctctaccgggcccaggtatccccgccggcctcagacatgctgcacatgagatgggacgaggagctggccgccttcgccaaggcctacgcacggcagtgcgtgtggggccacaacaaggagcgcgggcgccgcggcgagaatctgttcgccatcacagacgagggcatggacgtgccgctggccatggaggagtggcaccacgagcgtgagcactacaacctcagcgccgccacctgcagcccaggccagatgtgcggccactacacgcaggtggtatgggccaagacagagaggatcggctgtggttcccacttctgtgagaagctccagggtgttgaggagaccaacatcgaattactggtgtgcaactatgagcctccggggaacgtgaaggggaaacggccctaccaggaggggactccgtgctcccaatgtccctctggctaccactgcaagaactccctctgtgaacccatcggaagcccggaagatgctcaggatttgccttacctggtaactgaggccccatccttccgggcgactgaagcatcagactctaggaaaatgggtgcagagggccctgacaagcctagcgtcgtgtcagggctgaactcgggccctggtcatgtgtggggccctctcctgggactactgctcctgcctcctctggtgttggctggaatcttctgaaggggataccactcaaaggcaaggcctggtgaggggggccctggcctcatacccacctggattgtcttcctccaagtgagagaccacagcttcctgggcaggtcctgctctgtggcccagcagccccccttcaccccaacttctggccagattccaggccagcactcttgtcctcctgggaggcgtctacagggccagcccctggcactgccccaggagtgccttggctctgggtaggcccatccttcagctggctgcagactgttctgagcgctatttacatgtgcccactctcaggttgtcctgtggccatcagcttctctcccagacagaggatctcaggcttcccaggaacccccgggcccctcccagtcccctggcctcttccttgagccatctgagtccaggactgttccccagaagtgcctcttgccttctcagggtgaagaggtcagctgtcctcctgtcatcttccccaccctgtccccagcccctaaacaagatacttcttggttaaggccctccggaagggaaaggctacggggcatgtgcctcatcacaccatccatcctggaggcacaaggcctggctggctgcgagctcagggggccgcctgaggactgcacaccgggcccacacctctcctgcccctccctcctgagtcctgggggtgggaggatttgagggagctcactgcctacctggcctggggctgtctgcccacacagcatgtgcgctctccctgagtgcctgtgtagctggggatggggattcctaggggcagatgaaggacaagccccactggagtggggttctttgagtgggggaggcagggacgagggaaggaaagcaactcctgactctccaataaaaacctgtccaacctg

SEQ ID NO: 175 - DNA, 4616 bp, Homo sapiens
aaactttcgcagccatcttcccgctcagccccagacacccagcaatcaagccagatgagtaccacaaaacagtgtgtccccagcagctccccaccccagagccaaatgacagtagtgcacttaaaaaggaaaatcaggcctgttgtccttctccggttgcattcagttgggtcattagggccggaccctgcctgccccttggcttctcagggctttgctctgacaccatgacagctgcccggggctgagggcagctggctccactcaaatgaggaagaagggatcactcccattagggcctgctttgcttatgcatgtgtgtgcacatgcatgtaaaccagggaccttcagctcacggcctccaggcctgggccagttcttgctgctcctgccgtctcccccgactggctgtgtcctgagtaactggaacatgagactgtatctgcaggactggccccatggtggccgagtcagaagtctgtttcctgtgagtcgccaccgttcactcagtcttgccctcccatgctttggagccagtctggtggctcctgtaaggttctcaaggctggtggcagctcagtctggggtcaggacatgtcggggtcatgcgtttctggccctgacataagctgtctggcctctctgtgacatgatgaaattgaaatcaatccacagtcatgaaattgtgacactccaccagattaagttagggcataacattaacttggaaatggccatgtcatcacccctgcggctgtcctatagctgagatgcgtgggtcgcaggggaggtgatttctaggcatattgctgtcccttttgtgtatctgtcatccggatgcttcggaccccacgcctctgcaagtgggagagacccgagcatcctccccacccccatagctccagtgcacgccacccccgtcttgcctgggtcggggcctgcggccagcaccatttcacacacactccttgtagatgggagccagaggaaacctgaacgtgggtggagcgttccactgagtctacttcaggagacagaaggcccatgctgatgggggaggaggagggacgtgggcattttggacaccaggggaaatggaaatgctgctttcaaaacttagtttcctttccatttcttcctagtctggcctttgacacaaatctggtagaaagaagcctgataaattgagggcacttgtaccctccctgtgcccccagaaggttcttggagagaagtgcaagaatttgtgaacacggcggtggagggcgggtggatggccatgggctgggcctccgtatcaggcctgctcaccttgctgggagctttattctgatctcattttgaatgttccagagggagcatcataagagcccagagctccgatttccaaagagtgatattgacatttatggagattggtgttgtaacatattttgataaatactaacttattttgttggggttttggttgtctcttgtcttaggacctggtagttatttgcttgatttttttttccgttattttctacataggcaaagagaattcgagggatagacagtctccaagaaaagtgaagtggtgggagagaattgcttttttcttttttttcttttctctagtttttctttctggctgagatttccgtgcaagacagcacccaatagactatttagagttgacatttgacattttaatgggcgccatggctcattttgtagattgagaaggtgcgtctcccctgctccaagtctcatcatgacagcgtgctgacagctgggagtctgtggccttcctcacgcagaggccttaaagctggacacagaagcacgcctaggctgggcagggatgggacccatgccccctccttagaggacgggcttcctggttaggaaaggacacgtgggggtgccttgcataatagttcactggtcaccgtgcttttatgagtagtgtttttgtgcacttgccaggggttttctctctgtgtgcgaggggagtgatttaagcaatggtgtctggagtaagccttacaattttaatagactttttcttatcatatccctcatttctttccctgaaataaaaatacacacaagcaaaaaaaaatgatagtttcacatctcttagttcccttgcccaaacaagaatattcttagttccactggccaggattttcctacatagtcagaacttacacattactagaggcacacccaccaaggagtattgtgtctacttttatctgtgcaccagccacaaatacccacattggaaagacccatttgtgatgggtaaacatcccttcctgtctcccacaacccctgtgactgccctgcatgtgttcatgacctccgaaggcccaaattcatgaagcagcaaacccagcagatctccacccccctgcctcaggacctctgctgaagagggggatgaagtgggtctccagggaggcagtgggggccttgttggcagctggctcgggagccggcttacaggagggcagctctgcagttgggaggggcaccgtccggaggagaccaggcctctacacaccccccactctacttatcatccctgctcacacacccttgtccaaggctttatgcatcggatttatttttccaaatcaagaggacagtgatagatgcattttccccaggctgtctcagaaaggtcgctaaatgtatactgttgtcagaattgctgagatctccccccacttttggtttttgcagcagtaaaaactctttccactgtgacttattttctctctcaggcagccagccacctggtcccttgtgctgactctagcacagtggccaggatccaatacgagtccaggggtgaccgcaggatggtgggggcagcgggcttctccacctaccccagccaccaaggccctgacgcactgcctcctgcaccttcagcacatccctgtgcacagctggaagggtgcatggcccgctcacctttgttcagatgggtggaaacgctgatgataccagcccctccctgccgtgcccctgccacggagcaggcattgtgaactggctggtgtttgcagtcccacgtggcatggcctccagcccaacccacagtggagactggagacagggcaatgagtctggtcgggggcacgtggacatgccccataggggccccacccagacttaacaggcaaggtcctgggcattgcgcgacgcaggactcaatgctaaagcaagcctgcctggctctgtgccagggcccctcttctgattcacacatcccatttttacacagacccttccttcttaataaaggctgacagttctgttggcagccaagaacccacaccatgaagacagggagtgaggggcctttgtgcccaactccagcacagctgcgttctggggtgtgtgagaggcatgttcgtgtctgtgcgctggtggtctcgtgagacagttccgaggacggggaaattgcagggtggtgggggcgtgaggcttatatgtggaactgatgcagagttcgcctgcagacggatctggatatacactatgtataattgttacgtgtaatttaaaatatatctgttgccatcgtcatgagaagattatatgtaaggctctgaagggagagggagatgtacattctgccaggctcctggggaccttatccgagtcatgaaattgatgactgttgatccagtggtgcaagaagctacactccatgtgtcatcacgcttatgactcctaatgtatttttaaggcaaaaaatgtcagccgactccatcttcacccctcgattcctcgagtccagcctttctgtgccagtgcttcactgagccacaacgctctcgccatcgggacccggctgggcctggagtctcggggcacagttgccatggagccctcctgggtcattctaccttggccaagcttaaagagaggattttctcagggtatttattagtgtgtccagcagggtcaggaagcaggatggaaagatgcattcagactgttaatttattaacaaggcaaatgattttgtgtttcttgatgacagactattaagtttgggacttattttcccatttgagaagttataatatatatttaagatgataagtttcctgcttaagttgtgcctttcagcttcaatgagtttaaggagcactaagggtaatgataccaatgagggttggtttattatcaaacctgaatagctgtggtttctccagtaaatattttcttctactgaacatggagccattattaagagttgtgtgttttttattatgtacatttgtatatttttttgcttgtttgatgttctatttttctaatagttttcttttagtttcttaaagttgtgatactagatttagattctgatgctaactgcaaatcaggttggtctctgctgggtctctcctgcttttattttactttaaggacaagtgtagttgtcgtccaccacctttcaaaaaatgtgaaactgccctgcctcccctttttgctgacaacactgtgtacattgaccacttcctaccatactttatgttgtaaaatcaaactcttttgtggtacattatctcatgcttctgcaaattcgaataaattctatggcttcc

SEQ ID NO: 176 - DNA, 4388 bp, Homo sapiens
ttctttgctgtgctggcgatcctcaccatcctcggcgttctcaatgggctggttttgcttcccgtgcttttgtctttctttggaccatatcctgaggtcagtagtgacacggggatgtcccacgtgtaggccggctgaatgctgtgtttcctgtgccgctcttcacttcgatacttaggtgcctccccacttgctggtggttcttcagtaaacatctcagagtcatgtctgttttcctcttcggtgtactggctttgagggctagagggcggtttcggtttggttcctctaaatcaactgattggcagcctgggtcttacagatctttatacagtaaatgaagactttccccttgagatgcataattggacttcacaagagtaaaaagtacacatcctgcctttccagtgtggagcaggggacagttcttctgctccagctgcgggacctgaaggtcctccaggtggtagagaaggggaggttaatacggcacagtgcgcagggccccagggcagggaacagaggcccctgaaaaataccgtgctttgagctttgagtgtggccagcaggtaaatggacaagaacacttttaacatggaatccccttaaataggtgtctccagccaacggcttgaaccgcctgcccacaccctcccctgagccaccccccagcgtggtccgcttcgccatgccgcccggccacacgcacagcgggtctgattcctccgactcggagtatagttcccagacgacagtgtcaggcctcagcgaggagcttcggcactacgaggcccagcagggcgcgggaggccctgcccaccaagtgatcgtggaagccacagaaaaccccgtcttcgcccactccactgtggtccatcccgaatccaggcatcacccaccctcgaacccgagacagcagccccacctggactcagggtccctgcctcccggacggcaaggccagcagccccgcagggacccccccagagaaggcttgtggccacccccctacagaccgcgcagagacgcttttgaaatttctactgaagggcattctggccctagcaatagggcccgctggggccctcgcggggcccgttctcacaaccctcggaacccagcgtccactgccatgggcagctccgtgcccggctactgccagcccatcaccactgtgacggcttctgcctccgtgactgtcgccgtgcacccgccgcctgtccctgggcctgggcggaacccccgagggggactctgcccaggctaccctgagactgaccacggcctgtttgaggaccccacgtgcctttccacgtccggtgtgagaggagggattcgaaggtggaagtcattgagctgcaggacgtggaatgcgaggagaggccccggggaagcagctccaactgagggtgattaaaatctgaagcaaagaggccaaagattggaaaccccccacccccacctctttccagaactgcttgaagagaactggttggagttatggaaaagatgccctgtgccaggacagcagttcattgttactgtaaccgattgtattattttgttaaatatttctataaatatttaagagatgtacacatgtgtaatataggaaggaaggatgtaaagtggtatgatctggggcttctccactcctgccccagagtgtggaggccacagtggggcctctccgtatttgtgcattgggctccgtgccacaaccaagcttcattagtcttaaatttcagcatatgttgctgctgcttaaatattgtataatttacttgtataattctatgcaaatattgcttatgtaataggattattttgtaaaggtttctgtttaaaatattttaaatttgcatatcacaaccctgtggtagtatgaaatgttactgttaactttcaaacacgctatgcgtgataatttttttgtttaatgagcagatatgaagaaagcacgttaatcctggtggcttctctaggtgtcgttgtgtgcggtcctcttgtttggctgtgcgtgtgaacacgtgtgtgagttcaccatgtactgtactgtgattttttttttgtcttgttttgtttctctacactgtctgtaacctgtagtaggctctgacctagtcaggctggaagcgtcaggatatcttttcttcgtgctggtgagggctggccctaaacatccacctaatcctttcaaatcagcccggcaaaagctagactctcctcgtgtctacggcatctcttatgatcattggctgccatccaggaccccaatttgtgcttcagggggataatctccttctctcggatcattgtgatggatgctggaacctcagggtatggagctcacatcagttcatcatggtgggtgttagagaattcggtgacatgcctagtgctgagccttggctgggccatgagagtctgtatactctaaaaagcatgcagcatggtgcccctcttctgaccaacacacacacgacccctcccccaacacccccaaattcaagagtggatgtggccctgtcacaggtagaaaaacctatttagttaattctttcttggcccacagtctcccagaaatgatgttttgagtccctatagtttaaactccctctcttaaatggagcagctggttgaggctttctagatctgtttgcatcttctttaaaactaagtggtgagcatgcattgtggtgtagaggcaggcattatgtaggataagagctccggggggattcttcatgcaccagtgtttagggtacgtgcttcctaagtaaatccaaacattgtctccatcctccccgtcattagtgctctttcaatgtgatgtgggaaagcaggaggatggacacaccccactgaaagatgtaggcaggggcaggtctctcaaccaggcatatttttaaaagttgcttctgtactggttctcttcttttgctctgaggtgtgggctccctcatctcgtaaccagagaccagcacatgtcagggaagcacccagtgtcggctccccatccaaatccacaccagcaccttgttacagacaagaagtcagaggaaagggcggggtccctgcagggctgaagcctaagctactgtgaggcgctcacgagtggcagctcctgttactcccttttaaattacctgggaaatcttaacagaaaggtaatgggcccccagaaatacccacagcatagtgacctcagaccctgatactcaccacaaaacctttaagatgctgattgggagccgcttgtggctgctgggtgtgtgtgtgtgtgtgtgcgtgcgtgcgtgtgtgtgtgtctctgctggggaccctggccacccccctgctgctgtcttggtgcctgtcacccacatggtctgccatcctaacacccagctctgctcagaaaacgtcctgcgtggaggagggatgatgcagaattctgaagtcgacttccctctggctcctggcgtgccctcgctcccttcctgagcccagctcgtgttgcgccggaggctgcgcggcccctgatttctgcatggtgtagaactttctccaatagtcacattggcaaagggagaactggggtgggcggggggtggggctggcagggaattagaatttctctctctcttttaatagttttattttgtctgtcctgtttgttcatttggatgttttaatttttaaaaaaaaaaaaactttgctgatatttataattttgtatcataagaatgttttcctctacagtatttgtcatgccagtttataacaaaaaaaaatgcagggattttatttctattggaaacattacagctatgttttacttttggacagaatttttatttgtatagagtgcttactaatgttaaatagttcagagtatataacatttacattaaggactcatggtaggttttagggtaaggagtttaaaggaaataaatattcaaactgggtctcattgccaattttggtggaaatgagtttgtgtcatttcaattacaaagataaaagtatgccatataatttatttatatgaagatttatttttgtagtgtacatagtagtcatcaagtcttttgacagaagtatatttttaaagaatttatatgtgatgaatccataatgtctggaactttgctgagacatgagtgggcacagttttcattgtaaattacagcaaggaaagaaaatgtttaacagtgttaagagagtcagagcagagtggatattcatgcgattatgaagtgtttattagttaccattggcgacctagcatgcttctcatttcaaaccttggaaggtgaaaatgtacaaactctctaaataattaatgttcaaacactgatagaaattctaacatgaataaaaaataatataacttgttggtt

SEQ ID NO: 177 - DNA, 3813 bp, Homo sapiens
ggagagtgtctctaaggtgacactcgggtgcgcggcagcagcggcggttgcaggagctcgctctccgcccgggctccggctccgctccagccgtccggggggcgccgcggcgcgcagagcgcagcaccccgactccagccaggagcccccgcccccccggagcgcaggaggaccccggcccgcctctcccaggcgcagcgcccagcatctcgctgctcctgtcgtctaagcgtcggcgtcgctagggacctgcggaacccggcgctcccctccctccccgcctcgcgtccccggcccgggcggactggagactcgaacttgagcgggtgcccgaaaggccgcaggagccgcgggcggaaggcggccgcacgatggccgaggggcagggcggcggagggcagcgctgggactgggctggcggcggccgggcagccgaggaggaggtggtgcggcggcgatgccggcgcggggaggaggcccaggtcgcgcagccctggcccgagggttcccggggcacggccgctgggcccccggtggaggagcgtttccgccagctgcacctacgaaagcaggtgtcttacaggaaagccatcaccaagtcgggcctccagcacctggccccccctccgcccacccctggggccccgtgcagcgagtcagagcggcagatccggagtacagtggactggagcgagtcagcgacatatggggagcacatctggttcgagaccaacgtgtccggggacttctgctacgttggggagcagtactgtgtagccaggatgctgaagtcagtgtctcgaagaaagtgcgcagcctgcaagattgtggtgcacacgccctgcatcgagcagctggagaagataaatttccgctgtaagccgtccttccgtgaatcaggctccaggaatgtccgcgagccaacctttgtacggcaccactgggtacacagacgacgccaggacggcaagtgtcggcactgtgggaagggattccagcagaagttcaccttccacagcaaggagattgtggccatcagctgctcgtggtgcaagcaggcataccacagcaaggtgtcctgcttcatgctgcagcagatcgaggagccgtgctcgctgggggtccacgcagccgtggtcatcccgcccacctggatcctccgcgcccggaggccccagaatactctgaaagcaagcaagaagaagaagagggcatccttcaagaggaagtccagcaagaaagggcctgaggagggccgctggagacccttcatcatcaggcccaccccctccccgctcatgaagcccctgctggtgtttgtgaaccccaagagtgggggcaaccagggtgcaaagatcatccagtctttcctctggtatctcaatccccgacaagtcttcgacctgagccagggagggcccaaggaggcgctggagatgtaccgcaaagtgcacaacctgcggatcctggcgtgcgggggcgacggcacggtgggctggatcctctccaccctggaccagctacgcctgaagccgccaccccctgttgccatcctgcccctgggtactggcaacgacttggcccgaaccctcaactggggtgggggctacacagatgagcctgtgtccaagatcctctcccacgtggaggaggggaacgtggtacagctggaccgctgggacctccacgctgagcccaaccccgaggcagggcctgaggaccgagatgaaggcgccaccgaccggttgcccctggatgtcttcaacaactacttcagcctgggctttgacgcccacgtcaccctggagttccacgagtctcgagaggccaacccagagaaattcaacagccgctttcggaataagatgttctacgccgggacagctttctctgacttcctgatgggcagctccaaggacctggccaagcacatccgagtggtgtgtgatggaatggacttgactcccaagatccaggacctgaaaccccagtgtgttgttttcctgaacatccccaggtactgtgcgggcaccatgccctggggccaccctggggagcaccacgactttgagccccagcggcatgacgacggctacctcgaggtcattggcttcaccatgacgtcgttggccgcgctgcaggtgggcggacacggcgagcggctgacgcagtgtcgcgaggtggtgctcaccacatccaaggccatcccggtgcaggtggatggcgagccctgcaagcttgcagcctcacgcatccgcatcgccctgcgcaaccaggccaccatggtgcagaaggccaagcggcggagcgccgcccccctgcacagcgaccagcagccggtgccagagcagttgcgcatccaggtgagtcgcgtcagcatgcacgactatgaggccctgcactacgacaaggagcagctcaaggaggcctctgtgccgctgggcactgtggtggtcccaggagacagtgacctagagctctgccgtgcccacattgagagactccagcaggagcccgatggtgctggagccaagtccccgacatgccagaaactgtcccccaagtggtgcttcctggacgccaccactgccagccgcttctacaggatcgaccgagcccaggagcacctcaactatgtgactgagatcgcacaggatgagatttatatcctggaccctgagctgctgggggcatcggcccggcctgacctcccaacccccacttcccctctccccacctcaccctgctcacccacgccccggtcactgcaaggggatgctgcaccccctcaaggtgaagagctgattgaggctgccaagaggaacgacttctgtaagctccaggagctgcaccgagctgggggcgacctcatgcaccgagacgagcagagtcgcacgctcctgcaccacgcagtcagcactggcagcaaggatgtggtccgctacctgctggaccacgcccccccagagatccttgatgcggtggaggaaaacggggagacctgtttgcaccaagcagcggccctgggccagcgcaccatctgccactacatcgtggaggccggggcctcgctcatgaagacagaccagcagggcgacactccccggcagcgggctgagaaggctcaggacaccgagctggccgcctacctggagaaccggcagcactaccagatgatccagcgggaggaccaggagacggctgtgtagcgggccgcccacgggcagcaggagggacaatgcggccaggggacgagcgccttccttgcccacctcactgccacattccagtgggacggccacggggggacctaggccccagggaaagagccccatgccgccccctaaggagccgcccagacctagggctggactcaggagctgggggggcctcacctgttcccctgaggaccccgccggacccggaggctcacagggaacaagacacggctgggttggatatgcctttgccggggttctggggcagggcgctccctggccgcagcagatgccctcccaggagtggaggggctggagagggggaggccttcgggaagaggcttcctgggccccctggtcttcggccgggtccccagcccccgctcctgccccaccccacctcctccgggcttcctcccggaaactcagcgcctgctgcacttgcctgccctgccttgcttggcacccgctccggcgaccctccccgctcccctgtcatttcatcgcggactgtgcggcctgggggtggggggcgggactctcacggtgacatgtttacagctgggtgtgactcagtaaagtggatttttttttc

SEQ ID NO: 178 - DNA, 4041 bp, Homo sapiens
attgttctagcaatttattgttacaaaacagattgctgccatcaatttgtctcaggtccttctagcacatctgacagggactagtgtctagagccatgaggacagagaccagaagggacaagaaggagtgggcagagggaatggaaggtagagttaggcccagagagccccaggctgctgcccagacctccacgcctgtgccggatgtggtgttggcatccatagcagtctcgcaaagttgttctcattttccaaataaggaaactgaggcccagggagaggtgaagtgctgcaggggatccaaccaggcgccggctcagtgcctcctagaaagaggagtgtgggcacgtttgcaggatgcctctctgttggaatgtgcctgtttttttaatgcttagacgtggattatggcttttggggaggaagactacagaggtaaaggccattctcatcgcaccgtatccagggtccacgctggccgtgatcccctgcatgaggtgcttgccaggtttctctaccgtaaagttactctttttgccccctttccttactgtactctgggagaaagtcgctgtgtgcagcccatgcctaatgagtggggaattttgctcataagtggtttgcattctgcacaagggatatgtctcttcaccccatgtattaattcattcatatcaccaagaactcatgggttataatcccgtgttacttagttttgttcgaatgtttccagctcaggcccttaggagctcactaagctcctatgtcctgtttgcataccctgtcattgtggggttttgctgggttctgtgtgtgttaaacactttcctactttctggcactacaagatactccaggctcatcttgtgtgtttcgtaccgcagccctaaaatcagccatttctccaagaagccctcgttccttttattggagagagagattagaaaccatgggtgctgggtgtgttcattgcttctggggtgtctgtcttttgggccatctcatctgacgaaaggatatatgtgtttctactaacccttgtgtaaatatgcacctataaacatttccgtgtatagccatctgtctccaactccagacgtactgtgtggatcattctagcctcctctccttgcttatctgtaagtcgcactccaatggtgagcgtggctcccaccatccatttgcttaattgttcagtctcagtctatgcctataacagtatctgaatcctttacttgaacttccatgggaaacatctttatcaattagcgtatagtgtttctgtgcagtttggtaggtgtctttttaagatcctctctctaaccttgggactagaagtagaatttaggtaaaaattatgaggttgaattaaaaccatcttcagcctcttccccacaacccatgttgttatcaattaaattctgaaattttttaagatgtccagtaatgtaacatctaagtttagccccttataaacagttatggtatcataacctcttaaattagcttatgtaactttttgactttgccatcactaacataatgcttattttctccccaaagaaaaaaggtttggtatgaaagtccttccttgggttctcactcggtgagtataagccatgagccactttataatcttgatgggagtgagggtttaaaagttggcaaaactcttacctggaggtctttccatttctgtattggaggggatagtgtctatgtggatgcgactggatgccattggcaacatggagttttgatcttttcaaaaaaaaatgtactgacattaatgttttctggaaagtcatatcttttatcaaattataatatggtaatatccattcagtttttagtgtgtgtgtactgtaaaagtttatacaatatatggctcccattctgaaaaataaatacatcacgtttccaaaaaattactgaattattccctttagcacggtgaactttatggtatgtgaattatatctcaacaaaaactttttttgagaaaatatttactggcagtacttttaatcttggagggttaccaggtaaaatttaaaaggatcccggtttataaaactttatcttaatgaaagctgaggcagctgagagtgatagctgctgttgatctggttgcccatccagccctcccccagcccctgctgtgtgacttggtgagtttggagttgtaacgctgcccttggggtgtgctcttcttcttgatggagacttacaaaccatccaagttggaattcctcatgaggagcacctcaaagaaaaccaggaaggaagaccatgcgcgcctgagggccctgaacggcctcctctataaggcactgacagacctgctgtgtacccctgaagtgagtcaggagctgtatgaccttaacgtggagctctccaaggtaggctgtgtggccaaagagaagaaatgggttgagacagcaggcctggcacttactttacctggcccagtcttgcctgacaattaaaaaaagacgctttagactgggcgcggtggctcacgcctgtaatcctagcactttgggaggctgaggcgggcggatcacgaggccaggagattgagacgatcctggctaacacagtgaaatcccatctccactaaaaatacaaaaacttagccgggcatggtggcgggcgcctgtagtcccagctactcgggcggctgaggcaggagaatcgcttgaacccaggaggcggaggttgcagtgagctgaggccgcgcctctgcactccaccctgggtgacagagcgagactccgtctcaaaaaaagccactttagcacttatgaagtcttagttctgggttgcagaaatagaaatgatgctcagtctggtcattggagccctggagacagatggtgagtgtctgtgctgtgcagaggcagatgtctcactgcaaggtgggagtcctgtgaccaaacagcgcctggcacattgtcagatagtagaaggtctaagcctgccgtgggaagaggatgcatctgcatgtacctcagtacagaggtacaggagatgacttcctctgacccactcagtgagttgtaaggagaaaaggcagcatcgagcatttttgattagtgtctcagggcaagtggctgtgaggcaagcgtggggtcagggttccggtttggttctgcaaaccaggtggtttggtttgcgggtcctggtgaagagaggagggaggttttggtttctggggccctacttcacctggggacatggtgcggcagcaggaggtggcctccagcagcatgccagagccctggcttgggtgggaggggcgtctgcagctgtcgttttcatctcctggatgttgtttgtcttgaaaaaccatgtaagctaaaaagtgacctgtggaggggcggggtctcaggtttccctgactccagacttctcagcctgccgagcgtactggaagacaacgctctctgctgagcagaacgcacacatggaggctgtcctgcagagaagtgccgcgcacatgaggtgatgacctttgctttctgaatgtacttgctttttgctcataccctaaatttctcagctgtttcacttgtaggtggacttgaacttttcattgagtatttttgcttttaaagaaaattttggaggcattttcttgaagttcatagtataatttgcatttttgtataagctataatgtaggttagcatttattaaagtgtgccaggatcactagggatctggagatcctgtcagggagttcattagggtaagacgttatttcacctctcctgctgtgttgacatttgcactgagggtacagaaaccatgagggaagactgctggtgccatgctgccagccagtgctgtaggggcgccatgccacatgcctagagtaaaagacaatgttacttttacttaagaatatcccagatgaggctggacatggtgcctctcacctgtgatccccgcaactcgggatgccggggcgggaggatcgcttgaggccaggagttcgggaccggtctgggcaggatggcgagaccctgtctctac

SEQ ID NO: 179 - DNA, 3529 bp, Homo sapiens
cttcaagtgagccactcctggcccaattcctgtctcccgttggcctatagaggccaagcctctgcctcatgatggcctctgcaggtcaagctcctcctcctggttccgtctacaggcccaacacttccctcaaataaactcttctgcccagctcctgtccagctcacggcagccactgtcggcatgaaaattcctcaattcaagctctctaggcccaccttctgcctcccactggcctggacacgcccagctccaacctgacaatggtctctacaggcccagctcatcgggctctgagggacctctccaggccaagctcttacctcacggaggcttctccaggtcgtttctccctgtcttcaggcagtggtgacaggtcagctcctcctccacagtggcctcgtttgggcaggtcctgcctcttgcagcctctcaaagcccagctcctgcctctgagtggcttctgcgcacccaaatgtcctccagtcagcctgtcctggctgagctcctgcgacctggctgagctcctgcctcctgtcggcctctataaacccagcctctgctgtatggtggcttcttcaggcccagctcttcctcctggcggtgtatacaggtccaactcctgcttcccaatggactctttaggccaggctcatgccttacggcagcctttcctggcccagcttttgcctgttggcataccctccaggcccacaatgtactcagatcagccactccattcccagctcttcttcctggctgtgtctacaggcccaactgctgcctcacaacaccctcttttggcccagctcctgcccagcacctggtggcctctatatgccccagacttcttaaagtcaactttgctaggcccacctttggcctcccagcggctttgacaggaccagctcttgcctcatggcagcttcccaacgccaggtttctgcctgcattgtggcatccttgatggacccaactcttgctttatgccggccttcccacaccaagtttctgcctgcctcatggcaggatccgataggcccagctcctgcctctaatggcctggttaggctcatctcatccctcaaggtggccaccccagatgaagctcctgccttttggcagcctttagaggcccagctcatgcatctcattgcctcttgaagcccagctcattcctcaaaacggcctatccacgcccagcttttccctttggtggcttctccaggcccagaaattcctcagttcggcttcgcaaggtgaagttgctgcctccctgtgccttctccaggcccagttcttcctcccagctgggtctacagtcccatctcctgactcaaaacaacctattttggctcggctcctgcccagcacctggcggcctttgtaggcctaaagcttcctcaagtcaagcgttccaggcccagatcatgctgcccaggggccttcacaggcccagctactgcctgacgatggcttccccaggcccaggtcttgccttcccccagcctcccgaggcccagcccttgcctcacagttgctttcccagtccacgttacagcctgttacccgacggccttgacagaccaaactcttccttcacactggacagtttaggacaagctcatacgtcttccagcctctccaggtcaagctcctgcctcacactggcctctataggcccaggtgctgaatcgcaatggtctgtttaggtccatctcatgcctttctcagactctccaagcgacgatctggcctgacacttgcttctgtgggccatgtgatcactcacactggcctctttaggatcaggggatgcctctccacaggccgagatcctgcctgttgtaggccccttcaggatgcgccgctgcctgacagtggaccctccaggcctagatgttacgtgatcatggcctctgcaggtcaagaatttaaattttcgcagcctctataggccaggctactgcctcctgataatggcttctgcaggcccaaatcgtcctgaaataagcctcgccaggaacagcacgtgtgttggatgcccgaacaaccatagcttctcccgcacagtggcccatgggggccgggctcttgcctcagcctggccacctcaggcccagttcttgcctgttggcggccgctccaggcccggctcctgcccctcggcctcctctccaggcccagaactggttcccgtcggcctctccaggcccagctctcccggccacctccacgggcccagctcctgcctcacgacaaccacgttcggcccagctcctgcccagctcctggcagccgttgtaggccccaggcttccctgcgttcaggcctcccggacccaccttcggctttccggcggccctgagagacccggctcctgcctgccagcggcctctcccggcccagctgcggcttcacgtcggcctccccaggccacgtttccgcctgcctcacggcagccccggcaggcccggctcccgcctgccgggggcctcttgaggaggctcatctcgtgcccggccgcggcctccccaggccaggctcctgcctgccggcaggcgccacaagcccagctcctgcgtcccgaaggcttctctaggcccggctcgtgcctcgctgcggcctcttgaggcccagcttttcccttgtggtggcctctccaggcccagaacttcctcaagtcggcctcccccggtccagtggctgcctcccggcctcctctccgggcccagctctttgctcgcgtctgcgcccgtgggcccagctcccgtctccaaacagcctccttcgactcggctcctgcccagctcccggcggccttcgtaggcccgaagcctcctccagtccagctctccagggccgcgtcttgcctcgcctcgcctcccctcaccttgcctcacctcgcagcagcctttccaggcccagctcccgcctcccggcggccttcccctgccacgctcgtgccggcctcccggcagcctccaccagcccggctcctgcctcacgctggcccctctgggcccagctcatgcctcgcggtggcctctccgggcccagctcccacccagcctgacggcgcctcccggccccaagctgccttcctcgatgtggcccaaagtggcccaaagcgtcccaaagtaggcctcgccaggcccacctcctgcccggcgtaggccctgaggggcgcggcccctgccccatactggcctcttttgggccctctcttacaccagcccctgtctcaggattgtctcttcacgcccatcttctgcctcatagtggtcactcaaggcctcgcttttgcctgatgattgcgttttctggttttgctcttgccttgtattcccttcttcgggatacagcttttacgtcttccatggtgaacctcatcaaggagactaaatcttccctggtctgtcatttttttcacttcacaccagagtgccttgggaaaaccccatctcttcttttaaccttgagagtggatttctgacgaattgataataaattttttctctgtggtttc

SEQ ID NO: 180 - DNA, 4204 bp, Homo sapiens
ttatccctaagccatttctctcaagttaacactacttcatttacaggttgggaaggatttttaagtagatgtggttccctggccttcctatgtctcaagttttaggttttaaatggaaatgtttgaaaatcatcagaaacagcccagagactcagaaaccactgcgaaactatacaacccatttgactttttttctgcagccttcctgatatggccggagtcttgaccctcttggaaggagtttcagcccctgaaactcggaatgtagacactacactgactttgaactgacatcccgtatgttgtcctgatgtctttcttaagtccctcttggatgacatttctaaaatataaatgtttctctgccagctctgtctgaaaggtcatggttttggagatggtcccccacattctcagccaatttctcaggggtaccacaggccatacagggcaaaggaactggtggtcttgcacattataaaatgcacagtcacagatatgggaagcccacctggaaaaaattcatgtatgacccaggtagaaggcacaaaaactatccccacaccaacaaatttgtttggttaagctcaatgtgtgataccgatttttttttttttttttgagacagagtcttgctctcttgcccaggctggagtgcagtggcgcagtctcggctcaccgcaacctcctcctcttggattggagcaattctcctgcctcagcctcccaagtagctgggattacaggcacgtactaccacacccggctaatttttgtatttttagtagagacgggttttcaccatgttggccaggctggtctcgaactcctgacttcaagtgatctgcccaccttggcttcccaaagtgttgggattacaggcatgagccaccatgcccagcatgtgatactgatgaaagcatgctccccttaaggaatgcgaaggtggatggagtgaacagcgtccccagggcacatgtcaataaaaacaggttaggcgtctttatttctcagcattatggtagaagggaccagccagccatcagtttttagcagtgatcagggtaggaagacactttgccctgccttttaggggccaggttggaagtgagtatgacttggaagaaatgcaaggctgtgcaagaatcaattcacacccatcaggggcatttggtgatggtcatgtgcagtactgtgacaatgtagttgacaggtggccattccttcctcttttctgcacattctttccagatggatggggctgcttctgggcggcccagagtgttgtaggttcttgggggagaggaaatgggcctcaactgctaccccaagagctctggaaatggcattggcatgggtatgctccacggctcagccttctcctgttccctgggcctcctgtcgtcatcacgcaccctgacctgggcgacttgcataacattacagaagtccaaccactgcagggaggcaggtggtggcactcacgaacatgttcatcccctctctgcggccaccactccctcccactgctccttgtcagcctctctttggcagagcgtggccccgctgggccttccgagtgtttctggaggaatgcattgatacaaaaggaggaggttaaaagtttgaaaaccgtaggtgataaaactgggaactgcttttgcttcatgtacaataaatatcttcctttttatgtttctcattttttaggaatctgaagctttattcctcaaggcaattaaagcaaatccaaatgctgcaagttaccatggtaatttgggtaagaaaaatgttcaacttgaatcgtgttgaaattttgttactttaatgaagtgggtgcatgtctataaaatcaatgttgggagagtagtttttttcaaagctagcctggctttaaaatgtggttctgttattgcattaaaaagatagcaaagtgatagccacacttacaaatctcaattgcatgaccagaacagccccaaagtttgcccactctattaccttctcatgatgaaactcagattgtccttctttgtgttaagctgagaagggtgagattggatcaagagaatgaggctatggttgcgaagagttctcctagtaaattaatcgtaggtactttggaagcttgccattgaacttacctccttttccttccttcttacagagtagaccttccccttccagcctggtcttctgctttatatcctcttatgccttggctaaaatgcatttataatcatttattccctagaattcatttcttgcatttgtatgtctccatagttaagatgtttagagcatagcattgttgatgtttagaatgctcacagaaatgttttttcaccaaagctgttctctaccaactctgaagcttctcttcacaaaagccaaaaagcgtccacagatgctcttctgcccatatagaaagttaattttactaacaaaatcactgtcatgatcagaggctaatcatcctaatgattaggtttactgtaactatcattttagggtcagctcttgatatcagaggccttttttctaaatggacccaaacaagctattacttccccaaatggtgtaaggaaatatttaaaataaacagctgaacttctgcatagtcagggctctgggcagtgcctagcatccatcacccccacctcccatacccagccttgcttcctggaaatttcatggcagcactaagacattgcatgtactcttctttttgcttctttatgtaataatgttactataggcagatgtatcttatctagtgctatgaagagccctaggagtaactggcagtaaatggataatcatcagggagtgtgattacaataaatagagttttcagtacaaacaatattgtttcatacaattgacttttgaaaactgtttgcataggatctgtaatatttctttgtccaagagggtaggaatacggcacgttactcagaagcattcccagtgaaatttatctcctgctatttcagctgtgctttatcatcgttggggacatctagacttggccaagaaacactatgaaatctccttgcagcttgaccccacggcatcaggaactaaggagaattacggtctgctgagaagaaagctagaactaatgcaaaagaaagctgtctgatcctgtttccttcatgttttgagtttgagtgtgtgtgtgcatgaggcatatcattaatagtatgtggttacatttaaccatttaaaagtcttagacatgttattttactgatttctttctatgaaaacaaagacatgcaaaaagattatagcaccagcaatatactcttgaatgcgtgatatgatttttcattgaaattgtattttttcagacaactcaaatgtaattctaaaattccaaaaatgtcttttttaattaaacagaaaaagagaaaaaattatcttgagcaacttttagtagaattgagcttacatttgggatctgagccttgtcgtgtatggactagcactattaaacttcaattatgaccaagaaaggatacactggcccctacaatttgtataaatattgaacatgtctatatattagcatttttatttaatgacaaagcaaattaagtttttttatctcttttttttaaaacaacatactgtgaactttgtaaggaaatatttatttgtatttttatgttttgaatagggcaaataatcgaatgaggaatggaagttttaacatagtatatctatatgcttttccccataggaagaaattgactcttgcagtttttggatgctctgacttgtgcaatttcaatacacaggagattatgtaatgtaatatttttcataagcggttactatcaattgaaagttcaagccatgctttaggcaagagcaggcagcctcacatctttatttttgttacatccaaggtgaagagggcaacacatctgtgtaagctgctttttagtgtgtttatctgaaggccgttttccattttgcttaatgtaactacagacattatccagaaaatgcaaaattttctatcaaatggagccacattcggggaattcgtggtatttttaagaattgagttgttcctgctgttttttatttgatccaaacaatgttttgttttgttcttctctgtatgctgttgacctaatgatttatgcaatctctgtaatttcttatgcagtaaaattactacacaaactag

SEQ ID NO: 181 - DNA, 4614 bp, Homo sapiens
ataaatatggtccccctatttattctgtagtcacaatcagcaccatcacccccacacgcgccttcatgactgggtatcataaaaccagggttaggggcgaaaagagacagggagatggaaaaaaaagttggagaatttatgtgcaatcctgtcaactgcagatgacaaaagtaaagccacagatttcccgcatgcttcgcagaatgggaaatatttttctcgaggactgggccgctcccacccccactctaaccctcccctcccccacattaattccaacctcagaagttcagatcaagggaagggggcaaagggaattccagagccgttttcttgactccagtttctttcctctttgccttcctatggtttccccttccctaggtatcctttgaaacaaaaaacacacaagtcctaatttttccaacctcctctataaaggaggtaagggagattcatcgtcttttcagcagggggtgggtgggtggtggttagacgcttccacccctatggagtggcctgggcacacagataaacatctgcctgtcgtccacagactcaatatacattgtatacttggagtagggagtgaattcaaaacaacaagaaatacagacaaaggaacaccagagaggcttcagggttcaatgctgtgaggcctccccgggcctttttcccaccccaacccctgtagaggcgttgcctgtgtagtcttgtaggtgcttgggctccgggtgtagagcgagctgatgacgtcactgagtcgaagcctctaaagtggagagacctgacctaggcggccgtgtctgggtgaattgcgtcaattcggtgatggtctttgttagtaattgcacaatgttcgtcttatttttaaaaaggtgtaggaggaactagagaaatgatccacaataataaatattgtaaaggcaaacacccagtgggtctagattgaatgtgtatttgatatgctgcgtatgaagtccccagaaaaaaagaaccagatgttgaaggagggggcgagaaaggcctttgcaattgcggccaaagggaaaaaaatcaggtcctttttcccccctccccccatctgcagggagaatgcggctgccccaaaatcctagctaagacttgaagaagtaaaggaaaataaaataataaagctttggcagactcatctcagttccctaagaatttgaaaatcagtgtgtgtgtattggggagggaggtaggttttctctctggggagggccccacaaaagacctcaattttaaaatctgagcccagcaaacaattcctggccctgccactgatgaattttcttctgctctatcctcttcagacgcaattagacaattagcactcctgcccgcagcccccacaactttcatcagatgaaataacatcctaactggagtggaactattttcatgactccaaataaaaaatgcagtcttccaaatacacctttagtgaatccgtccttgagaaagggggactgaaattcctgcctacacctaatacaatagggcccagaggctgcctgacccagcgcgggcagtcggcaacaaacaactccttcccatagtgaaacaccaaccccaccactaaggtgcagagggcatttgcggaacttgctgcttctgccaatgtttaaaaagtcccccttcctgaagtaggacttttttctttgtcttctgtttctaagctccccattttgctttctatctcaatctaaaataatgaaataaaacaaaatgtttggtcggccactaatcgcctttaatttttcatttgcttgttacagatgtccaccgcgttgctcgcaaggtaatctcgctccgcgcagctgagcgccccgcatctcgcgcctgctacatcaaagggcccgcgcacaaagcagtgtttcttcgccacggtgcatcttcatggtaagttaggatttctatggcaatgtgcaagtcgcactgaaatcctgaaaggccaagcctggagcccgtccaggcttttcattaaggacataatatttacgtctaacagaccttttttcttgtgtatacaagtatatatttttgtttgacgcggactaaatcattttcatttaatttccggtaaacaaaacccacgcgaatgggcacttgtacccgatcataataaaaatggataataatgtgaaggaagaaaagagccgcttgaatcgccgctcagccccctttgtttctgctttctgcggtgatcagagggcgcgtttgggtttgatggcgagtttctaaaggcgaggaaatggtttgtaagaggggaaagaaaaggagaaaggtctaatcaagctcgggttgttcaaagagtcgggttttggggttgaaagtgtgagtttgacggtgcatcagcatgccgcgttaggctcgccatggaaatacgcgcggggagcggccgcttcaaaggcggcacacttcactacagacactctattaagatacatttgcgctgacctttgctttcacgccatttaatactgtcactgcgctctccagtatatacttcctttctagaacccgacttgcccacgtttaggggttcactctgcaccctgatgtgggaggctttggcgcaggggacactttcaggaaagggaggagcacaaggactctgtgcatcttgactgcaccccaaagaggctccaggatcaggagtgaaagattttaaagcagcctccgaagcttaacaaatgagcattccaagctcagttttgtgcaaatcgcctttctgactcttgagtaggatggaggcttaaatttaatggcgacttggggggaagggagccaccctgggggagtctgaggagttcagactgtgcccttgggaatttccactctggctttccgtgccactcttcttcctttccatcccaaaagtctcttgcggcccctgaaacttgtttctttctaaggcagggtgtgtggtacccttaggcctggactagtcctagatgcaaactcaagagcccaaggccaaggggatgtggggaagatggcaggaaagttagaagtccatgttcccttaattgtcttgttgtttattttatccaagtaccccagtgaataggggaaaaataaacacagtgaaaaaaaaaatcaaacagtggagtcttctttagtgccagtccttgtggttgaataaaaaggatggtccgctttctattgagctgagaaatctttgaagtgggagttattatctgagacattcctgcttgtcgtcctaacaacgctgatgaaacgtaaaaggttctttgtcagcgatttgttctcctctctgtcaaactccctctgccccgttagtttcaaaccgtttctaaagagataaaaatcaaacttcttttaaaacaatatccacacactgcatcaatacataactttaggtctaagtcttgctaagggataaacaaaagcaatgcctagacatcagggtcagggcctggtctggtgaagtatgcagaagttggggggccctcgggacaagctttgggacatgaggaaaagaatgcagagagggtgcaagcagaatacataccctaagtccataattgtgtttctgcttctttctgctctggtttgcattcaatcagcccaagttgggtcacatagatgggtttcctttgggtacccctcaggctcctaatattcttgcccaggatccttggaacttaagaatgcagccaagcaattgttaatatctcctgctccttcaaagccacctctgctaaaaatagacccattgtgtgtttcttctcactagcagcaatcaacaagccctttctgccgttaataagaaggagaatagctgaaggagagagatattttattaatttcctgtttccttcagaatcttggcaattgaagtttagaaggtttggtctacaacacagtgatcgaaaatgcatgtaaatgcccatccttcccttcattcacgtgtgaagttgttcattttatattgtgcccagcaaagaaactttcacccagttcaggtttccccaaaactcctgtggtggttttaaaggtggtttaaataaataaggatgtgctggtccccctactctgtgtgtgctgaataaatggcttgtaaagaagtttttccaagctgtaacccatgctgttattatagttgctgcaaaatgttcttcctgatattgattttatttgttaactgaaggtctccatatgtttgtttatattgctaatttatgagaaaatgtaataattgcaatgaatgtgaattatacagacaggcaaacattttgtaatcataattcacatatacacaaaagcctggctgaaatctttagactatttgtaccctctctacccacactgtttgtgatttatcatctgtctctttagtgtcagttaaattatgaactaacttgaaaataaaagttgtttgactgaaagtgattgttgaatgaacaacaaagttgaaagccatggcttgatcttgtaaatatataaatgtaaatgatattaaatctgtgattccttttccctccaaaggcttttgtgtacatggcgctgcatttggctattttctttggaaataaataatgtgatgtttctcttcctcttttg

SEQ ID NO: 182 - DNA, 4442 bp, Homo sapiens
ttgtctttctgtgcctgacttatttcacttaacatcatatcctacagttccatccatgttattgtaaatgacaggatctcattcttttttgtggctgaacagtactccattttgtatatgtgccacattttctttttttttttttttttttttttttttttttgagacggagtctcgctctgtcgcccaggctggagtgcagtggcgggatctcggctcactgcaagctctgcctcccgggttcacgccattctcctgcctcagcctcccaagtagctgggactacaggcgcccgccactacgcccggctaatttttttgtatttttagtagagacggggtttcaccgttttagccgggatggtctcgatctcctgacctcgtgatccgcccgcctcggcctcccaaagtgctgggattacaggcgtgagccaccgcgcccggccacactttctttattcatttgtctctcgatggacacttaggttgattccaaatcttggctattgtgaataatgctgcaataaacatgcgattgcagatatttctttgacatactaatttcctttctttttggtgtatacctagcagcagaattgccggatcatatggtagttctgtttttagtgttttgaggaacctccatactgttctccatagtggccatactaatttgcattcctactaccagtgtacaagggttaccttttctccatatcctcaccagcattcattgttgcctgttttttagataaatgccatttttactggggtgagatgatagctcattgtagttttgatttggatttctctgatgatcaataatgttgagtaccttttcatgtatctgtttgccatttgtatgtcttcctttgagaaatgtctattcggatgttttgcccactttttaatcagattattgaatgttttcctattgacttatatgacctccttatatattctggttattaatcctttgtcgaatggatagtttgcaaatagtttctcccattctgtgggatgtctctttacttcgttgatcatttcctttgctgtaagaaactttttagcttaatatgatcccatttgtccatttttgctttggtgcctgtgcttttggggtattcaagaaatctttgcccagatcagtgtcctggagagtttccccaatgttttattttagtagcttcatagtttgaggtcttagatttaaatctttaatccatttttatttgatttttgtaggcaatgagagataggggtctagttttattcttttgcttatggatatgtagtttttccagcaccatttattgaagacactgtcctttcccccaatgtatgttcttggcacctttgttgaaaatgagttcactgtagatgtatggatttctggattctctcttctgttccattggtccatgtgtctgtttttatgccagtaccatgcagttttggttcctatgactccatagtataatttgaagtcaagtaatgtgattcctccagtttcgttttcttgctgagggtcaggttttttgctattctgggtcttttgtagttctgtataaattttaggattattttttactatttctgtgaagaatgtcattggtattttgatagggattgcatgtaatctgtagattgctttgagtagtatggacattttaacaatattgagtctaccaatccatgaccatggtatatctttgtgtcctctttgatttcttgcattagtgttttatagttttcattgtagagatctttcacttctttgattaagttattcctaggtatcttattttatttatagcttttgtaaatacaattactttcttgatttcttcttcagattgtttgctattggcatatagaaatgctattgatttttgtctgttaattttatatcctgcaactttactgaatttgctttttagttctaatagtttttggcagatttttttaggttttcctaaatataagatcatattatccacaaacatggataatttgacttcttcctttccattttggatgccctttatttcttcctcttgtctgattgctgtagctggcactagcttcttcttttctccacagcagcctgccttagaaacatgaacactctttcttttgcagttttaaaagaaggtagacagctgacctatgagaaagtgaacttgagtagcattagggccatgctgaatagcaatgatgtcagcgagtacctgaagatctcacctcatggcttagaggctcgctgtgatgcctcctcttttgaaagtgtgcgttgcaccttttgtgtggatgccggggtatggtactatgaagtaacagtggtcacttctggcgtcatgcagattggctgggccactcgagacagcaaattcctcaatcatgaaggctacggcattggggatgatgaatactcctgtgcgtatgatggctgccggcagctgatttggtacaatgccagaagtaagcctcacatacacccatgctggaaagaaggagatacagtaggatttctgttagacttgaatgaaaagcaaatgatcttctttttaaatggcaaccagctgcctcctgaaaagcaagtcttttcatctactgtatctggattttttgctgcagctagtttcatgtcatatcaacaatgtgagttcaattttggagcaaaaccattcaaatacccaccatctatgaaatttagcacttttaatgactacgccttcctaacagctgaagaaaaaatcattttgccaaggcacaggcgtcttgctctgttgaagcaagtcagtatccgagaaaactgctgttccctttgttgtgatgaggtagcagacacacaattgaagccatgtggacacagtgacctgtgcatggattgtgccttgcagctggagacctgcccattgtgtcgtaaagaaatagtatctagaatcagacagatttctcatatttcatgacacatgtgaagaggcatcgtggacttttttctactcaattccagccaatgttgaaaagaaaaagaaaaaaaaaactctctaatcagttgtacacacattgaaacttatagccatggccagattttatgctaaaaatggtagtttgtcaaagacaaaattctcttagaatctaatccaacttgccagccctgagaaaatcccttttaaggccaaggaaagctgaatgctagcagccaggcctgtggtacttccatgagaaaccatagcagacaatgccctcccaagtactgaaatcacactggaatcccccttgttgggttcatttgattgtttaacacaggatgtgttgtgtcattctgaagtttttatttggggcagaagtctttatggagatgtaaatgacagcgtttctgggttatgcataacttctcactggtcagagacaccggtgtgtcaagcatggatattgcattgcaagacttgaatctataaaaattagaatcacacagtcagtactacaagcaaaacagagaacctgaaaaaaggtgcacagactgtaagaaaaaacccaagtttgtgatatttcagtgattccaaagaacattctaggttttttgtttgtttttttgttttttgggttttttttttttactgcagaaaattggtggtattttcacattcatagtgtttctatccaatttcagtacccacatttaatgaggaaaaaatgttttaccaatgaaggaggaattcttaaattagctgtaatgttaggttggagaaaatttggtatttagggtattttcaaggtaccatcaaatcagatttctgtttttttgttaaaaaaaatttttttaatcagtattgtttttacaagtaatatactttgaaactcttgaactaatagtctcaaaaactctagaggacagtctgagaacacgtatttctattgttctaaataaatacatgtttttgaatagttcaatcatgaattattgactatgtcttcatcaaaagtgttaatccctctcagggtctctggtgaagaccttcaagagtttggttttttctcccaggaaattggaaggtagaattgtaaattcatagaacttcttttataatggtgtacctcagcagctgcctttcaatttatgccaagtccttacagagtttatacttgaatagtaaatatgtcttctgagttttacagtgtcttaaactcaatgcacatttttttttcttctttttccaccccttcttgtttgtagttcattatacctgtcctattacagaactgatttccttcctggctgtacatgttggggtgctggatttttttccgtgtctttagtcttccataaatccacacacacacacacacacaaaaaatatatatatatataaatatatatgtaggatacatgttctcttctttagcttgtggtgaatacagtaatttgcattgaagaat

SEQ ID NO: 183 - DNA, 4914 bp, Homo sapiens
aatctaacaccccagatcactttgttgagttccccgaagtgtgcattgacaactctgatcactcctttccctctgtgcagctgttcgccttcctactcgttcatcctgcatccacgcatgctccttatgtcctatggatccctcttggtccaacttgcccatccacctatacactctctcttcgactcacagcagctctctgttttctcatgttgttcttcctggttttcttctcttttcttggttctatttttctcttctttcttctccaatttcttctcagtccttgattgcctcagtttgatgttctgttcttttttccttttctttcttgagacagggtctcactctgtcactcaggatggagtgcagtggcatgatgtcggctcactgcaatctctacctccaaaagctcaagcgatcctcccatcccagcctcccaagtaacagggattacaggcacatgtcgctgtgcctggataatgtttaatttttaaatttttttgtagagacaaactctccccatgttgcccaggttgttctcgaactcctgggctcaaataatcctcctgccttggtctcccgaagtgttaggattacaggcatgagccaccatgcctggccagtttgctgctcttaagtgtccattttctatgtcttctcagttcatttctccctcttcacttgtctcttgttttcttccattttattgttcatatatttatctctcctattacctccttttttctttttcccaccttttttgccttgctgtatctattcttcctcctaaacaccctgtacccccatcttattagtttttaatcctaactcttccaaagatcagtacttttccctctgcctataaagaaaaccattcaagtgaaggtgtaaaatccccagctttaggaatgttttccaaacatcaggaggcaggcagcatggtaaatgagaaagaggccaggactgggagtccaaagtcctggcttctatgtctggctttgctactaatcaaatatgtgactttttgcaaaccatacctcactaaaccttactttcttcatttgagcgtgttggaccagctgtccccaggaacccccttggattgatctgagaaggcaaggataagtttttcaaaggaagaaaagaggagtagtcagtccgcagtacagtagacacaagccccaggacatctgagtgtctttcagcaagaactctctgtgatatttcactacaatttctctggcaccttgggactctcctcagcccttgtggtggtgggtcttgtttaactagcagttccctccattctatgcctgtgaagaatctatcacctaccatgtgattacagtgcagatttttttttccttttccttttctttttctttcttttttttttttttttgtttgagacggagtctcgctttgtcacccaggctgcagcgcagtggcgcgatctcggctcactgcaagctccgcctcccgggttcaccgccattctcctgcctcagcctcccgagtagctgggactataggcgcccgccaccgtgcctggctaattttttctatttttagtagagacagggtttcaccgtgttagccaggatggtctccatctcctgacgtggtgatccgcccgcctcgggctcccaaagtgctgggattacgggcgtgagccactgcgcccggcctacagtgcggatattttatgagagaggagatcacaactcagtccccaagccctcaacccttaatacatactatcgtatgaaatgcctctttccaaattcagccttttctaaaactcaagatgagaaaactgctgatgaggctcactttctaaaataccggaatttgcaatatagggagaatagtttttcatgtttctttgtttgagcaatagagagaaaggaaacttatgtcgtttacttttcaggccatagaggttttcagaacaacttgaaaacatgatcaaattggccaaacttctgatagttttcaatgtagtctgtgatcatgggataatttagcctcagttctttttctgaaattgtgttttgaatgtttgatttgacttatttaccatcaaacttgctataaggttattactctaatgaataagcatattcccttaattgggagcaatttactattatttctttcataaagtagggcaccattcaccatctatttcctggctctttagttatcaaaatgttaagctcattgctattcatcccggcacagcacttatatgagaggcatgaagctggctgaattctgcatcattaggaatgacacagcctcatcacattgacaccagtgtttgtctctcacaccaatccaaattaagaccaactgaaaatagtcagagtttcctctggagctcctttttgaagagacatatgttttttagtctggtggtacccaaaattgaacaaaaaatgggtgctgcttctcttaataggcaaaactatgctgcaggataatgtattcatgcagggtcttccagccagaccccaaatcatccctcccttcactagaatttttctgtttaattcgatggccactctccacagggatccattctgtgtcttattacaggagatgctcaatgaatgagggacttatcttctagaaatgcagctccgaggtagtctgttgagtgaaataatgaatccattgtcacagaataaattgaaagctgtctgacatttggacaatttttattttgtttcacattgttctgaaaactatactgtttcttttctccctattatttaaataagcaaatgatgaacagattacaaaattgaggacactcgaggtaagggaaggagcccctcgacaggaggatcaggacatagtaccaagggcaagagaaacgattcaataaacactatttactatatattttaggcatggttctaggtaatcacatgataagtagttgaaagaactgaaaatgttttatctgcaagaaaagggcaagtgtaatatcttcaaattttagaaagaatgtaaattagaatttgacttaatttggtgtagttcttgtgggcagaaattgaattgaataggctgaaagttataagaaggattttagctcagtattgatactggactgctcatgggtggtgagagttactcatcactggaagagttcaagcaggggccataagaaatctcagggattttataaggtgattcatgctctgggaaaaggatgccttggattattgtgtcagggtaacttctaactctaggattctgtgtttctaagatctggactctagtcttgccactcacctgccatcaagaacatgttcctcatctgcaggacaggaccaagatggctctgtctaccttaccgggttgctgtgaggcgtgattgtgataaaatacataaaggcagtttttaagctctgaagcactagttaaatgtgtagcgtattttaagattctgttgtatgtacaattgtttagcagtctctctctctttctttctctttcttttatcagagatagatgattttccctcttatttccaccagtttggcttttcagggaaggtggcagctggcagaatcccctgacaacaaaaggtacagcaaaaagtggaggcctaaagaaaacatgtgctagctctttagcccctgaatagctaagtcacatgtcagcctgctctccttcatctgtttgggaggaggcagattagagtcacactgtcatcatgctcttcccctcagaagcagctgtaaggtttttggtagctgtcagtgctagcaaacagtgcttttctcacagaactactggaaagagtcctggctcggaaaacttgctcttgaaagtggcacggccagagcaggggtctctagagggtcgtgccacctctacctgccacaggttccattgtcggtcaggtaagttagaggcagcagttccccacctgccctctggataacagcagcctggggctgctcctgagtcatgtttccacttctgtcttacaggcctcattttcctacccatctttctgtaaaaatgaaagtcaggagtcttatgaaacttaccattattcaatacaggcttttggtttttttctttaaattagatagggttaggtaagaagtagagttctatagaacgttcataggaagcaacaaaagttgatctcttggtctctacaataggagaggattgggctagataccttcaaagctgacttgccctaatattctagtatgaaatgattcgaaggtacacctgcccctatcatgtcaggcagtgagtacagttaaaacattgggaattggtaaaggaaagaaaaaaactgaaaagaaccctttgaagttagacaaactgtccagagacatagtgctaaaatcctccctctttttctttccacagcttctagaattcctctccagagctactctcaagttatatccaggggacaggcccctttggctccaacccacacgcctgaactttaaggatcattggactatcttctctgtggccagcgcagctctcttctgtgttcacagaatggccactgataggcatgcctcttttcccacccactggaaggctcacaggcaaggtgagagaggacacagaaggtgccaacactgtcgctacagtaaggacctgaagtgactttgagaaattcaccctcacaaaccttccttcaggagcaggcattggtagtgcagaggcacagattccgtcctttaccagctgcagaatcttgggcaagttacatagcctctgtgagcctcatcggtaaacagtgggggttatgaaacccacctcacagggttgttgtgaggatccaatgagttgatttaggtaagcacctagcacatgccgtggcaccaagtaagcactcaataaatcactcaactcctt

SEQ ID NO: 184 - DNA, 4230 bp, Homo sapiens
aaattatggatcaatacaaattttatgacccatctcctcctagaaggagaggcaactggattactctaaaaatgagaaaattgataaagtctaagaaagatattaatcgggaacgccagaaatctctaacattaacacccacccgctcagactccagtgaaggatttcttcagctccctcatcaagacagtcaagatagttcttcagtaggttcaaactctttagaagatggccagaccttggggaccaagaaaagcagcaatactacatcctttgaagacataagtccacaaggtgttagtgatgattctagtacgggatcaagagttcatgcaggtgcagttaataaccaaagcaggccacaaagccacagcagtggagaatttagcctgcttcatgaccatgaggcttggtccagcagtggtagcagtccaatccagtacttgaaaagacagaccagatcaagcccagtgctccagcacaaaatatctgaaacactggagagtcgacatcacaagatcaaaactggttcccctggaagtgaagttgttactctacaacagtttttggaagaaagcaataagcttacctcagtacagataaagtcctcaagtcaagagaatcttttagatgaagtaatgaaaagtttgtctgtctcttctgactttttgggaaaagacaaaccagttagctgtggtctggccaggtcagtaagtggaaaaaccccaggggacttctatgatagacggacaactaagcctgagtttttgagacctggtcctcgaaaaactgaagatacctacttcattagttctgcgggaaaacctacaccaggcactcaaggaaaaataaaattagtaaaagaatcttctctgtcacgacaatcaaaagatagtaacccttatgcaactttacctcgtgcaagcagcgtgatctcaactgccgaaggaactacacgaaggacaagcatccatgattttttgaccaaggacagtagactgcctatatcagttgattcaccaccagctgctgctgacagcaacaccactgcagcatctaatgtggacaaagtacaagaaagcagaaattcaaaaagcaggtctagggagcaacaaagctcctaattctattacccactacatgacatgtgggccaagtgagagaaaagtgtccttcagtttctcagtatgaagcctttatttctgaagtaacaagacacctagcaactataggaatcatttttaaaaatctttaaggagacttttaacagtccttcgtgaatagagcaggcaagaaatacaaaccttcattccttgaatcaaggagcactactggattcaactgccaaaattttttaaaggttttaggacttactataccttgtactgttaagatctactgaataaaggacgttctctcactaaggaccaggtgttttaaggttaagtgtttaaagaagtactccaagaacaatctgcttttttcatcatttgttttatgaatttatccatgtttgcttaatgcttctgctaagtgttagccaaaatctagccatttatatttagttgtgtaaacctaaattaaatgctgtagtattttgtggaatgtactatatagcaagatacagagaaaattgttttggcatgtcagagccttatttggttagcagactgcatgtgttgatactttttttttcttaaagccaattattttgatgcaaaagaaattcagtttataagataaatctgaaaaatccataatgaaataggagttataaaaaatttatagcgatattaatctttccatatttcccattaagcaacactaagcattcataagttaacccatggtaaagagtgtttttctgaaacttttttttagtaagatggtttttcagcaaatggcattcccaagataaagctgttgtgctttaactcatttcttttctttggtattgggttatgtatgcgtgtgcatttttttaacttgagagctgactgttgcttaagaagttttcttatggcaaaaataatgtaaataagttactatgatctgcattttgccagaaactcatttataattaaggctatcatttattaatgatttttttctcctttatgatattacattaaagttgataactgttattggtacttttgaaatatttgtatgcatttgttacctttaaacatttggaagaagcacaaaaaaatagatttagttaacccagggaaacatcaatttttttagtagttccaattttatatcacagttttattttcttatgaaatcaaaaaatgcattgatactcattaatgcaaattcattatttaacatcaatatcagagtaatcttcaaggtctgaaatgagaaacatactgactttttaaaattttaacagtgtacttcttaggctttcattaccagctctgaagaactttttggaataattccatattccatagtgtgtggtttatgagttgtgggtttcatcactaacccagtaaccataagaaaagtctctctctctctctctctctctttctctctccctctttctctctctctttcgtaggccagtagcaatgttgtgttcacagtctaatttccaaaagaccatcaataaaaaagagagcatgtttaaattgaaatggaacttagagaacttgagcttacttacgtacttcaatgccaccggtaacttaggttttaccaccaaatgctgttaacattaaatcattttgaaaatcttggatgaaaggtgctatgtaaatggaaatacaaaggattcttactaacattcaaaaataatgcacaacagaaatatctaaaaccttttccgtagactttgaaacatctctctctgtcataactccctggattcaagtagcacattggtaataggtatcagagcagtctagagacaattgcatgtcaaaaaatgtacattcatttttaggtggataaaagtaaacatagaaattatgttatggctaaatacagttagtgggtaacttagatttatattagctagcatctaatttgcacaactagaacacatcccagaacaattactgaaaagctgaaatttaatgggtggtgatgtagcccaatgagggcgaatgacattccagcttgacctctccagaacactaatatcctaaaatacagaacatgctgggttaagtgcattagtgcttcaagcagaaaatgctgaaaacaacgtgtaaagtactgaatctgagtaggctgaccctgagaagggacaattaaagagacaaccaagggaacacattgagactacaaaaatatgaataatctcaattatattcatcacacttttttcataccatttcaagaaacaactagacagtagtaaccacatgaatattttactttctccagtataccttgagaagcaaactttgtaggaagccactcttctcccctaaacaacttctgccaaacaataataaagccaactggaaacgaatcggagccattttcattttcctaaccggggcctgacatgctttaaattatctggctgtattctaaatcaacacctaacccctcaaggaaactgaagaatcaatatacagggtaatagctttggctcagagctccaataatgtgcttcagatctgtccatgtggaaatgctttcatccaaatttttaaattggtggttaccaaagagttcacaaaacaggtttgtatgtagcacctttcatgcaaggcatgcaaaaagcctattttaaaatcactgtgcatattatagagttgtagccacctcacaatgaagtactacagcctgtgctgtcttaatggtttatgtcaggaaatgaaaaagatactgtaccaaatctggaattacaatggggagtaataatgtatactaaatgacttttgtattttaagttactttttgtgagtggtgaatttttgtgtttttcttttcagctacacttagtcctgagatgtattttttctttaagtcttgaatgaatacaaaaggagcccattttataatataaaccttgatgtacatgttgagatatttggacaatgaaaatgccttaaaaggaatgcatatggataaagttgcacttataacacccttcaacaaaatctaattttaaattgtctttttcttttctattaagggttttctttttcagtgtctaccattgtacttataactgttattaaataccaaatcaaataatat

SEQ ID NO: 185 - DNA, 4035 bp, Homo sapiens
ttttatattgactttggaaaatacagagcaatggcaagcaaaaaatgttttaagatcatgcaaaatttcttccatcaagtaactagtgtaatgattgacacatcttccaatctgtgtgtgtatgtcatctgtcattgtcattttggtccttggaagttgagtttatcttactcctcaggtcatgacatactaccacctttatttactttttatttttatttatttgagatggagtctcactgtgtcacccaggctggagtgcaatggcacaatctcagctcattgcaacctctgcctcccaggttcaagcaattcttctgcctcagcctcccaagtagcggagactacaggcgtacgccaccacgcctggctaatttttgtatttttagtagagacagggttttgccatgttggccaggctggtctcaaactcctgacctcaagtgatccgcccaccttggccccccaaagtgctaggattacaggcgtgagccaccgtgcctggcctagtttttttaaatttatttttagagacagggtctcgctatgttgcccaggctggtctcaaattcctgggcacaagtgatgctcccacctcggcctcccacagtgctgggattataagcgtaagccaccacactcagccacggtatgctaccatctgtagacagtgtaagtcttctctttcaattttatcttattttaaattcttttatttagtaaataaaggaagatgtttctcactaatctatctgtgaagacataggtaaaaaaaaaaaataagggcaacagccaagctctccctaaataaaggttaattttttttttttttgtattttttggtagagacagagttttaccatgttggccaagctggtctcaaactcctgacctcaagtgatcctcctgcctcggcctcccaaaatatgaggattacaggcatgagccaccacgcccgaccaaaatctgaaactttttgatcaccacactttaccacaagtgtaaaattccacacacaagtactcaatggcaactgttttatgcacaaatttgtttaaaatattgtataaaattaccttcaggctgtatgtatgaggtatatatgaaacataaatgaattttgtgtttaaatgtgagtcccatccacaaggtatctcattatatacatgcaaatatcccaaagtctgaaaaaatccaaaatcggaaatacttctggtctcaagcatttcagataagggatactcagtctgcattgctttataaactgaatgaaaatgtaagctctattagtcccgcccatccaccagagattccccacccataacctactggccacagggaaaaaagcatatgcaccatgatatttttatacacgttgtgttaactactgtaaacacattgtcttctttatatttctttgcaggaagttcagaaaaaagtgtcacgttttaatctgcagatggacataagtggattaattcctggtctagtgtctacattcatacttttgtctattagtgatcactacggacgaaaattccctatgattttgtcttccgttggtgctcttgcaaccagcgtttggctctgtttgctttgctattttgcctttccattccagcttttgattgcatctaccttcattggtgcattttgtggcaattataccacattttggggagcttgctttgcctatatagttgatcagtgtaaagaacacaaacaaaaaacaattcgaatagctatcattgactttctacttggacttgttactggactaacaggactgtcatctggctattttattagagagctaggttttgagtggtcgtttctaattattgctgtgtctcttgctgttaatttgatctatattttattctttctcggagatccagtgaaagagtgttcatctcagaatgttactatgtcatgtagtgaaggcttcaaaaacctattttaccgaacttacatgctttttaagaatgcttctggtaagagacgatttttgctctgtttgttactttttacagtaatcacttatttttttgtggtaattggcattgccccaatttttatcctttatgaattggattcaccactctgctggaatgaagtttttataggttatggatcagctttgggtagtgcctcttttttgactagtttcctaggaatatggcttttttcttattgtatggaagatattcatatggccttcattgggatttttaccacgatgacaggaatggctatgaccgcgtttgccagtacaacactgatgatgttttttagccagggtgccgttccttttcactattgtgccattctctgttctacggtccatgttgtcaaaagtggttcgttcgactgaacaaggtaccctgtttgcttgtattgctttcttagaaacacttggaggagtcactgcagtttctacttttaatggaatttactcagccactgttgcttggtaccctggcttcactttcctgctgtctgctggtctgttactacttccagccatcagtctatgtgttgtcaagtgtaccagctggaatgagggaagctatgaacttcttatacaagaagaatccagtgaagatgcttcagacaggtgactgtgatttaaacaaacaaaaaaaatctatgaatgcacatatcatataccatgacttctgaagactataaatgaattccacaatcagtgcttcactgagaaccaattttacctatcttttcttctaaactgaacagtcagagagacagctcctggctttagcttcttgtggtaccacgcactttgagcactttgtgcgtatcatgcaatatacttgcaatacacagaacaaatttcaaatacgcctcacttttagacttagaagagaaacattaaaacttaagggtgtaaggagggatcaagaaacttgataaggtcaaaagcaataatctctctgacatattccaggctcttacactgagaccaaagagaaatctttacctcagtttcttcatcagcagaatgggtttctggcctctctcagggataattttgaaggcataatgaaaattatgatgaatcactcattggtaggaaaataatgatataagtttcaaatatgtataattttacctatacttggtaatgctttgttttatagagcctgttaagctgctattgatagtcggagcttatatactgtgacttctgaagactatacatgaattccacaatcagtgctttgttgatacaaaatccttaaaagggaggcactttaaagaatatgtatttttcacttttcttaatatgtttcatcggtgacaggcatgataatatttctatatgtaatgggtaattgggaaaaaatagatgataaataaaattgctctaaagaagttaaaaaactgaatgaacagctaatactggtataaagtaactaatgtttggagccaacatttgttccttgtgtcagcaaaaggatattcacattccatgatccctggctgagaattctgcctctagtctttcttacccagctgttgtctatccttgttcaattataaatactgctaagggcatttttaaaatacgatcttgtactccttaaatttgaatccgtcggcacggtcactcataggaaaatgatcaaacaagcaagccagtcatgatttgactccttcccatctcatttcttactgccttacgctcatcctgaggtccaccttggtctctaaaaacaccatgtgttctcatgcctccatgtcttttcacacactgttccatttgctcttcctcccacattacattgaaactttcaagcctcagtcgaaacattgcttcttctggatagcagccttcttgacatccctcctcactccccagtccctacagggcttccatagctctttatgtgcacttcgatcccagcattttccatcgacttgtaattgtttctgctacctgacaatcatcgccttgagtactgggacaacctttgattactcattatatcctcaataaatatttgttgaact

SEQ ID NO: 186 - DNA, 5003 bp, Homo sapiens
ttagggtgtacctgtgcaggtttgttacatgggtatattgtatgatgctgaggtttacggtactattatacccacttcccaggtagtgagcatggtacccagtagtttttcaacactttccccctccccagtgtctattgctgccatctttatgtccatgagtatccaatgtttactcctatttaccagtgagaacatgcagtatttggttttcttttgctacattaattctcttaggataatggcctccagttctatccatgttgctgcaaaggacatgattttattcttttttatagctgtgtggtattccatgatgtatgtataccacagtttcattatccggtccactgttgataggcatctaggctgatttcatgtctttgctattgtgaatagtgttgcaatgaatatatgaatgcatgtgtcttttcagtggaattatttattttctttttgatatatacccagtaatgagactgtgtcaaaagtagttctgggtcaaaaagtagttctaagttctttgaaaaacatccagactgcttttcacaatggctgaactaatttgcattcccaccaacagtgtgtaagcattcccttttctctgcagccttcccgacatcatattttttttctttttcatgatagtcgttctgactggtgtaagatggtatctcatggttcttatttgcatttatctgatgattagtgatattgagcattttttcatatgtttttttggccacacttattttgaaaagtgtttgctcatgtcctttgcccactttttaatggggttgttttttgcctgttaatttaagttccttataaattctggatataaggccggtcatggtggctcatgcctataattccagcactttgggaggctggggtgggcagatcacctgaggtcaggagttcgagaccggcctgaccaacatagtggaatgcagtctccaataaaaaataaaaaataagggccaggcatggtggctcaagcctgtaatcccagcactttgggaggccgaggcctgtggatcacaaggtcaggagttagagaccagcctgaccaacatggtgaaaccctgtctctactaaatatacaaaaactagcctggcatggtggcaggcgcctgtaatcccagctacttgagagactgaggcaggggaatcacttgaaactgaaagtgggaggttgcagtgagctgagattgcatcactgcaccccagcctaggggaaagagcaaaactccgtctcaaaagaaaaaaaaaatctggatattagacctttatcagatgcatagttcgtgaatattttcattttctccacatcctcaacaacacttattatcctttgtctttttttatagtagccattttaaaaggagtgaagttgtatctgatagtagttttaatttccattttctcaatgattactgatatagaattttttttatatacctcttggcctctgtatgtcttcttttgagaaatgtctgttcagatcatttcacattttaaatcagcctattgttttctggttatggagtatttgagttccttatatagtaaccctttatcagatgtagagtttgcaaatattttctcccattcggtaggttcttttaactctgatgtttgttctttgttatacagaaggcttttaatttgaagtaatcatatttgtctatttttgctttgattgcccttgcttttggggtcacatccaaaaaataattgcccagaccaatgtcatggactgttccccgtgttttcttctagtagttttttcaggtcctatatttactctttaactcattttcagttgattttagtgtatggtatgaaataagtttctaatttcaatcttctgcatgtggacctccagttttcccaacatcatttgttgaagagactgttgtctccccattgagtgttcttggcatctttttcaaaaatcagttggctgagaatgcatgaatttatttttgggttctctgttctgttctgtttatgtctctggttttatgccagtaccatgctgttttggttactacagctttgtagtatgttttgaagtcaggtagtatcatgcttccagctgcattcttttagctccagatttcattggttatttgaagtctcctttgattccatatgaattttaggattattttttctacttctgtgaagaatagctcatattttaataggaactttattgaatctgtagatcatttttggtagtatggtcattttaacggtattaattttttcaaactgtgaacatgggatatcttttcatttttgtgatctcttcaatttctttcattaatgttttacagtttgccttgtagagatcttttatctcctcatttaaatttattactatgtattttatttattttgtagctattgaaataggattgcttttttatttctttttcaagtagttcattgttggcatatggaaatgctgctgatttttgtctgctaattttgcatcctacaactttactgaatttatcagttctaagagtttttttgtaaattctttaggtttttctatttataagatcatgtcatctgcaaacacataaaatttgatttccttctttccaatttggatgtcttttaattatttctcttacctaattgttctgcctagaacatcatccaatactgggttgaattaaagtggtgagagtgggcatccttgtcttgttctagtttctagaggaaaatacttcagcttttccctattcagcataatgctacctgtgggtttgttatatgtagtctttattgcattcatgtatgcttctttcatatctagtttgttgaagatttttatcatgaaaggatattaaattttatcaaatgctttttctgtgtctattgagactgtcattttctttttgtccatcattttgtaagtgttatgtatcatgttgattggtttgcatatgtcaaaccatccctgcaataaatcccaattgattatggtgaatgatatttttaatgtattgttgaattctgtttgctagtatttattttgaggaattttgcatctctgttcatcagaaatactggcctatggttttctttttttgttgtgcccttttcatgttttggtatgagggtaacgtcatcatagaatgagtataaaagaatttcttccacttcaattttctggaaaagtttgagaagaattggtattagttctttcttaaatatctggcataattcagcaataaagccatcaggtccttggcttttctttgatgggacactttttattagtgattcaatcttgtagctcgtaattggtctgtccagattttctactacttcttggttcaatcttggtggttgtatgtgtccagaaatttttccatttccattaggctttccaatttattggcatatagttgctcataatagtctttaatgacctcttctatttctatggtatcaattgtaatgtccctgttcatttgcgggaatgctcttatatgtgactttatgcttttctcttgctgtttttagattccctctttgtctttgaatttgatagtttgaatataatgagccttggaattgaccgttttgggttgaatctatttggaaatgtttgaccttcatgtacctggatgtctatatctcttgcaagacttaagaagtttttagctattattttgtttaataggttttctatgcctttgttcatcttttttccttctggaatccataggaagatgaccctccacctcccaaactccctttcaatgaggattaatttcagaccctgtttgacatgctgcaaagctcaccagggcatcatctttaggagaaaggtatcagtcttattacaccaattcaggcctcctctcttggatgcaaagttggtataatgcaaaggatgggggaacaagaaacacaataaattggagagcaaaactaaggcaagaagaagccacaggcactttaaaacacaaagagggctgggcactgtggctcacacctgtaatcccagacctttgggaggccgaggcgggcgggtcacgatgtcaggagttcaagaccagcctgaccaacatagtgaaaccccgtctctactaaaaatacagaaaattggccgggcgtggtggtgggcgcctgtggtcccagctgctcgggaggctgaggcaggagaatcacttgaacccaggaggcggaggttgcagtgagcagagatcgcgccactgcgctccagcctgggcgacagtgtgagactctgtctcaaaacacacacacagacacacacacacacacacacacacacggagcattttgactcagtcctgtggatagcacctaacttccatcctcacttcatgacctagataattgtttctaagctccatattgcccctagagaaagcatgggaaccaggctgtgaatgatttccctgaatcctgaataacaaaaacattttcatggcaaatatgatctcctctccatgaccatcacttccttggaagtctgtaccacgtacaaactggaaccaaaccaaggtaatgagaaaaggtgaaaaggggacttgtccagacttttctcccttttggcaagttcaaaagtcaaacctgaaggcgggcaaatgggcagaacatgggaggatgctagattttctcatcctgtgaattcatgacaaggagtttttatcctagctctgagagttccaaatgggaactggaagttacttcactctccatctctcaaggattgactcaatgagcttatatccatccataatactgagctgttatcatgtgtgagtttccctttaaacattgaaacagaaagaaaatgacagtaaaagttacaatagcccctccatgaaatcattaaacaaagtctatgaacattaatattcccactttgttagcatttttgttagtattaacatgcatatcatgaagcttccctttttattataaataaattgtacatcaagttc

SEQ ID NO: 187 - DNA, 3597 bp, Homo sapiens
cctcaccctgtaggcccagcagcaccctggagcccagcgtatccacatcccactaatatgaggggcatgcagtctcagtgtagttgtggagcccctccttctggcccaggtgccccccgtccacctgtggcagcacagtgtgcagggggctacagaccacgaatgggtccctcaggtgtgaacttgccctcacttgctcactgcccccctggctccccatgctgacccagttgggacaaggccttcctgaaactgggatggggtcaactgcttgggtatctctgggaggcatgttaaacgcaggtctgtaagtattcacgttgtgttttcatcaaaacaaacccagactcatccatttcttcccatgtccacgggtgtctctgaggcccaaacctctctcttttgggactattgcaggggcttctcctctccattttcctgtctatacccactactcactgctgtcaagatggcggccactgatgcagtgctgtttctgcactctgcgccttcccgtgctccccacctcattcaggagagggcagccacataggtcctgtctgatccaccctccggccaggcggcccctgtgggattcctcacacagcattccattaccggatggcgttccccattggtctccttcaaatctcaatgcctcagcacaacagtggccgtcctagtggcgtgggggccccagagacttctgtgatggcacccacgtcaacacatgccctggggccccagagacttctgtgatggcacccacgtcaacacatgccctggggccctggagacttctgtgatggcacccacatcaacacatgccctggggccccagagacttcagtgatggcacccacgtcaacacatgccctggggtctctgaggccaggaaagcacaatagcctctcacctgggcagtaaatgttctggccccaaagtgacgcctgtcctaccccagggacccccagctccatgctccaggagggagggcaggtggatccaggtgtctgcaggagtctgcaccacaaccccttccccagcctttcagtgatcctacaggacttcacaggctccacagtagcgcatggttctgtgagtctgctcttgcagtctctgccctttgactggagtgttgtgtccgtctgtcgaggcttcaatgcaccaccccattgtgctgctctggtgtctttgagtttagagctcctggcgaggttaactcggtcagcatcttctcctggtcatgccagccccagcggcccggtggctctgaccgtggagtttgccatgtgctctgactcaggagcatcagggctggtgttctgtgcgttttatgggttctgattgtgggttcatgttcctggggatcctcttgagttccaagtacacagtgtgatctctacacaggatttacggccattctttcaggggcctcctggcattgtcagtcccaggaaccttaagaaaactttaagccaggggtttttcagatctccacgtcacctcagagctcatgcgcccgtgagcttgggcttagttcattgttttcaaggatggtgggcggggatggcgtccagggtggtgggagctgggcctggggtctggttctagaagcatcagggctggagggccttagacagttacgaggaagggtcgtctaccaggcctcggtgagagaagtgagcccccaccttccagtcactgggagaggactgaagaagcagccatcccccaagcatctccatcctcaaaccacacagagctcccgcccaggcactgagagggccctggggttccaccaggtgagtggcactggtggggaggcctggggacccctgctgcagaaagggccacgacagattacagtgagcccctgaggacatctttgaggttggggcctctgagctcaggtctcaggaggtgtctgctggtggcctgatgggctgcgagggtcttggtggtcagtggcccccccatgaacagcagcaatgcaagctgctcccacagaggagggggcagagtgagggcttctggggcctcgtccggatctcaaggtgccccttgtctgagcttctgatcgtcctgtgggcaggcgcctgcctgccgggtttgtggatgcatctgacatgccatttgctgtgtcttctgaaatcctgtatgggccaggggtggcgtctgttgtggggagatttgtaggtctcaggcctgcctcccacacacacacagagcacgtgcctcatggccctgacggcagcaccaggcgccttctgaatgtgtgtccccaattagcgcacaccacgggtccctgcactgcacggggcccagaacaagtgtggggacagccagggacatttgtgagcaacagagatagtctttattcaaacgcagagagatccataacatggaaacactgacgcttccgaaaccgccccatttattcacttctcaagtggcccccgcttggatgcgccctcgggagagtgggctcagcacagcctagagcaccaggtctgaggtatctgcaaccacgtgggagccaggcccctggacgatgaaggacaatctcctggagcagcaataacttataaggagacataatttagagtagctggagccttggggatgactttatcctgcaggaggaggaggctgagagcagacgggacacgggggcccctaagaagcaaggttgggaaaggaggaggctgtttcccaatgcccgtgccggccaccagagggcccttcagtgcggagatggtcggcgcggcctcaccgcggtcaggagcagcgcgaaaccccctgtgccctcggccgcctgcagcatgagcctgcacaggagcccccgacaccccatggctccggggggccccaggggctgcggggctctggtcttagacgcagttatcagggacgcactcagcctcttcttcgagctcggggcaggggctcccgttgttggcgggctggacccggacgtagcgagtcctgctcttggtcccgagcctcccacagtggcctccgcacagtccccaggacgaccacagggagacctcgcagtccagcggcgtttctggaactggaccaagcaaaggggagaccgaggtgaacgcttgcgtgaagaggcgcttcgtacaaacggaagccacctcccaccaacgtgtgcattcatcagaggccacgcccacccttcgggggcacttgcgtttctccgcacagtcgcagagtgagcggcaagatgggatggcaccatagcaacctcggacacaacctagggactggagttgcgcgtttctacgtaagagccggagctgccgctcaagtccctgtggtggtggaactcccacatcgtggcagagtaagaggcccctgggaaccccgtgggaaccccgggagagggcggacacccctgctgtagaaagctgctctgcccgagcctggacccagctgctacatttacccgaataacagacaggggcacctgattagctgtcttgcgggacctggaccccccacaggactcagaccttttcagtatcgttctcgtttccctgtgtcccatctggttccataattttcataaatttaaaaatcatc

SEQ ID NO: 188 - DNA, 1109 bp, Homo sapiens
ggatgcttcaataccgacaagccaaaatggttttgggtacaagatgccagatgtccctgatgcatttccagaactctcagaactaagtgtgtcacaactcacagatatgaatgaacaagaggaggtattactagaacagtttctgactttgcctcaactaaaacaaattattaccgacaaagatgacttagtaaaaagtattgaggaactagcaagaaaaaatctccttttggagcccagcttggaagccaaaagacaaactgttttagataagatgaagtccactttcgaaaagaagatgcaaaggcagcatgaacttagtgagagctgtagtgcaagtgcccttcaggcaagattgaaagtagctgcacatgaagctgaggaagaatctgataatattgcagaagacttcttggagggaaagatggaaatagatgattttctcagtagcttcatggaaaagagaacaatttgccactgtagaagagccaaggaagagaaacttcagcaggcgatagcaatgcacagccaatttcatgctccactatagattttcctggaaacatgaactgccaagagaggaatgggacacaaaaccaaacactgttttatatttatggtttgcaaactggcatttcatcagtggctaaattcacagatatcctatatagattgtatacagaactgagactgattttgtaccgattagaatgattgctatgatctttgagaaatttttctgcactatttgcactgaaatgtttatttattgttgataaattgtatcatatttaagttccactgctgttcctcttaccttgattaaatgcctatgcatgtacttttagctagtttttaatattttataaaacttcatttaaatttgtatttttaacttgaagttccatttcgttatcaaggatggtatttagatttttttcctcttaaccttttttcaaaaactattttcaactgtgaggaaacccttatttttctttctttgtggataaaactttcaaaagcaacttaagatattcatagtgttaggaaacaccaaacctgcctatgtgccatctcacaaaagaaacttttaatacctacaataaatc

SEQ ID NO: 189 - DNA, 4135 bp, Homo sapiens
tttgctctcagcacctagtacatgaggcctgatgggcagggtgtggcccagggccactggaggtcacaggcagtggctggagttcccctaatgggagcctttctcaagaactgacaccagtccccatgacccagacgctctgaatgccctctggggtgccaggctgctggcctcagctccccctcaagggcccctggcgccccactcccaggccccgggtccctgtgccctggcgcactcccaggtttgcctgcaggtggctgggctacctgggcctgctgctgctggacgtcatcatctgcctcctggtgctggttggcctcatccgcagctccaagggcatcctggtgggggtctgcctgctgggagtcctggccctggtcatcagctggggcgcgctgggcttggagctggctgtgtccgtgggctccagcgacttctgtgtggaccctgacgcctacgtgaccaaaatggtggaggagtactcggtgctgagtggggacatcctgcagtactacctggcctgctcgccccgcgccgccaaccccttccagcagaagctgtcgggcagccacaaggcactggtggagatgcaggatgtcgtggctgagcttctgaggaccgtcccctgggagcagccggccactaaggaccccctcctccgcgtccaggaggtgctgaatggcacggaggtgaacctgcagcacctcaccgccctggtggactgccgcagcctgcatctggactacgtgcaagcgctgaccggcttctgctatgacggcgtggagggcctcatctacctggccctcttctccttcgtcacagccctcatgttcagctccatcgtctgcagcgtcccgcacacctggcagcaaaagagaggccctgatgaggacggggaggaggaggccgctccagggccgcggcaggcgcacgacagcctctaccgcgtccacatgcccagcctgtacagctgtggcagcagctacggcagtgagaccagcatcccggccgcggcccacaccgtcagcaacgccccggtcactgagtacatgagccagaacgctaatttccagaacccccgctgtgagaacaccccactcattgggcgcgagtccccgccgccctcatacacctccagcatgagagccaaatacctcgccacgagccagcctcgccctgactccagcggcagccactagaccgcgcccggcagccacccaccccacgtgccaacttcccctccccgtgccagcactgccgcttccacctgggccacccaccggaccctcgcacgccgtgccaggcctgccccagacgcgtctgcaggccgcttgccctcctgtcccctccccgcaggggcacagtggagacgcaggggctctgggcccgtaccgccaactcgggtcacacctgaacgctgctgccagccgatgccccagccctgcacgccacccactatcccggcacgctccctctgcagatggtcgccgcacctacaagccctggccgcacccaacctgtgttgttgccgcccggcccttccctccacagctctccttcctcccgcccggcacgtctgtggaccccttcttagttcacaggcacggctggggccgctctgtgctggcgcctgctggccactgagggacagggacacgtgccacctgctcatctctgccctgaggtcaccccgtggtccctccacgtgcccatctctctgcagtgccctcctcgcctgtgcagcccgcccacccacaggctcacccctcctgccggctgccagaggccccctccagcagggcctctctccgttgccccagcttcactctctccctcagcacctgccctgctggaggccccagccctccgtggacagcaggggccacgtggagcccgggccgctcacccgccacccagtgctggccgccttcttggtgccaaacccccttcccccacccagagactgggcagctgtgtctggttcgttctttgcactaaccacatttgtcatctctagggcaggctggggctgcgggctgagggggaccgctggcaccccccttccctcccttcttggttccatttccatccatgacaggtacagcatcccaggagcccggcctgaggggctggacccgagccggctgtgaacatccctcagcccctgctgtccccccttgggactaaccactaacctcacccccaaactccacgggtgcccctagctggcccagagccggcagtgtgagcccaagtccgggctggagccgaggccggggcagctgtctgggagtcaaggctgcagtagcgtttcttcatggggtgctccagggggtgccacagaccgacaggcagcccaagggcctggacacccctccccaggcaggtgctgccccaggaggactgtcctcgggaatgaacctcccgcgggctttggactgaggtccctgtggcctcggtctcctccccatgaagtgggagcgaggctccccaatggtgcttttggctttagtgtacgatgtttgctgtgcttcccgccgtggagggcagagccaccccacatcaggatcggacgtgctacccctcccggtcccggccctggcccagccagcccagccctcgaggctcgatgcctgtgccaaggccaggggcagccagagggcagctggatggccacgtgcaggggtcaaggctgggccctgcagtggggcgggccgccagccccagcagtttacagacgcatggctcttcctcccagagcagccggcagctacctggaccggaaatgtcctcatcccctccctggggccaggctctgccctggccttcctctgtgaacccctcctttctttgtgctggtgtctgggaccaaaaagggggaatatgggagggcagagtggggaggggagtccatgggcctggggccccaagccggggcgtctgagctccccaggcatgaccaaacctcagtggaggggcctctgcttcaggccccgcctggctgacattctgagcccccctcggaggccccgccacagccaacctgcccagtctttcctctgggcttgacccgccaggggagttctccaggcctagggccaggagagaggccctggcaccctggcgtgggtgcccgccaaacgccctgcgaccgctcagaagcacaaatgctgtccatggccgtgaggctgcctgccaggtgaatggacatagcgtgagaggcggtgaggccagggcttccagcctcgtgctgtctcgggactcctgaccgtggtgtgcgtgtgtgcccgtctgtgactttctactcaccaaggttgaagaaaggaaacggggaaaatcaaaaggggttcaaaccccacctcagtaggtggaggggagcgcctgccattggttgtatttttgttctgagttttcggtgccgtgttcctaactactccatcccatgacctcgccacacctactggggcatctggctggtgcctgctgccatggccagcccccactctcaccctgcacagggggtcttgcagcccccaggcccacagcctcgttgggaggacagggtggccctggggacaagagggaggagcccaggggcttacctcactgagagtgctccccagcaggcatccactaccccagggcctcccacatgtcatggcaaggttggtagtgaatgggcctggttgggagcagcccctggcccattgcccacccacccatctcactatgcaattcgagttccaagcaacatttgctcctgccctggggccagctctgccccagccctgagaggggtggtgaggcagccccctggaccccagaaccccagacaagggggcaggcgggggaccagggcctctcctgtgggatctttgttttgtgtttaaccataatggttgtgtactgaggcctgaaccattttgcatttccccctcctccagcctctgtagggccatggctgtatgtactgtcgctgtgtttttttgtttttttagaactgggtttgggggctgatttttatttctttgggggcttttttttcttggcaaatactaaaaatctcgtcaatgtaatttctgtggtttctattcagcttgggtttcatgttttaaaataaattttaaaaagc

SEQ ID NO: 190 - DNA, 3639 bp, Homo sapiens
atgcagcgcttcctgctggagatctccaaccccgagaccctctccaatacagccggcttcgagggctacatcgacctgggccgcgagctctccagcctgcactcactgctctgggaggccgtcagccagctggagcagagcatagtatccaaactgggacccctgcctcggatcctgagggacgtccacacagcactgagcaccccaggtagcgggcagctcccagggaccaatgacctggcctccacaccgggctctggcagcagcagcatctcagctgggctgcagaagatggtgattgagaacgatctttccgggtcctccggggtccagccctcacctgcccgcagctcgagttactcggaagccaacgagcctgatcttcagatggccaacggtggcaagagcctctccatggtggacctccaggacgcccgcacgctggatggggaggcaggctccccggcgggccccgacgtcctccccacagatgggcaggccgctgcagctcagctggtggccgggtggccggcccgggcaaccccagtgaacctggcagggctggccacggtgcggcgggcaggccagacaccaaccacaccaggcacctccgagggcgcgccaggccggccccagctgttggcaccgctctccttccagaaccctgtgtaccagatggcggctggcctgccgctgtcaccccgtggccttggcgactcaggctctgagggccacagctccctgagctcacacagcaacagcgaggagttggcggctgctgccaagctgggaagtttcagcactgccgcggaggagctggctcggcggcccggtgagctggcacggcgacagatgtcactgactgaaaaaggcgggcagcccacggtgccacggcagaacagtgctggcccccagaggaggatcgaccagcctccgcccccacccccgccgccacctcctgccccccgcggccggacgccccccaacctgctgagcaccctgcagtacccaagaccctcaagcggaaccctggcgtcggcctcacctgattgggtgggccccagtacccgcctgaggcagcagtcctcttcctccaagggggacagcccagaactgaagccacgggcagtgcacaagcagggcccttcacctgtgagccccaatgccctggaccgcacagccgcttggctcttgaccatgaacgcgcagttgttagaagacgagggcctgggcccagaccccccccacagggataggctaaggagtaaggacgagctcagccaagcagaaaaggacctggcggtgctgcaggacaagctgcgaatctccaccaagaagctggaggagtatgagaccctgttcaagtgccaggaggagacgacgcagaagctggtgctggagtaccaggcacggctggaggagggcgaggagcggctgcggcggcagcaggaggacaaggacatccagatgaagggcatcatcagcaggttgatgtccgtggaggaagaactgaagaaggaccacgcagagatgcaagcggctgtggactccaaacagaagatcattgatgcccaggagaagcgcattgcctcgttggatgccgccaatgcccgcctcatgagtgccctgacccagctgaaagagagtatgcattagaaacaaaagcccgcttgctcgcttgctggaacacaggggccttttaagttgagcgtgcgcactgcatgggaaatagcggccctggaggatgttagacttgctccctctccaagacagcagcagcctgcacctgccccgtgtgtgtggccggcctcctcctcacccttcccggcccccggccaaggacccaggcgctgcatacaggggaggggcgcaccccacagctggggccggttttcctcagctctaggctgttctgtagcttatctgcccctcccccactttcaagacagatgagcaggagcttgggtctctctcggcccctgtctgttcccagcccctgcagattctgagcaaaggccctgggtaagaagggtgggagtggggcctttgccagcagagccagggcagggcgagctgcaggaatcacccctctgcccctgcagctggaatgtgccacagaggccccacctgaagggtggatgtgctggaggggtggcccagagccatactgcgtccaccctgagctcggggacaggtgacagtggctgctctgggaaggggcttttagatgtaacctacaattcagttaggctagagacagatgctggtggaggaagggctgggccaccagggatcacagaccacaggaagatgggaggtggaagcagaggccctgcccccaccccttcctgtctcactcttctgtcttgtccccacccatgcgccttcgtgcctgagaccagggtggccacacaggcagggcctggctccagtctcatcctcccattgcccagtgagccctgctcttctctccccagccccctcccaccgctgcctcgtagagtgacctcggacagagcccccctagcaatacagggaggctcccggggcctggacaggcgggctcggaggctacccgctgtggccggtgccagctgcccttgcagggtgggtgagctctcaggccgagagccttatttacctagtgcaaaaactgtaaaagtgtacagactcttcacagatttttatcttaattgcaagtctgccgattttgtaaatgttcttggtgtttgactgtaatgtaactatctcacctaatggttgtacatatcctttggtcctggtgctgccgagggctggccgggactgctgctctcccaagggttttattttatttctgaatctagagaacagtattgggcaggaggaaaaggcttggtgtctgcggggggtgtcttccctgcctgtggcatttgtgtgttggctttgcagctgctgtctgagtagtggccactggggtgccttcactgggccagtcaacggggggctcctgcccaggccacagagaacctgagttcccgggagctgggccctgcctgcagccagggctggggttgccagaggccctggagggaaggacagtccctgctggggaagaacagccccggggccccctggtcaccgagactcagcctctgctggagaaagccacgccctccctgctagcacagaggcctgactgacttttttgcttaacttccatgttctgggtgatggaaactgccaaacctcctgtcagtgaggactctttccgactgcccagaaagtgggggtggaggaccgaggctacagctccacacgccccggtcccccagagcatctgccccaggtacacctccccctgcgccccgcacgactgcgggagccagactgtccagggagacagcctctctcttttctacacactcagccacaaagccccccagctcccacaccgcgtcccagctcccctcttttgtaagtatgtgaaaaggaaaaaatgcaaacgttggagtttgggctggagctcctccctccagctgcgacttttaactatgtaataatgtacagaggaagctgttggtgttctaagactctgtgtggctgtgcaatttctgtacatttgcaattagaaatattaaagatttatttagctatttt

SEQ ID NO: 191 - DNA, 4493 bp, Homo sapiens
atagtgagctcactgctgctggagccggaggactgcgcggcagccgtggcctactgcctgccgcgcgaggcgctgtggctgctgaccagggctgggcacctggtccgcgccaacgcggcgcgctgccccatgagcgtgctgcaccgcgtgtgcccgccgccgccccctgcgccgcagccttgctgtctgcacctgtacagccacctcacggatctcggaggcgccttctcctcctgggagatcgtgcgccagcactggggcgagttgcgctgcagctctgtggcctgcgcctggaagaacaagaaccggtgggtgcgggagccggcgagggtctggcgggcggaaggagcggcagggtccgcgccaacaggctcttcccactcgcaggtacctgccagtggtggggcacacggacggcacgctgtcggtgctggagtggctctcgtcgaagactgtcttccaaacggaggcgcacagcccgggcccggttgtcgccatcgcatccacctggaacagcattgtgtcttcgggtcagtagctcccctgccaaaggccaggccgccacagagccccctcccctccgacaaggcccagccagattccgctgcccacaggtggggacctgacggtgaagatgtggcgcgtcttcccctatgccgaagagagcctgagcctgctgcgcaccttctcctgctgctacccggccgtggcgctctgtgcgctaggcagacgcgtcaccgcgggctttgaggacccagacagcgctacctacggcctggtgcagtttggcctgggcgacagtccgcgattagaccaccggccccaggacgaccccacggaccacatcactggtgagggggcagcatgggtgaagcccagccaccgcccagctccggttcctgaccctgaaccctgccgccaggcctgtgctgctgccccacgctcaaactgtatgcctgctccagcctggactgcaccgttcgcatctggactgctgagaaccgcctcctgcggtaggctaggaggtggggagggctggggtctcctacctctgctcctcaccagagcccactggctggactgagtggagaaggccttgtccctgctgagcctcggctgccctgggtgcctctccaggctcctgcagctgaatggtgcccctcaggccctggctttctgcagcaacagtggagacctggtgctggcgctgggatcccgcctctgcctggtgtcccacaggctctacctgcctacatcctacctagttaaggtgtgtggtgaggacagagtgagcaaggtgggccccccccttgctcaccttggggggcagacccaggttcccccagccagggatacaggctccttcccctattcagaagatgtgccggaaggccccagacgtggtggacgaccctccgctgccactgatgagccaggagtcactgacttccgcccaactgcagaggctcaccaacctccatggggcagccagcctcaggtcccatgcaggcctgctcagccctcctggaggccctcctttcccactctgggtgggggcctggcggtgtggggccctctggagttgatacaagcctgcctgagccctggcacacccgtttggggttggtccttgtcccagcctctgccccagcccactggcatgccacccagcatcccacctgtgcctgtccctgtttgcagcgaggccttgtctctcatccatcgtcggagggcaacatctcagcacctggtgccgaaggaggtggggtgggtcctccttagcccgccctgccccggctcaggccccagccgtcagccctggggcaggcctgggatccccatggttgcccgggcagcacatagcaaggctcaaggaagagcaggctgatccctgaaccctgactcaggacttggacgccatagtggcccgggaccgagaccttcagcagttgaggctggggctagtggtcccagcagcccagcccccaccctcctggcagcagcgccaggaaggctttgacaattacctccgtctgatctacggctctggcctgctgggcatgcagtctggaagggggtcccagcagtggagtgccgggaccctcagagtggagagagagacccgggatgtgtgtgctgtaccccaagctgcccactgtcttgcccgggctgaggtcagcactgcagcccaaacagtgccaacagccctgtccccacaggacctgggagccctgggccagcacttctcccagtctccccgagtcacagtgccgatcccacccacccaccgtagggtgcacagcaaggcatcccagcttctggcccgctcctcactgagccactacctgggcatcagtctggatctgcagctgcagttggagcagctccgagggaggacgaccatggccctggacctgccatcctcccacttgcagtgcaggatcccactgctgccaaagagatgggacaaggaacctctctctagcctcaggggcttctttcctgccaccgtgcagccccacaagccaggggcaagccaggatgccctgtggttgtggcgccccaggccatcccaagcccagtggcagaggaagctgctccaatggatgggggagaagcctggggaggagggggaggaagacaagaaggaagaggaggaggagaaggaagacgaggagctggactgggccttggcttccctgagcccgcactccaaccagcagctggattcctgggaactggaggatcagagtgctgtggactggacccaggagccccggcggcgcagctgcaaggttgccaggacccaccctcatccctggcaccgtcatgggagtttgctcttggatgagcattacgggcatctgcccaagtttctgcatttcttcatctaccagacctggttcaaaaagttgttccccatcttcagcctgcaggttggagggaactggggatgcatgagaagcatgggttagggtgagggacaggggagaaggtaggggctggcttgggtgtgacatgggagcagggcctcagcatgctaccctgcaggcatacccggaggcgggcacgatcgagggcctggcctcgctgttggtggccctgctggagaagaccacgtgggtcgaccgtgtgcacatcctgcaggtgctactgagactgctgcccaacatgagcagtgatctccaaggccagctgcagggcctgctcgtacacttgctcaacctggaccagccccccagcctccaggtgtgccccttgtcctgcccccagttttcctccccgcccaccggccctcagcaaccacatccccaccgcctgcctcaggaccagacacagaagaagttcgtgatactggcgctgcagctgctcctggcctgctccctggagtcccgggatgtggtgctggagctcatgtcctacttcctctactctcccgtgcactgccggccagagctcaagaagctgctgcacgggctgggccttcaggacccagagggcttcctattcaaggagatgatgacctgggtccagggcccagacctggactccaaggccggcctgcgcacttgctgccaccagaaactggaggacatgatccaggagcttcaggagaccccatcgcagacgtcagtggtctctggggcacccacacgcgcctccgtgataccctcgggcacctcctggtcggcctccggcatcttcgggaggctctcgcaggtctcagaggtgcctttgatggtggtctcacctgcggagccgcactctttagccccggagctccaggcccagcggatgctggcacccacgcgcagctgggggacccctcagctccgtctcagagtgctctccgagacgctgaagagcttctgcctggagcccgaggcccgcctgcaccctgccgggcctgctcagctgcccggagagccgccgccgctggaggagaccgactggtcgcactcgcagctgctggacttgggccccatcgacgcgctcaacttcttctgtgagcagctgcgggcgcagcagcggagttcgctccaggagaaggctgcgcacccacacccgccagtgccctacacggtggcgccggtgcccgacatggtggtgccacctccgcgggagcactggtaccaccccatcctccggctgcaggaggccaagccgcagaggtccgcgaggtccgcgatgagactgaggggccccatgccgtcccggctctgtgcgggccgcaccctggacggccccatccggacgctgaagctgccgttgccgcgtgtggagccgcagcctttccccctggactggcctatgcccccgcgcccgctgcccccgcggctcctgcagccggccctgcagcgctactttctgccagcggacgcggaccctgacacctacagctgaccgggctggtggcctcagcccgcctggctctggggcctgtcattggtatttggccaaggcctgcatcgggaataaagtccagagaattt

SEQ ID NO: 192 - DNA, 3749 bp, Homo sapiens
tccacgacgcagcagagaacgggcagatggagtgctgccagaccctagtctcccaccacgtggacccctccctgcgggatgaagatggttacacggcggcagacctggcggagtaccatggacaccgggactgcgcccagtacctgcgggaggtggcccagccggtgcccctgctgatgacgcccccaccaccaccgttccccccacctccactgttggccacgaggcgctccctggaggatggaagaagaggaggcccagggccagggaaccccagccccatgtccctcagcccggcctggcctggccatcctgaccagcctcttcccagggagcagatgaccagcccggcccctccgaggatcatcaccagtgccacggctgaccccgaggggacagagacggcgctggcgggggacacctcagatggcctggccgcactacagctggatgggctgccctcaggcgacatcgacgggctggtgcccacgcgggatgagcgcggccagcccatcccagagtggaagcggcaggtgatggtgcggaagctgcaggcgcgcctgggcgcagagagctccgcagaggcccaggacaatggtgggagctcaggccccacggagcaggcggcctggaggtactcacagactcatcaggccatcctggggccctttggggagctgctgacagaggatgacctggtctacctggagaagcagattgcagacctgcagcttcggcgccgctgtcaggagtatgagagtgagctgggccggttggcggctgagctgcaggccctgctgcccgagcccctggtcagcatcacggtcaacagccacttcctgccccgggcgcccggactggaggttgaggaggcctcagtcccagcggctgagccctcagggtctgcggaggcctcagaggtggcccccggggtgcagcccctgcccttctggtgcagccacatctcccgcctggtacgcagcctgtccctgctgctgaagggcgtgcatgggctagtacagggggatgagaagccatccacccggcccctgcaggacacctgcagggaggcctcggccagcccccctcggagcgaggcccagcgccagatccaggagtggggggtgtctgtgcggacgctgcggggcaacttcgagtcggcctctggcccactctgtggcttcaaccctggcccctgcgagccgggggcccagcacaggcagtgcctgagtggctgctggccagccctgcctaagccccgcagtggcctggcttcaggggagcccaggcctggcgacacagaggaggccagcgactctggcatcagctgcgaggaggtgccatcagaggcgggtgccgcagccggcccagacctggccagcctgcgcaaggagcgcatcatcatgctcttcctcagccactggaggagatcggcctacacgccggccctcaagacagcggcctgcaggaccctaggagcccgccacgcggggttgcggggccaggaggccgccaggagccctgggccaccctccccgcccagcgagggcccccggctgggccacctgtggcagcagcgcagcaccatcacccacctgctgggcaactggaaggccatcatggctcacgtgcccgcccggcagctgcggcggctgagccggcggccccgcggggctttgtcccccgagcagttcctgccccacgtggacggggctcccgtgccctacagcagcctctcactggatctcttcatgctgggttacttccagctgctggagtgcgacctgccggcggaggagcggaagctgcgccacctgctgtgcttcgaggtcttcgagcacctgggcacccacggctgggaggctgtgcgcgccttccacaaggccgtgaccgacgaggtggccgccggccgccgggcctggaccgacggcttcgaggacatcaaagcccgcttctttggctccagccagcgtcccgcctgggatacggagcctggccgcaagtcaggcctgaccctgctcgggcccctgcctcacgccgccgtcccctgcagcggccctgagcccacagcacagcggctggggtcccgctcccagcagggcagcttcaacggtgaggacatctgcggctacatcaaccgcagctttgccttctggaaggagaaggaagctgagatgttcaactttggagaatgaccctactggcagcctgctttccagaatgtggtttgggggtgacttggagtttctcttttcttttccttgctcacacccttggtgttcaggtgagccgggcaaggctgcctccagtcctaccagttatcggaggctgcgggactgttctgttgtggcatggttctcctccgagctgggactcagactccttctcaccactgcacccaggaagccccttggcaggtcctgaagtgaggcaatgggccaccccagtccagggcacctctgcccagccggcccccgagacctgggatgctgcctgtttctcacttgtccttccccagtgtcaccagttaccttggcgtcctgtccctcagtttctgtggtgctggtggcctcggccacatccatctttcatgtgagtctgaggtggccccaggccctggtcctgcccctgtttctcctgctgaccttgggtcacaccccttcacctcccatctgtgaatttgggggagctggagtgattccgaggacagattccatgggcaggaggtcttcctgccaggccatccctgctggtcacacaccgatgcccgccaggccagtgccccagcccagggtgctccggaggccctgcttcctcaaaggaggctccccatggggcccctgtcctccagcctgaccagccctggcctagtcgtgggccccagcaaggctggagagcagggacgtgggagtagcagtggctgagagagtcctccaggcagggtggctggtgcccactctcaaaggctgctgcacacagaggagaatgccggcaggggtgggcagcagccagacctcagtggggcgtggatactccgtgagggcacctgggtgtcacccacagtgcacctcttcacaggggcctgggtactggagggagggatacaggaagggagatggattccgtcctcgggggctctgggtgctgcggagtattcctgggcatggtgctgggcatggctggcatagggtgtggcttgtccccagcttctgatggcagccaggagaatgggtcatcacccaggctctggggctgaggaggactgggctcaagcccacagggactttggaggtggggctctgcagctgtgagatggcccagcagggagtggcagggacgggaggcttcaggaatattcctcctggcatccaggccccctgggacagaggagggtgcagtcaggcgacaggcttatcaggactccctgcctcaatccctggggattgtccaggcaaaacctggagggcagcgggcaagctgttggatggaacagagagaccctcgcagctgactagggcccaaggggacggacactcaagaagatgtaaaattgggaggggtggtattggccattggggcaggcagggccgggaagggaagtagcaccggccgcagccccaagccagtggcttttccacaagggcctatcctgcagccggcccgctccggcttcctccactgctgaagaccctgctgtagagctgaagctgaacatgtgtttgctaaataaagattcccattcctagcgc

SEQ ID NO: 193 - DNA, 3765 bp, Homo sapiens
attgctactggcactggcgagagtgaggcccacgttttgctcgccctgcaggtcagctggtcttgctccactgccttgcagagcaccccttgccctggccagctgccctctgcccgtgggcccctggtcactgggggatggggccaaagggagaagctgatcggctcagagtcctcccgtctgttggaaaggcagcttcaagtctgtgtcctacagataatgggtcagtcttttctttgctctcactacctttttcagagaagttttttgtttgtttttttgagacagagtctcgctctgttgcacaggctggagtgcagtggcgcacaatttcggctcactgcaagctccacctcctgggttcgagcaattctcctgcctcagcctgccgagtagctgggactacaggcgcgtgccaccatgcccagctaatttttctattttgggtagagatggagtttcaccatgttggccaggctggtcgtgaactcctgacctcaagtgatctgcctgccttggcctcccaaagtactaggattacaggcgtgagccaccacgcctggcctttcagagaacttttcaaaggagctttttctgcgtccagtgaaggatccctgctctcaactgagactgccccttgcctttctgggctgttctaagcttagtgtgaaactcagatatgcgtggctgagccctggcccgcaagtcgccagcctctccacggctttgttcttcctcagcctgctcggactttcagagaatggcgcgtctgtgcttctccgtcccaccgtctaccagcctgtgtggtccccagcttttgccagccgtccatttcaattccctcacccaagcggctggttgaaagggcagggctggccctagcagcagtaggaagcggccagctctcttcagtgtggagatttagccaagtgctggaggattctgagatgggatttcagcgccccagcgtgaccttctgcttcccctccgaactgaatggtgacctaggcttgcacagttttcactaacaagtcagcagcttgaaagttgacctctcaaactctaggggaaaagtgtgtgaggaagtgctgatttgggtcagtttgagcctgctggttgcattcccagttgagaaagtccatacgatttgccggccaccccgggaaactaagacgatagaaaaccacctgtcagttccccgctgctggagaggaagccagagatggagcgaaggagtacagagagccctttgttgtgtccggagcagtgatgactgtgtcttgacgcctctcttctggctcttgctctcatgtaggttcatgtgtgcccagctgcccaaccccgtcctggacagcatcagcatcatcgacacccccgggatcctgtctggagagaagcagcggatcagcagaggctatgactttgcagccgtcctggagtggttcgcggagcgtgtggaccgcatcatcctgctcttcgacgcccacaagctggacatctccgatgagttctcggaagtgatcaaggctctgaagaaccatgaggacaagatccgcgtggtgctgaacaaggcagaccagatcgagacgcagcagctgatgcgggtgtacggggccctcatgtggtccctgggcaagatcatcaacacccccgaggtggtcagggtctacatcggctccttctggtcccacccgctcctcatccccgacaaccgcaagctctttgaggccgaggagcaggacctcttcaaggacatccagtcactgccccgaaacgccgccctcaggaagctcaatgacctgatcaagcgggcacggctggccaagactgggttttactcttcctgaatcatcacaatgatccgtgcaaggccaaggctgttgtcttctgtttcaagtgcgttttcctgtcctgtcctctgtcctgtggcagtggacagctgtggctcttgccagattgtgtctgctcctaggactgtgggagccggtggtggtagcggccttgagcttgacccatccctcctgcttccctgttcctgagcgagcaccttggagtatccttggagtgtccttggaggctctgctctcgggggcagcctgggccaagagagcgcctgatgctcaccccgtcctcacaggttcacgcctacatcatcagctccctcaagaaagagatgcccaatgtctttggtaaagagagcaaaaagaaagagctggtgaacaacctgggagagatctaccagaagattgagcgcgagcaccagatctcccctggggacttcccgagcctccgcaagatgcaggaactcctgcagacccaggacttcagcaagttccaggcgctgaagcccaagctgctggacacggtggatgacatgctggccaacgacatcgcgcggctgatggtgatggtgcggcaggaggagtccctgatgccttcccaggtggtcaagggcggcgcctttgacggcaccatgaacgggccgttcgggcacggctacggcgagggggccggcgagggcatcgacgacgtggagtgggtggtgggcaaggacaagcccacctacgacgagatcttctacacgctgtcccctgtcaacggcaagatcacgggcgccaacgccaagaaggagatggtgaagtccaagctccccaacaccgtgctagggaagatctggaagctggccgacgtggacaaggacgggctgctggacgacgaggagttcgcgctggccaaccacctcatcaaggtcaagctggagggccacgagctgcccgccgacctgcccccgcacctggtgccgccctccaagcgcagacatgagtgatggcgcccggccccgcacctgccatttgcacgcccggccgggaggcagagacggggggaggggaagcctcaccatttctcaaggtccataaagactgagcggatgtttcctcgcctctcgaaaaggaaaaccaccatctttcttttaaggctgttcctgggcctggcgggggaggcaggggtgagaggatggaattgtgtgcacaagaactgtggctattttaatatataacgttagaggctgcgttctttgtcgccgcctcccctgtgtgccagccctgtgtgcacggcctctgccccccggcctttgctgtggctggagctggacagtgcagtgactgcgaccgtgggggagccaggtcgcccttttggcagctgctaggctgaggctgcatggacaggaacaccaggcaccctccgtgtgcttctgagctgaggttgcttcacgggaccgtggcttccttcctcacctggctctgcctcccccgtgctctcgggcgaagtgggttcttgtgccttcccctcccgggcccaggctccccgtgcgcgggccctgccctttcctcccgcgccccaccggctccgacgcgcaaccccgctcagcagtcacagaagcagggcccagccaccttggtctttttttgggagttcaggggagtaggagaatgtcttccagaaaaatacataagctagtttctgttctgtaaagtgatatctttcatacttgaccaaagttcccaataactccccagcgctgctcggagtctgcaggaactggccttgttctccttagcccgtcactccatacagtattaggtgaggatggatgcgggcgctgtccttgccgggaagtcactgttgaagttgcagtggcttgttcacacctgtgggaagagaagtgaagactttctccttgcattaaaaagtctgaactgtgcg

SEQ ID NO: 194 - DNA, 3577 bp, Homo sapiens
gctatacacatctcatatcacttacattgtacttgtgattcttttctcaaatcccaaatctctcaaagccctttcaaatttctatctgattaactagtccaaaggctaagttggatacagatattttttctcttcaggctgaagaaatcaagactgaaagcgttggttcatgtttactcttgtatcataagtatttttaaaagtatgattaatatatataataacaaaccagcacagctcccctgggaggcacacatattaaaatgatttacccggagatttaaatgatttactccactctcaccaggagaaggtggcccatgccagagcccacctcagagcatctcaatctcaggccttgcctcatctatgtgctcttttatgtgcaggtgcagcccacgttgtggtgtaatgcaaatctatggctatactgtatcacagcgaataaatccatttggagaaaaaggcacctggtgaaaggccacagtgcaatggaatgcaatgctgctatgtgcaatgctgcttacaagaaaactttgggtaaatattgcacgggtcaaacttacgatccaactttttcacgtaacagggccgcgtattggatgccttcagaattcccattcagcgtgtccactttgctctttgatgcaatgccacctcacaaaagcattcaagccacagtcatctatttttttccttctttctccccttgctataatgacccaaatctccgtttttactttgtaatttttgtaagttttttaaggcaatgactataataattcatgtttagtgaaataattcttttggttgatatatttcacagtttggtctctaaaaaaagttaaaaaacaacaacaagaaccaaaaacaaacaaccccccgccccaagcttccctctgcttgatgccatagacaagagtccaaaggacattagctgctccattgcacacattggaagggagagtttgctgtgagctcagtccttctaatagactggcaattttgtaaaagatttagagaattttgtttaaccatttctgcatgtgtttttaatgagctcatgacggtttctaacaaaggccaggttgtgtgttttccagcactttctgacctgattcctccctgctgacttggggagtgggcacctgtgcttctctcctggctcacctatgggagtcggggtggtggggccatctccgggcctgtcttcacgccagggatgaatcatgtagtaggcagagtggaaggagtctctttgttgacagctttccatctggactttggatacggctgatcgctcatgtagagccgtggttagctggaaggggctacgcgagtcagctcctccttaagggatcaagggtgtgtaaaacatcaggaaagaactgcctgggatttcatttgcaaagcttagagaagcattttatcctctgagtttcaggtagccagggttgtgaatgtgtatgactgcagctttgacaggtcggtctttaatagtcaataggatcatttatagcctcgttcagataatccaactggagtacacctgaataaatacatcaagctcaggtggctaaaagctaaccccttttgagtttaataattaaaataaacagagctatgaagatgaatttcagtttgtcatgcataaatgtaagaagctccataaaggatggtgttctgtgattcatataggagtatgatggatgtatgatacgttttccacagctatttaagaaaaaacgattatcttagtcatggggtaaagttatgtgaagcattgcaccatccaggctgtgtctgggccagtacagattttttttctttttctttttctttctttctttttttttttgtgaaagattacttcttggcaaactagatatgcaaacgccagaatacagtaaaaccacatttaattggacctacttgccaacttcttgaacacagcttggattattccactggaggctgcttctgttaaaagctgggggaggaggaagtggcatattgacaagacttcagataatttttttttcactcgaagtacaattatgcaatgagccaagtttggaagtattttactatgtttaataattattattaaagatattgtaaaacatatgcatttgttaagtggaatgtaatgggagtaaaatcatgtcatcaattttcctttggatttattttcccattttgtgttttatttgacagccttccaaattgattctagccaaaaccatgcactctaatatatatcatacttgatattaaagtgagaatgcgagtaatttatagaatctgagtgagaacagttttcttctcttagccagcctatatggagctgccacctctgctcaggtagcaaccgacacatgccttgtacacagaaaggaaaataataggggtcgagaaatcctccacacatccttcctgatagacactccaaaacccacatatcccaggcattgttcagtgggagatcaggggcaaggagaaggataactatttctttatgtgtgtgtgaatctagaggaaccagacttgtctctggaaatgcaagtgggaagtgggattcactgagaagccatcattctgctcaggtgagtcctgacttcaggcgagggatcctaaaggtgacaccgcgatccttcacctggaaagccaaggagacatgacatcagtgtgtttcacatcctaagcttaaacaaatgtatattgtttttaccgcctctttctcaagggggaacactgcccctgaaactgcactccttgaaaccgagcaaaggtgccatcgctaatgattagcaagacgctccggatggtttgcatcgaactccacctgctatgtgaaaaccccatgcttttctcactttcccattcaagctgcttagcagttgggtcctctcctctgagtgtggttatgtgtcagtttgacttctgtgtgccctgcgatttcgttgttttcttctgccctgccacagcaaatgaccagtggaggcaacccgcggacggaggaaaagggcaggtccctgcatccatctcagcgccctgcagccggcggcctgtcctttcaggcgggagttcccagcggcgttcctaggtgttttgaatgtgtgccccggggctgggggaagcctcgtgcagttctgctgctgtgggaggcagggggaactggaggggacgggagcagtgtgaggctttcatgtgcagaggggacatgaggacatctggatggcatccctgtgagcagggctcccgctgcaggcctttgaaaaccccgctgccctggctccccagtgccttggaactttctccctggagaatgcagaaaagccagtgcccttgatttcttagacatctacagcttcgacacgtgcagggttatccaggagcagtgaggtttggggtgagggcctgagcactttctgaaaagtgcttgtttctaagaacctggaactatgagtgaggagtgacatgagttctgccctcaagtcctctgataaccagctgtgcagtcttgaacaagtgacttcatctcttcatctttaaaataaaccttttgggccaaatg

SEQ ID NO: 195 - DNA, 3300 bp, Homo sapiens
aatttcagttcctgaacgcacggagctcgctccgggaccgggctgagaaggacctcagctcgcgggcccgccggagccatcggtgtggcaccgagagacggtgcttgggatatgcgacgggaagcccccgccacagcgcaggcagtggccccgccgcgccgcggagccgggcagagcaggctggttcttcagaggaatcatccctgactgtgtcatcactctgagctctgactgcgctcccctcccccaccagtgggaccagtactcaagagagctctggagtgctcctgaagagaaattccatggggactgtacctgaccctctgagatcagctaaaacttccctgattgcagcttccggaaaagaagacgatctaggagagccacaggctgcctcacctcggcatcgaccagctctcctgtgtaagaatgccaatggcttttcaggtgcccctgcagaaccagacctcagccccagggcagctgccgaagccctgatgcaggtttgtgagcatgagaccacccaaccagatatgtcttctcctggtgtgttcaatgaagtgcagaaagcacctgccacattcaactctcccggcaatccccagctgccagggagcagccagcccgcagcatcagccccgagttctgcagcaggaagggatcttatacacacaccattgacaatgcccgccaatcagcacacctgccagtccatcccaggtgatcagcccaatgccatcacctcatccatgcctgaagattccctgatgagatcacagagaacctcaaatagagagcaacctgagaaaccaagttgtcctgtgggaggcgtcctcagtagcagcaaagatcaggtgtcctgtgagtttccttctccagaaacaatccagggaacagtgcagactccagtgacagcagccagggtggtcagtcactcatcctctcctgtaggtggacctgaaggggaaaggcagggagccatctgtgactctgaaatgaggtcctgtaaacctctaactagagaatctggatgttcagagaacaagcagccctctgtcactgcctcgggcccccaaggcacaacttctgtgacacctcaaccaacccccctcactagcgaaccttcggcatgtcccccaggtccagagaaggtgccgctgccagcacagcgtcagatgtcaaggttcaaagaagccagtacgatgaccaaccaagctgaaagtgaaatcaaggaagttcccagcagggcttggcaagatgcggaggtgcaggcagtggcgagtgtcgagagcagatccgtctccaccagccccagtatcctcactgcatttctgaaggaaagccgtgctcctgagcattttgaacaagagcagctgcgtgtcatttgccgcagcagtgggagccacacactggagctctctgacagcacgctagccccccaggagtccagccagtgccctggcatcatgccacaggtgcacattcaggcagctgcagctgagtctacagctttccaacgggaaaataaacttgcgagcctaccaggtggggtccttaaaacctcatcaatcaatttggtctccagtaatgcccagcatacgtgtaaagaagatgggaggttagcaggaatgactccagcgagggaagagtcaactgctaaaaagctcgcaggtactaattctagctccctgaaagctaccgccattgaccagatttctatcagtgcatgcagtcaagctgaaacaagttatggattggggaaatttgaaaccaggccatctgagtttgcagagaaaacgacaaacggccacaaaacagacccagattgcaaactatctgactcttgtggctctatcagcaaagctgatcattctgggagcttggatcccactaataaaggagatgcaagggaaaagaagcctgcatctcctcaggtagtaaaagaaaaagagtctactggcactgatacctcggatgccaaaaccctactgctcaatcctaaatcccaagaaagtggaggcacagaatcagctgctaatcctacaccctccccaattaggaagaaccaggagagcaccttagaagaaaacagacagaccaagacagccaccagcctgagcctgccatctgatcccatgggtgactccagcccaggttctggcaagaagaccccatctcgctccgtcaaagccagcccacgcaggcccagccgcgtcagcgagttcctcaaggagcaaaagttaaatgtgacagcagctgctgctcaggtaggactcactccaggagataagaaaaagcagcttggcgcagactccaagctccagctgaaacagtccaagcgtgtcagggacgtcgtgtgggatgagcagggaatgacctgggaagtgtatggtgcatccttggacgcagagtccctgggaatcgcgatccagaaccatttgcaaagacaaatcagggaacatgagaaattaatcaaaactcaaaatagccagacccggagatccatttcctcagatacttcttcaaataagaagctcagaggaaggcagcacagtgttttccagtccatgctgcagaacttccgacgccccaactgctgcgtccgtcctgccccgtcttctgtgttagattgaaagggagtatttatgggagtttgtgtataaatttacggtattcacatgcgtccctctatgtcaaagcttgcttagttttttgctgcaagactaggaagaaaaagcgagtattcactataggaaattgctattaaaaattgttagatcctttgacctggagctctataaacaaaaatgtcatttcaatttgaaagaaggaacaagaaaagagaaacaagcttcactgaaggtttgcaaccttaacaaattgaaaataatactcactgggtttttaaaaatatgatgttgttcatagaaatagcattattgtatcattatacatgtattattttgtataactgcctcaatttatcacacaatagtagttccattaaaatccctgcttcatattgaaagtagcaaaaacactattggcgaaaacattgttataatttctagtcttattgcagtaagaatgctgtaaccacacaaattataaataggtgataagaaccataatgaaaaaaatgagaacaaatttgattcattcctaggccagataacattaaataaaaacagttaaatgtgtaaaatatgaaatatgaattaatatttgtaaacatctgcagacaactctttttataaaccttcttattgctgttaataaatataagaaagttatattagg

SEQ ID NO: 196 - DNA, 3540 bp, Homo sapiens
ttatcctcgtgatctgcccgccttggcctcccaaagtgccgggattacaggcgtgagccaccgcacctggccgagtgacacactttgtaagacaaaagccatctcatgaacttctacacccatgaagtgtgtctgggaggccccctcctctgggcaccactgccctacgatggctccatctgtagcctccttttccaagaggacttaagaccgacaataaatggatcccagatacagattcccctgcaagcggcaaacgtccatccccattaccggaaacctccagatacttcacacttactggcagcccaggacacggggacccaaatccttgcctgccctgagcagtggctctcgaggccaggaaggggggctcgtgctcagagccaggctggcctgcctgctcacttctgtttgccagggcaccatcatctcccaccaaggatgaacctgaagcttcagggcaacgaagagaaacccagaagcgaagggacttgcaaccaaggctgcccaaagtggcccctgtccaggcccatctctaaatacaacccacaccgaggatgcctggtggggcagaagtccctgggtctcgttcccgtcaggggcgagtgaaccttcacaacctcccggggctttggaatttgacttaatgatgaagggcaacatggaccactggacaaagacctggagttcccactacctgcaccgctctggccaatcccatttggaaatcagtcagcaagattcactctcctctggactctgagcccccgggaggagaggatgggagaggtcaagcgtgtgcaattctgttgcagcctcacaaccaacaagcagccgtgttccgacggctctgcgggaagcccagagggactcccgtggctcaaacgggggcagagacgtgcagggccccggggaacgtgaaggtgagagacagaacataccgtgaagaagccactgagagtgggagacagaggcaggaacagggatgacactggaggacagcaggcctgcctggaggccagcattctctacaaccttccacaaaccaacagcaaagcccgctccgggccacgtgcctggcagctgctcggccactgccccgctcctccctaggcaaaatcccagggaagcaccttgcgtcgtttccatttcctcacctcttactcttccttgaacagtccccccaagaaactgcctacccaccatcaacaactggcacagggcagatccacgggtcaggctgtgtgcacctgaccgcttcataacccctgcgtgggcagccagcaccctccatcagaaatcgtttgatcccgtggcctctgggtctccatcattcgagctcgggagcaacatcccatcaccatctcctctcctcggtgggcccctcctcgtgttcacccctgcactggggggaacccaggctccactcacagaggagccaacctctgggcagcctgccagctcgctgtgaaagtcctcacggccctgactcctcctggagctctgctggcagcacctaagtgcccactcagacctgaatggtggcaccagcggatgcatgaaatgccagcccagcacccgccccggtctctcccagctcagcagcagacaccgctgtgcactaggcttgagggccacctcccaggagctgcccctgactccattctcttgaccggtctgttcatcagacctcgaccacggcccctgcccctgctctcctgcccgttctcccgcctggcctaggagaagccacagcaaaccccacgttccccgccacaaagagaaggaagtccagagtcagtgccaggctgccacggctcaggggcccagcccaccacagcctttcatgcccccccacacactcctgcccaggagctgaaagagccccacactgccgccagcccctacccagccctaagactcttggcagcacatcttgctgccgggaagcctctgacacggatcgtcagtgcacgtccagctcctccaccaaaatcgaagcttctcgtgggcagagacgccacccggcatagcagcgcatccccatcacccatcaacctgcacttggcaagcacctccaaacagagagagcacacacactccgtcggcagccgaaggagctgcaggatggtgctgagagtgggagcaggccagaacgaagctctaacacagaagagccgggtgctggggagagacggggaggacaggtgggaggactcaggcccctccccaggcaggatggggaggccacgacacttgggccagcttggagggtggcgggggaggagaagagcagatgcagactgcacctgctgggggtgacgacggtgcggcgtggccagcccagccactggcaggcccacaggtcagctggatggggcagaggtggggcccaccccaacttccaccgggccttgcctcccagattcctgagccaaggtttaataacagaaaagatggagctctaggggagcaagggacgccgaccaagcaagccgcagcagagaggactgtgctggagccacatcggtggcttctccgggaggtaacgtcctgtgcagactcccagccacaccctggcgctgcctcggctgcctccctgaatgtcagcggcctgagggaccccactcggcagggagcgggggctgcttgtgggaacacacagggtctgattccaagtgagaggggtgactggtgtggcttcagacggcaccaaccacgcaaaggatacacagcttctcgtcgtcctgaaatgtgaagtaaagcttaacaaagaaggggtgatccaggcgcgacatgacatcccgctctctggttacataggggaccttgttctcttttatgatatgtcgcttctccagaattttaacttcaggtgagagagaagtgagttactatcagaaacaacaaaaaacactaaagacatgactcacaaaggtaactggtacaaattaaagtctttcaaacattgtacacaacagcctggtggtctctaaagccaacagtgtcctgtaccctgaaatcagcacagaaacaccggccctgccaccccagccgccctgcacggagccgcttgccctgctcccggacgcacagctccctgcagcccatactcactcgcatattctctggaggttgccagttctcgagccaggacaacctggttgggaaagaaaaggagaaaaagaaacacacaatgtaataaccagaccactgccactctcacgggtgtgatgacatgggacctgcctactggtagtcttctgccttcgtggaattctgcaacttccttcctgcctcggccacagcatgtcaaccaagcacctgtcagggtccctccctggcaggacgatgtttagaagctcagcaccgtgctcctgcctcctcttcagacccatcagaacttgctaccatgggtgtgttttaataaataacttcatttctgcagcaaataaataaataaataaatgtagttgcaatattgcctttaaaagcacttttaagcattgcaccaattgtgaaataaaaagcccgagc

SEQ ID NO: 197 - DNA, 3495 bp, Homo sapiens
atgtagttaagcatcttttttatggacagtattcaagaatgatagcccctctttgactagcccctctttgggtagtcttcaatgcccaaagcccctctttgggtagtcttcaatattttgattcaaaacattgatgaaacaaacaactcggtacctacctatggctctgcaaccaagtacatactaggagtagacttactgagacagctgacactacacacgttaaggcttttggcatctgagaagcgtaggccatctcaacagaatacctgacaatgttctggagacatctggtaggcaggaggcctggggccgggctctggttcctgccatgctctgcagggatgttgcccctgaggggatcagcgtcttcaccatggacatgggagtgtgggatcggctcagctgcaagggttctgtcagtattagctgggattcccactctgtctctctctcccgtttccaggtgacctcacggtggacattccgatgcccaggatgccctcaggccctgtctcatgatgactcccacttccacgagcggcacaagtgcatcaactttttcgtgaaggtgtacggctacatgcccctcctgtacacgcagttcagggtggattctgtgctcttcaagacacgcctgccccatgacaagaccaagtgcttcaagttcatctaggggcagcgcacggtctggggaagaggatgagcagagggaggaagatggctcccaaggttcctaggcattgcaggaccttgggcacatctgctggtgggtggcccagagcctctgctggaaggggcagcaggaggagtggaaggaaaccgctgcctttatcttgaagtcagccacactgggcctggagccctgggcggagtccccggggttccccacacagggcactgactgatagcttacactgaggactgtggcgactctgcagagtcactcacaccgttcgtacgcccaggacagctggttcgtggtttttacattcaataacaactattatgattatttaaaaagagaaagtttcagatttgccattcaaggcttatttatatatatgtgtgtgtatataaatacatgcacacacttgcatacatatatatttttggctgggggagtgtgagttttgcctttctaagggagggaccgcgcaggctcctttgttctgtattctggcggagatgggtcctggccttgtgtcactggcttatccttaaagatcatctcccatcctccccagcgccatctgtgtgcagcaaccagaaagggatgaacttggccctcttgcgggcctggacaaggtctcttccttaccctttctgttgccagtcagcaacctgtaactcacattctcttcccagtgaatccctgggagcgcctgaccctggtgggctgttcagcttcctgctgctggggccagcgatttttgaggatttatctttaggccaggcttgcctccgtacttatccctgctctcccatttctctcttgtttgagagagaatgaggaagcaaagagtgagaaagaataggggctgaagacgccactcccagatggctctttctatcctgctcttctgttgaaacacacgtgctgtgggcctcaggcgtttctgaagtgctctttcttggattggacaggagatcagcagcgtgcacatctgctgtggtctgaagtggtttgcaggtcagcctcctctccctagtgtagagcaagccagtgtccttcgaggaacccacccggctggccgggaagttttacagcaaggcgcctgccttgggataattccttggtgaaattcaccttccccccgcctctgtctggagccccatcctgtgttatctgtggtttttggacccctaatgtcagcttggctgtaggactccccgaggtttggtatgtgctagaacaatgggaggctgtgatttgctgtgtaagctcacatccagccttggaatctaacgggcattcacaacccgagttaccactttccactccctgcttaggattctgttccctgggctgaaactgaaataagctaattttttgggtcacggtggcagtaggggaacctaggagggtgtgagtggcatttgtcagggatttagcccatgacgtgtttcttgaaccctactttctggaagtggagttgactctggaagttttctagcaactgaacaaaagctcaggtttgtcctggtcatgcacatgccttaagccagttccgtcttccctagaccttggcatcctgtgcttctatttcttggaatacgttctcctctgacctgcctgtaccacgtgggtcctcttcaagtactgttttgaagctgggctcttttgtgtagctcccacccacctgtagggctagctcggcttaagggaactctccccattggcaaaccggacccggccgccgccaggactgtgtttccaaaggttccccgcccccaaccccagcatcagcctgtagctcccctgctgaggcagtgtggttatgttcccagcagtgggggtcagacgcccttcctcagaactttctagttgccctctacctgactcctgacttgtattccttttagcagtagccttcttccctcggggagccaaagagtgtggtgtgtggcgctatattgtggctgctatttcatctggtttcttttaatgtgaggaactcacatactgacttcagtgggactcggtgagccggggccgtctgtgtggtgggaccccctttagcgggactcagtgagctggggccgtctgtgtggtggagccagggcctctccctttagtggagccaggttgtcgggccccgaatgtcactggtggatctaagaagggctgagtggtctgacaccaaaacatgccgcagggagggctgtggtgccggtgcttccaacaaggacagccctccttgaccctgaaaggaacactggcttgaaggactgcagacaggctctgaggggcacgccctcctcagcgagaggcagcaaggtggccacagtgtcactggtcaggtgcttctcaccacgggaaagccgccgacctgtgactcgcttgagatgggaaagcggcgccacagaccccgggtctccttggctgtctgtgggccgcccctggccaccttgtcctggctcgcagggtgcaggagcgcctcgttctctgggtggccggcctgctgctccggtttgggctgtcttaccataacaccgtcccagggctctgcaggccactgtgagcgctggctccctgggcagtgctcctccgtgtggactgtgcctcaggccagggctcaccagctggggtcctgtccggaaggatgggatctttctgggagctgcgccggacagagtggggagctcctagtttgtggggggaagctttgatatccatgccacgtccatccaccccaccccttttcgtcacgagcacaatggtcttacattggatttttgtaaaaaaataaaaataaatggagactttaactc

SEQ ID NO: 198 - DNA, 4634 bp, Homo sapiens
agaccagcccttacctagtcataccgcagtacagcgtgggaagtgatgcaagcctagggctccctgcagcctgcccaccttcctatcctgggctctccctaaccaccaaagcaagagggcagactgctctcatgtgtgggtactgcgatgttttggtttggtttttattattttaactagatggattttcaatggcctaggaaggttttaattggatactctatgaaggtaaaaaatgtaatttctcaggatccctttcatttgctcttatggtcaatggtccccccgggaaaggctgatgctgtaagctttgttacatttggacaagtcagtgaagttaccccatacccgtcattcactagggacacttggaattgggaaaggcaccagcaagctggttggaatgcagagactgcattagccaagcgtccggggtccagccatggagggtgtcaccgagggcttgtgatcccttgccttgccttggttgagaaatccacaaagcttttttaagtctgtaattcctgtgtcagcagcgctcaggtttgggtgggagaaacggtgaggaacgatgatgatgaggcagaaattgggaggggtgctgctcttaggcccctggggcagagtcttgagcgcctggggaagctaacagtgtgtcactctggcatctaggaagcagtatatctcaactcagttttgcggaggacatttctgctgatgaagatgaccaaatcctcagtcaaggaaagcataagaagaaaggaaataaacttttagagaaaactaacttggaaaaggagaaaggaagcagagtcttttgtgtagaggaagaggacagtgaaagcagtcttcaaaagagaagaaggaagaagaagaagaagcaccacctgcagcctgaaaatccaggcccagggggtgcagccccgtccctggaacagaaccggggcagggagcccgaggcctctgggctgaaagccctgaaggcacgtgtggccgagccaggtgcagaggccacgtccagcactggggaggagagtggctccgagcatcctccagccgtccccatgcacaataaaaggaaacggccacggaagaagagcccgagggcccacagggaaatgttggaatcagcagtgttgcccccagaggacatgtctcagagtggcccgagtggcagtcatcctcagggacctagagggtccccgacaggtggagcccaactcctaaaaaggaagcggaaacttggagttgtgcccgtcaatggcagtggcctgtccacgccggcctggcctccattgcagcaggaaggccctcccacaggccccgcagagggggcgaacagccacaccacgctgccccagcgcaggaggctgcagaaaaagaaggcagggcccggcagcctggagctctgtggcctgcccagccagaaaacagcaagtttgaaaaagaggaagaaaatgagagtgatgtcaaacttggtggagcacaacggggtgctggagtccgaagctgggcaaccccaggctctgggaagcagtgggacttgcagttccctgaagaagcagaagctgagggcagagagcgactttgtgaagtttgacacccccttcttaccaaagcccctgttcttcagaagagccaagagcagcactgccacccaccctccaggccctgccgtccagctaaacaagacaccatccagctccaagaaagtcacctttgggctgaacagaaacatgactgccgaattcaagaagacagacaagagtatcttggtcagtcccacgggcccttctcgagtggccttcgaccctgaacagaagcccctccacggggtgctgaagacccccaccagctcacctgccagctcacccctggtggccaagaagcccctgaccaccacaccaaggagaaggcccagggctatggatttcttctgaggagcagcagagtcccttgtaaaagactgcttttgtacagaatgcgctataaattatacctttaagaatgtggggccttttttatgattttgtaagttcccataagttgtgtgcacgaggttctgagagtgcccgcaggctgctgcgtcctggcccctctgtagtggctgcgggcgtcttggttgaatcttttgctacaaaccatgtttgcgtttgagctctccaggattttacatttttgggtaacctcagtgattcccattggtgtaggaaatgagaccctctctgaagctgaggagagcacgttgatctgaactttaaatcaatcagtgctgctggcacaatgaaaggtggaactgcacttctgttgagctctcagttctgcggaatttggtactcattaccgtattcgccgtactaagttggtttctgttagtcttaacagtctgttttcttttaaaagcatgtagggcttcattgccatgttctgtgggtgtttggcaggttaccgatggggaagattcttgtcacagaatcagcaataccatagtttttctacatgtgctcagctgggggtgtggacaggtaggggtggggaaagaagaggctctgcgttctgggggctttttcttctcctccccctacccggtttccctccctgttttcctacctctacggcaagcccaaagtgtcttcccgggagcccagcgcagcccccggctcttacccaggaccccgccccgtgctgagccttctgctgaggtccttgcgtggagcacactcattcctccaagcccttgcgctcccgtttctctctctctccgtccacgttccagccgagtcactgcctgaccggctccatggcagctccccatcttccctagaggctgcctgcgcatctggagcctgcgctccggctcagcgacctttcctctcaaatgcggaagcgtgcacttacagttcagaccgttctcctgtaagttcattacaaacacgggcggaaggcactcaggctttcgttggagaaacagaaataaggccttcttttgagcagcgattgctggatcattgatctgtttgaggaagtgtctgacctgggcctgagagctggagaaggtgcagattcaaagtgagcggctcctgaggagagccgccaaggctgctcgccttctccgtggcttccgcagctaccgtctgcacggtgagagggcacgggcacacggttcgggctggcgtgcagctctcccagccagccacgctctgctcaggcctggaagtgaaagccgcctccttcccgttatgccccccatacaggagcctcggtttttcagcaaaacgcggccagtccccttctccactgctgcctcccagcagagggccccaggatctccaaggtcccagctatggctttggacaacgtggcttcggcccctggggttgcagagcttgcattgggtttacctcggtctcattcattcatggagccaagggtggggtttcacctgcgaacatcagactgacttgctggcgtcaagagcagttgactcactgatgaaggccctggtgaggagaaagcactctgttcttcgcctactctgtaatcgttttgtcataatgagccatgaaaaaagtaatgaacttgtgctgttaatcgtcactgtaatgagaagtcttacgtacaacatagttgtggtggcttaatggctgcattagataggatcctcacatcccattcagaaccaaaactgatacagtgaaacaattaaggtgagcaaatagttttaacttttcttttttttttttaagtttcattcttcctagaatatttttctaacaatttttatttcagctttaaagatgggtcatatagccaaacgggccatataatccaacattgttgagatgtcttaggacatctaaggcaaaactggcacatttgttctgcagactattgcaggaatgttttttcctagcatttctatattatctgtccattctgaggaaccagtgaatgtcctataaatgcacctcctgtcaaaaccatgcctgagaggtcccggctgggagtgacagggtgcttcttagattctattggtccttctctcattctccgaacttactcctttttatgggtaagtcaactaggtttacagtcccttatttttaatgcctaagttttgacagcaggaagaaaacaattttttaaaaattctcattacatagacgcacaagaatatgtcacataaagaaaatgtgtttagaatactggttttctatttacgcatgatattttcctaagtaaaattgccaagtggacttggaagtccagaaaggaaaataatttaaattaatgctggtgatcttaacaatattttgtaaaatgatgcttcccccttctccatggtctagtcaattttgtacaattaggtatctgactttacaagtttgttatcctttctaatttttactgaactgaaagcacaaagaagactacacagaaaatctggaaacagttgcaggtgttgggaggaagatgaagtcgagctgtcttttaacttttgtatgtgttttatcagaatttgctggactatgctggcaaggactttgtttacgatcaaattgtactagtgtctgcagggtttgtcagtactcgtcaaagccaagtccaattaaaaaaaaaagtctttgccctcc

SEQ ID NO: 199 - DNA, 3773 bp, Homo sapiens
gttaataaaaacaagaatggttattgggagataagggcaggccaactccagatttataaagttgagactttttacactggctggattcccagtctctgcttttagtctcctcaggagaaaacaaattcttgttgcaatgaagagcctcacacatttctccaaggagcacgtcagcgctggatttagggctcccagttaccttacaaaaaagttttgaggggttttacttgttttatttatttttttcttcttaatgaacaaattatggtgatgaacaataagctttgtcctcccctgttgctccaagagctcctttcccacagcctgcctcaggagcagtgtctgagctcttccctggttgtttcacatgacagtggccttgctgaaaatgaaggtgctgagtggtttctcccatgtttatccactgtcttcagtaatgatggagaacacctcacataaggcagactcttcacaccatgtcaaaatgcaaggaaaaaatctccctcaagtagacacacaggccactgtctgtctcgtgtctggttctgatggctgcacagagccatcgacactgcttagcagtgaccccctctgccctgtggcctgccttcagcctttcaggccgtcacggaacatctgcgagaaagccctccaatagccaaagcaagagtttcatgctgggttctttgttgttaatctgctttaaatatattgaatcaatagttacttgagaattactcaaagtttccagaagtacacaacgtgttttcttctcttgatatttcacatacctcgggtaagcatggcatctaaagctctcgtcatcgtgtgctcttctcctgatggtgttgacgacccagtgttaacagggaatggttattctgtacgggcatctgaactgaaaagtgagaagagcgaactttgcctcctcggccccttctctgtgcctgtggcttatgcgtgtgcccctctcctctttgtcactgcttcccttgccctggatgtggttggtgcactggggtcaccttagaccacaggaaatgtctggttaacacacgaagagatggaaacgctcgcagccacgccgcaaacggttagtcacgccccacagcctgcactcctcccagcgcgttttccacttaagaccgtctgggttctttgcctttttgttgaaaacaaaatgttgttttccattcagtcgttccagataagtatttcctttagttattagttgaaatgtgtaagtagaatttgtattttattttagattttttccaggaacttcaagttggtagactctgtcttttagaatagctttaatctagctctccttttggagagatctcagttgagcctccatgtgactgactgtgtggccctttctccttccatgaatatgcttggcacggagagagtctgctccttgcatgagaagttgaaattgttggttttgcatgagttttgcatgatgctttgatagtctgaactttttcactcagtgaagctgcatcttccctgcagagttgcgttgcctgcattaccgagctcaccaatactaatagttatgttcttttgcattcctaaccacgtaaccccaggaagatgaggagggaagctgggctcagacactcgcctatggggacatgaaccacgagtggatcggcaacgagtggctccccagcctgggcctcccccagtaccgcagctacttcatggagtgccttgtagacgccaggatgctggaccacttgaccaagaaagaccttcgagggcagctgaaaatggtcgacagttttcacagaaacagtttccagtgtggaattatgtgcctgagaaggttaaattatgaccggaaagaactggaaagaaaaagagaagaaagtcagagtgaaataaaagacgtgcttgtttggagcaatgatcgagtgattcgctggatcctgtcaattggccttaaagaatatgcaaacaatcttatagagagtggtgttcacggagcacttctggccttagatgaaaccttcgacttcagtgcactggcactgctgttacagatcccgacgcagaacacacaggctcgtgctgtcttggaaagagaatttaacaaccttttggtcatggggactgatagaaggtttgatgaagatgatgataaaagctttaggagagcaccttcatggagaaaaaagtttagaccaaaggacattcgtggcttagctgctgggtcagcagagactctccctgcaaacttccgggtgacttcttctatgtcttccccctctatgcagccaaagaagatgcagatggacggcaatgtatcaggaacacagaggttggattctgctacagtcaggacttactcctgctaaagtctcctgttgtttacccacactacttctacagatgattatgcagcatttgaatccaacaaagactacattttggaatccagtggaatctttaatcttgttaatacttgttatatggaccctaagatattttattacagagtttttaattagtgaaaaattcatgaataccatagagaaaatattttagaatttaatgtttcttatatttatgtaaacttatgactcttcatttatatagttacttactttttcatgtatatccaggctataaatatcctttcaaatcatgttcttatacctaattttagtctttcaaatgaatgtactgtaatgcttgtatgtataaatcctatgaatagagggcttttgtaaattatgcatttattgtaattatcattaattttttaatgataaaccatgacaaaggattttacgtttataaaattatgacagaagccatgtgcattatcctttacggacgcagcctagctctacagcaatcatcctgaaataagcatacctaatttcaagcaattgttgtattttcatgactgaccttaactgtactttttctagcaagagatgctttattctgcagcatgaacagatttaaaatggctggtgttaaatatcagctcctaataagatgtggactgaaaacactatcacaacactatgagaagcccctagcactggttaacgctttcctagcctagtctctggatttggggagcttgtcttcagtggctgagactgtgagctgggagcagttctctcagctggagagactcgggatggggtaacctggggaccagtctagcccctgcaccctcttccctgcctctgctccttgggagcgggtggagagacacccatgtggctccccttagggccagcaccaagcaccacgctctcatcctgcaagtcggcgcacacagtggatgaaggcaggagacccagaaagcagtgcagtgcagctctaataaaggccttatttttcttatgtaaatcatctttttacatttgtttgtaaacatgtttaaagaacgaacctagtgggacatttttagactttgatgctctagccattttggattgtgtaagttgcagatgtggcttttactttttaaatggcatattaacaagccagcaaagtgtgtcagaccatggcgtggtatttattgtgcagcagatccagagacagaggcagcctgtcttttcagttggtttctgcttttaatttacttgtacaattcattgttactgttctgtttttctattaatcttttgtcaacttcctgattatgtaacaaagtatgtacagtctacttttgaactatttttatcacagtattatttattgctttctttcaataaagtactgaagcattttccactgcc

SEQ ID NO: 200 - DNA, 3567 bp, Homo sapiens
gctcacgatggggaagtcaggactgtggagaagcgggaaactggagcccgagggcagggtgctcaggagagacccatccagacagcaatgctcaaggccaagtgagaccaacgacctggaatccagggagaaagcagtgccaggtactgaccacacatgggacgagggtgctgaccagagggatgagggcactgagcatgtacacaggatcaggtatcataggagggagtgaagaactcccagcaaaatccaggaaggagcacggcagagagacctgggtgtggacggagagacccgggtgtggacagagcactgcagagagacccaggtgtggacagagagacccgggtgtggacagagagacccgggtgtggacagagacctgggtgtggacatgttcttctgtcatggggaggaagagaagggagagcaagaaggcagaggagaggaaacaggagggagcgagggagggcgagagggagaacacccctctgtagtaagagatgcatctcgggcaagctgcgtccttcctctgctggaggcccccattgctctactgtgctgggtggtgtcggcagggtggcagatagaggggtctgctgggccagcccatgtgtcccaggagtgaggtccacccccgctgggccagcccatgtgtcccaggagtgaggtccaccctcgctgggccagcccatgtgtcccaggagtgaggtccactcccgctgggccagcccatgtgtcccaggagtgaggtccactcctgctggcgacatgagcagtgctttctctagagggtatggggaggcagaggaagcccctgctcttccaagcagcaaggaagggtgatagcctgcacccttcaggccttcaccatggctgcactctcttctgagtgtaagaagcttctactgtaacagaccctggcaagcaggagctgcgattgggcagcccagacccaaggcacagggagctgagcccggggcaggccagggctgggaccctgcaggggccgatgtagggctgtagtcattacaggtgctcggtggcctccctacgagggcagagcccatcctcaggaacggtcaccaccggcctggcctccgcttcttccctgggcagtgtctccctcacaccatctctgagcctcagccctgtctgttcagtgaggggctgaaccgctgctcccagaggcccctctgcctgggcagcgtccggcctcaggccctgactgcaggacgtttgcaggacgatgcctcctgcctccctccggggacaatctctcacatcctccctgttcctttccatgtggcctctggccgcctcgcatctgaactgctgaagtcctgtttctctgggcctcatcctctcctccatcaaaatgaggaaccgtggactgcaggagcattgaggaagccacgtggagtccccgctctgtgttgagccccgtagggtgcccttcctgtgggcggccattctgggcgtggcgccccctgtctgaaatcagcagcacaccagctccctgtgctccgtgtgacaagctgccagggacaaaggtagcacccggacaagcacccaggcttttcttcctcattctaaaccccattggagccgcaatctccaggtataatagcagcttgttaacaaatcctgtttgtgttgcatttgctgacagagaaactcccctgggaccacagcagtaggcacggcattcctgtgacagaaatcaatgccacagatcgagggatggagccaccggctccccaggttgagtccccttccggtaacacggccacactccttcctccctccaagaagatcccagggagggcgatcccgcctggatgcgttcctcactccctttcaggtggccccagacgctgggcattgggaggtggccacgtggggacatggacatgaaggctgggtaagtgtggggaccaggcgagctggctgctggacacccacccaccctgtgagctgcaccagaccctactctctgtgctctggaccccaggaagcagtcaggattgggggggtcccactcacaggccccggcgccttccacctgggcagctgccatgtgcaccctcaggcttcagactcctggccacgggggcggtggtgtggaccccaggccgtgtgtgcagatgcagcaaggtgacatcagccatacattcactgcgtcactcctcacccagctccttctcagagcctcactcggaacagcacatctcccatctcagctgccctggccacttctgtgtaggaggcaggagggatactcccaccaccccgacccttacagataacaggctcagaaaggcacctgaccccacagcccttcagttgggtttgaacctgggttgcttggtttcaaagcacaggggtttgtcctgcccagtcacacccctcaaagtgtggatgtgggaaacaccgctgaggagcctggacatccaggagggctcaggagacccttcctgactgcaccccggacaggcccacgacaggcagatgggacacaggtcaggatgtggcaggcacacggcctggcttctagacacttctcagacctgggagaggagagagggacaggtggtgtgggcgtgctggaggcgggaaggggataagagtgttggttatcacgggcaatgtggacacacggccaggacaggggtccacagtatttcaggaacctcccacaagacgaaacttctagacagacttccctccctgtgagataccttaggctgtagtggagaggtcgctgaaagaatcgatatttctagaaattagctttgggatcagtttgcgaagctgcatctatgctgacaagtgaatgaagcccgttggcagggaatacactgaggccttaggcctgcagaagagcacaggtgcacctgcgccacatgggccagaatcaacccaggtgaattccagcccatgccattgatgccaaccatggacgaggaatccagctggggctgaagttccgctacgctgtcagttccactggggatgtgtgttgctccttcagcctctgccagacacacaggcccggttccagcacccgggtgtttgaggccagtgtgtgagtcagccagggagcctcagcctttcccactggcttcaaaaagatgtggaggctgatggggaggaggaaggttccccagagcaggaggccatctgatgtaatgaacatgccttcctaagacgctgcctgggccgcagccaagtgtggtcgctctctgagcaatcgatgctgccacaaaaggtcctggcagcagcggcacgacccctgcaccccgcctgctgcatccaggacagcgccggcctcccacggcggctcccgggagaagaggagacgccactttggctgctgtcccggggagaggggggacagtccttcgacttcatgcaggggcttgtcaaccccaaagcttcctccgccgccatctgggtctgacgctctccgctggaaggtgttcaggagctggcaccccacgtccaccagcgctggcttcaaatcaaacaataaacagcatttaaaaaaaattagtcccacaggtc

SEQ ID NO: 201 - DNA, 3695 bp, Homo sapiens
ctatttttaacttttattgctagtgctttcggtgttatatctaagagttcattgctttatctaaggtcttgaagatttccccctatgttttcttctaagagttttaaagttttagctcttatatttaggttgttgatccatattgaattaaattttgtatatggaatgattaattttatatatgatatgttgtatatgggttcaacttcattctatggttatttggtggtccaagcactatttgttgaagagtcttttctttgcccactgaatggtcttgtcactcttgttgaaaataaaccctataggcctatgctggccatagggtttatttctggactcagcattttattccattggtttgtgtgtgtgttcttaagcctgaacaacactattttgattattgtgctttgtagtaagttttgaaataaataagcttcctattttgtatttctgttttttttttgtttttttttttttgttacagggtctcactctgttccacaggctggcatgcagtggcatgatctcagctcgctatataacctctgctttcgtgcttaagtgattctccagccttaacttcctgagtagctgggactataaacatgagccagcatgtttgtctaacttttgtatttttggtagagacaaggttgtgccatgtcacctaggctgatctcgaattcctgagcttaaagcaatctgcctgcctcagcctcccaaagtgctgtgattacaggcgtgagccaccatgcctggccctattttatatttctttttcaaaattgttttggctctttgcagttgtatatgaatttgaagattagctttttcagtttggttcaaaaggccattggaattataatagggattgtactgaatctgtcaattgcttggtagtattagcatcttaacgatgttaagtatagtgatccatgaacatgggatgcctttctatttatttaagtaatctttaattgtgtcagcagtgtattataattttcattgtgtctttcaccttcttagttgaatttattcctaggtatattattattttgggtgctattgtatgtagaattgttttcttaatttccattttggatcatttgttgctagtgtacagatacaccaccaattttggtgagttgatcttttatttatttatttttgagatgaggtcttactttgtcacccaagctgcagtgcagtgatgtgatcatggctcactgcagccttgaccacctgggctcaagcaatgctcccgcctcatcttccctagtggctgggaccacaggcacatgccacagtgcctggctaattaattttttttttttttttttttttagagagagggtcttggtatgttgatcaggctgatctcgaacttctgggctcaagtgatcttcccgccttgtcctcccgaggtgctgggattacgggtatgagccaccatgcttagctgtgagttgatcttttttgtttgtttgttttttttgagacgggattttgctctgttgctgagggtggagtgcagtggtgtgatctcggctcactggaacctccatctcccaggcttaagtgatcctcccaccccggcctcccaagtagcagggactacaggtgtgcgccactatgcccggctaattttttttgtgtgtttttgtagacatgggttttcatcatgttgcccaggctcgtcttgaactcctgggctcaagcgatctgcctgcctcggcctccaaaaatgctgggattgcaggcgtgagccatcatgcccagcctgtgggttgatcttttatcctgcacatttgccagattcgtttgttagctgtagtagtttttggtggattctgtgggattttctatatatagagtcatgttatctgaaaatatatagagatagttttacttttctgtctccaatttggatgccttttcttccttgtcaaatttctttgtctaggacttctagtacagtgtttaatagcagtggtgaaaacgggcatccttgtcttgttatttatctttgacggaatgctttcagcctttaactattggatatgatgttaggtgtgtgtttttcatagaagtttccttctattcctcatcctcattcctccatccagtggaggtggcagggggtgaaatggactctgtgagggtcatccttagttttggttgtttaatgctctatctttgtgctggttggccttaaacatgtagatgaatttcacaggaatatttttactgtgttgagtcttacaatccatctacacagtacgcttctctaattatttagattcctttgtatttctttcatcagcattttcttttttcagcatgtaagtcctatatatgttttgttagatttatacctaaatattttatttcctttggggcatttttaatattatcatatgtttaattttttattttgattgttcattgttaagttatagaaatgcaatttatttttctgcattgatcttgtgtcctgtgaccttgcttaactgtttaattttaggagtttttgggtggattcctttagatttcctccataaataataataccacctacatagacaataatatcacccacaaaaagtatttttttttttgtttccagtctgtatgcctttctaccctttttaaacttataagttaatatttatacctcatggattctgcctccatgatgccgttgtaagcactttggcagagctcattagtaacatcaagcttaaaaaatccagtgtattcttttcatttattttttgattctcatttacctttgccatttaatacttgtcatctctttccaaaaacttcactttcttggctcctctgattctttccctacatctttggcaccctgtctctggctcctgttgttacttttctgctacctatcccacatttaaataggagttttgtaggttttcattattttagtgctcactctccttggataattttattcccaatggatttagttatcattatatattttttactcacaaaatgctattttaggggtcagtcttttttttcctgaactccagcataagagctaaatgggccttcacctatatgtcccatagaatgttccaaactgaaatcatcttaaacctcaaatcctttcctctttatgtattttctgtgtcagtgaacaattccactgtgtgctttcaatccaaaccaggaaccctgaggtcgtccttaactttacccatcccttatatcaattattcatcagtctgttttctactgctttcctatctcttgagtgtatctattagctttcattggtacttcgaatcatttttcacactgtctctagacatgatattcttaaatgtgggtcatttcctcaaaacttcttttctagttcagtgattttctcagatcataaacttatgtgcaactcataagaaagagactgaaattttttgtaatctagttgttttcgaagtgtgatctgaagacctccaggtgttcccaagttttttctttttatatacaaaatcaacattatttttctaatactaagacatgattcatgatttacttttttcaccctcattttctcatgaatgtagtgtggaattttccagaggttatgtatggcactggaacagactgacggcagaagcaaatatgagaatgtagctgtcttctcttaagtcagattt

SEQ ID NO: 202 - DNA, 4161 bp, Homo sapiens
cgtatatatacatgtatatatatatatacgtatatatacacattttctttatccactaattgattgatgggcatttgggctgattctatagttttgcaactgtgaattttgctgctgtaaacatgtgtgcaaaagtatctttttcatataatgacttattttcctctgggtagatacctagcagtgggattgctggatcaaatggtggatctgcttttagttctttgaggaatctccatactgctttccatggtggtggtactggcttacattcccaccatcagtgtaaaagcgttctttcaccacgtctgtgccaacatcaatttttgctttttttgtttttgtttttgttttttttttgagatggagtctcgctctgtcacccaggctggagtacagtggtgtgatatcagctcactgcaacctctgcctcccgggttcaagcaattcttctgcctcagtctcctgagtagctgggattacaggcaactgccaccatgcctggctaatttttgtattttcagtagagactcggtttcaccatgttggtcaggctggtctcaaactcctgacctcctgatccgcccacctcggcctcccaaagtgctgggactacaggcgtgagccaccgcaccccgccctatttttgtttattttacacgtggtattgcattgtgattttgatttgcatttccctggtggttggtgatgttgagcattttttcatatgtttgttggccatttgtatatcttcttttgagaattgtctattcatgtccttggcatgctttttgatgggattattcttgctgattagagttccctgtagattctggacattagtcctttgtcagatgcagtttgtgaaaattttctcccactctgtgggtgatctgcttactctgctgattgtttcctatgctgtgcaggaggcttttagtttaattaagtcccatctatttatctttgtttctattgcatttgcttttgggttcttggtcatgaactgtttgcctaggcaaatgtgtagaagcattttccaatgttatcttctagaatgtttgtggtttcagaccttagatttaagtctttgatccatcttatattgatttctgtataaggtgagagatgaggatccagttttattcttttacatgtggcttgccaattatcccagcactatttgttgtatagggtgtactttctctactttgtttttgtttactttgctgaagatcagttgggtgctaggtatttggctttatttttggcttctctactctgtcccattggtcatgtgcctgtttttatgccagcaccatgctgttttggtggctatggccttgtagtatagtttgaagttgggtagtgtgatgcctctagattggttctttttgcttagttttgctttggctgtgcggactcttttttggatccaattgaattttggcatttttttttccagttctataaagaatgatgatggtatattgatgggaattgcattgaatttgtggactgcttttggcggtatggtcgttttcacagtattgagtctacccatccatgagcgtggaatgtgtttccatttctttgtgtcatctatgatttctttcgacagtgttttgtggttttccttgtaggggtctttcacttccttggttaggtatattcctaggtattttatgtttacagctattataaaagggtttgatttgattctcagcctggtagatgttggtggatagcactgctactgatttgtgtacatagattttgtatcctgataaatggatttattgtatatttctaaatggcaataagatttgaaatattcccaacacaaagaaatgatcaatgtttgaggtgattaatatcctaaagaccctgatttgatcattacacattgcatgcatgtaccagaatctcacatggaccccacaaatgtgtacaattattctctatcaaaaactttttttaagaaacatgcaggaatacactgtacctcttccttgctgtctctggatattgtcacatgaggacttgacatgcggattgtggcagcctctgtgaccaagagcagaagacaatagcagcatagaaacctcaagtgaaaaacctaacatctcaagctactaatttagacacccttggcatcagctatctccggtcttagtacatgaggtgataagccccactgttcaagttgggtggccatcaattgctgcagaatagaagttaatgaggcttcttcctcctggaacccctactagaccctgacatacccattcagtcacaggcagaaagggaagcagagggtaaggagacctggctggctgtgccagacccagatcttacctgtcctgcttagaacactcaaagctcaattggttaaacaaaaaaaggaaaaagacagtaaggagtataacactccccaggtgcaacttaatctaacactctatactttaaattttctaaacatacatagaaatcagaccactacttctgcagaacattttactggtaaaaagaaaagcccacatgagggaaaactgatttggtggaaagacaacaaaaacaaaacatgggaaataggtaaggtgataacatgggggagaggttttgctcgtgtttcaccaggagaaaatcagcttcctgtttggatacccactagacatttgaagttctacaatgaacccatcagagatgcaaatgaaagtgcctccgcagagacagaaaacccacaatcgagcatcatccacccgcaggatgaacaaaatggtgatatcagaagaacagataaagttaccatccaccaagaaaacagcacatgtggagagccagggagaagaatagaaagaaaaagagacggagatcagagacagacacagaaagtgagattggggagatagtgtaaaagagagagagagagagagagagagagaccataagagaagggagacaaagagataaaaggtgcgagtcagcaggtgaggagaaagactgaaaactatgagaaacagcaactaagacacaaaggaggtgggagactgcctgggtgccgcagcacccacaccgtcctgttgccccctgtcagttgggttaaaaccaccggaaattccactattgcaaattttgtattaattcttgtatgtctgacttttctattgttagtctacaggtgtatccagcagctccagagagacagcgaccagggagaaggggccatgatgacggtggtggttttgtcaaaacgaaaagggggatatgtaggggaaagaaagagagatcagactgttactgtgtctacatagaaagggaagacataagagactccattttgaaaaagaactgtactttaaacaattgctttgctgagatgtttttaatctgtagctttgccccagccacttttccccaaccactttgacccaacctggagctcaaaaaacatgtgttgtatgaaatcaaggtttaagggatgtagggctgtgcaggacgtgccttgttaacaaaaagtttgccagcaatatacttggtaaaagtcatcgccattctctagtctcaataaaccaggggcacaatacactatggaaagctgcagggagccctgcccttgaaagctgagtattgtccaaggtttctccccatgtgatagtctgaaaagtggcctcgtgggatgagaaagacctgacagtcccccagcccgacacccataaagggtctgtgctgaggtggactagtcaaagcggaaagcctcttgcagttgagatagaggaaggccactgtctcctgcccgcccctgggaactgaatgtctcggtataaaacccgattgtacatttgttcaattctgagatgggggaaaaaccgccctgtggtgggaggcgagacatgtttgcagcaatgctgccttgttattctttactccactgagatgtttgggtggagagaaacctaaatctggcttacgtgcatgtccagtcttagtaccttcccttgaacttcattatgacatagattctattagtcacatgtttgttgctgaccttctccttattatcaccctgccctcctactacattcctttttgctgaaataatgaagataataatcaataaaaactgagggaaatcaaaaaaaaaaaaaaaaaaaaaaaaag

SEQ ID NO: 203 - DNA, 4595 bp, Homo sapiens
gtataaccaggtgctgctgtttcctgagagtccccagggcaaagtcctccaggtgatcgtgtgggggaactacgggcggatggagcggaagcagttcatgggtgtggctcgcgtgctgctggaggagctggacttgaccaccctggccgtgggctggtacaagctcttccccacctcctccatggtggacccagccacaggccccctgctccggcaggcatcccagttgtccctcgagagcaccgtggggccctgcggagaacgatcttagtgctggaatggggaggggctccccaagatggcctggagaccacccagccctgacctgggaccccaggcccaggggcacattgaacaggaggacggggctctcccccacagtggggaagcagaacggggagacctgcccccccttgggcccctcctcaccccttctttgcctcctacccccgagacctcccctctcccaacgggattggctacacttttgacttggccggttcttgacctggtggatgtggctgcagtccagagaaaggaaagattgaggtggcagagcagaccactctcccttcccaaactgtccaacttctccccctttttgcctcctcggaagctcgctgcccagagccatgtccagaacccagccggccatctccatggtgccaattaccagcaagtgtctttcctgcggcaccgggttcaggcagctactcctgccccagagatgaaggggcagctttgcaaggatccggagccagctcccaggggcccagagccccccacttgaagaggagcttgagcttccctctgcctgcccgtggaaggagctttgccgcagcctgtccgagtccatccgtccgtcccctcctgcctgcccctcttctggtggctctaggaattggggttcagcagggaccaaaggaaaggaggaggtgccgggggcctggcacagacccctaggtgcctcgctccatgggattgcaacaagctagtttaggaaccgctggcggactagaaagaatgttgtcgtctgtgttccggtggaggagctgtggaacctgagtttccagaaccccaaccctagagagcatttgggggtgctgtattggagggggaggctaaggaaagttgggattgggactggtggtgccaagataagggtttctcaaattggagaacccctccttgttgcatgaggtcaatggtcatcttgtctacccaccctgcctccaggccagggggctggggaggcaaatagagcccccctattttagtctttttaaaaaaaacatcctatactaagggcagaacccactgccccggcctcaattaccttggctgaaggaaagatggcggtaggagagaaaagtgaagaggcgtgagtgtaagaactgggagattccttttccagcaggcctgggtagctgccttcccagcccagccctccctggggcctgcgggagcccttttgcatgcaaggggggatggaggctggcccctctttatagaagcacatttctgccacctcccctgggaggcacccagaagcctgccactctttacctagtccctgctgtgtagggcgtagtccaggttagctaggtagagttagtgctccaagccctggggcctgttcttagctcatgcatagtccttacagagtcccaggaccgggggtggagaggagcctcaagtacattccaggagaccactgtctcctcgctggcctgggcctagatggggcagcctggctcacaggaggccagcccctcctcctccgcccccttccttcccttgtccccgtagggttatagctggagctgcctgttatactcggctgttctgatttattattcttggtactgactttctttatgagggactcctaagggttgtaggaccttggcagagggggcctggtctccattagagggtgttgttttctcctgaggacacccaggctgcctttggtcccaccctgttcctggtcccggtcccggtcccagtcccaccaggcaactccttccacccggaaattcttcccttcccttagcctgtggaaaccctgggtattctttaaagttctggtcaatgtatatcacctccacagagctgcttaccctgcactgggaaggggagatggagacgccccctttacccaggaggtcttcagagtttcctgggaccgcggtgggtggaatcccaaggctgggggtggaaggagcagggctctggagggattcgcattcaaggcacagaattggccccttgcctgtttgtttttctaaccagtgtgatttctctgctgttcgtttattacttaccattggaatattttgagccaggagagcgccttctctctccagccatcaccgctgtggttgttcaggggtagcttttcaaaaacagggcagagcctggctgtcccaaccagggggagcaggggcttggccctgacagcctgagcccttcccctggtgtctgcacagcctttataaagagagagagagctccgaagcaataacaacacctgggggtggtcagtgagggccccctcaatgattttcttgtttgttctgtgaaatcccgctcacctcctggaggggtggagcagctgggggctggagccctgtttctttgtgtcatcgtgagcatgtgccccttcccaggggctgtgaccattgggtgtgggaactacggtctgtcctcaccaagggatgggggtttggggaggagagtgacattttcatcattagcttcggagaagcttcaagcccatcctgtccccgctactgcctggccccttgctgactcaggctgcactgtttgaagaggagcagagaggctggcactaggggccactggggggctggggtctccaggggatgactgttttcaatctctgggccaagatcacatgcaggataccacgggaaggagccatctccactctccttctccagaacccccttgaagggcctttgggaccattagtccatttccattttacagacaaggaaatcaagacccagcttgggggaaaagccacccctggagtcacctgtgtgttcagtggcacccccagcctgggtcccctcctcccaatagaggctgagccggagccagggcagtatgaggtggggctgccactgcccatacctcctcctcccttctttctttgaagcctaatggccccccaaaagatgggcaggacaagctgtagcccatctgagaggttgggaaactgaggcccagaaacaggaagtgactcacacaagacccctcagcaagggtgcaaagggggaagaactaggggctccattgttcttcaggcgacaggagaccgttgctccagtgcatgtctgctgggacaaggattcctggcctcgaagccctgggctgcacagccctactgggctccacctctataaaccagtgacttctctgggcctgggtctgggggagagggttgccagggagactcagctctccttgggggctggcccagctgactgagggtacacaggattgggtctagaccttgatgcctgggtggagggcccttgtaaggggccatagcctcttcaggaccaactggagggagagttaggaaacaccagctcctgcctggggcagtgagggaatgggagcagctgtgggcgcctcatttcaggcaagtcctccccaaaccttcagatgcagtgagacctggccttcctgttgtgcttttcagactttgttttcagaatgcttttatctcgagtgtgcccttcggcccttacaagagcccctggggagtaggtggtggcctgtgccgtcatccccatttcaaagcagggagctgaggtcctgggaggggaaagtgcttgcctgaggtcccactgtgttagtgggtgggcaggactggaactcggttctccaacagcccagagctcactcttttacacccagaggtggagcaggtggcttagggggtggttatgtacttcacaagccaattcccttcagccaggagctcctgggtgcatttccgtgtcagaaacagtaccgagtcccaccccctctggaggcacagctgttgcgtcaggcaaggtcacctgcatttatttattgagcagcagtgctgtgtcaggcccagggaccgagcccctctccctgttcccctatggtgtctccgaggccctctgggagggccccacatctggagcagcacctcagagtggacagaaagcattagcgtccacgagctcacccgacgccgagcctgtgaggtgggctgatggtgcccgtctaacccagcgcttcagggaggtcagaatggagccgaacccagggctgtgagcatcacctctggagccctttcactttatgactgcttcctggacgggtggtgggaaggcaggagcctgggtccttaggctgggggcctctctccatccacccacctttccctcattccctctcttggagcagcagccgcccaggcctttagggagggagggtttctggggcccttgggttggagtggggtcgcgttgcattgtgttcatgaccatgtagctcatgttgaaattaaagtttttggcttttct

SEQ ID NO: 204 - DNA, 1645 bp, Homo sapiens
catgtgtgcacatgcatgcacataaacaggcaagcacacacgtacacattacacacacaagcaggcactcatgcacagactcatacacagggcacgtacctgcacgcacgtgtacacacacacacgcacaggcactcatgcacagatgcacgcatacacagggcatgtaccttcacacacgtgtaaacacacgcacaggcactcatgcggatgcacgcatacacagtgcaagtacctgcacacgtgtacacatacacgcacatgcaggcactcatgcacagatgcatacacagtgcacatacctacacacacgtgtacacacacacacgcacaggcactcatgcccagatgcaaacatacactgcacatacctgcacacacgtgcacacacacacgcacaggcactcatgcagacgtatgcacagtgcacgtacctgcacacacgtacacacacacacacacaggcactcatgcacagatgcacgcatacacagtgcacgtacctgcacacacgtgtacatgcacacacagtcccgtaaatgcacgcttacatccgtaatactgatgaagtctttcaaacaaccaaccactctacagcacgtttttagactctcagcaccaatttatacgtaagcttaaccgccttgtcctccaatcatccattaaaggatggtaagttaagcattgtaaatgttattattcaaagttggtttgatctcccagctcgggggatgctgtgttacctgtgcgccccgggagtaggagcggaatatggtacaaaatcttccctggcctgaagtatccctggaaaagatgttggagaccattaagaagaaaccagtgcttcttcctgacaacaggttctggaacttcagagccacagcaagtgcaccacacacccgccagtcagcagccaccacgccgccagcgtgagaccccaacaaaactttccaatgtccccgaagggatccgggtgttgggatgtcctcccaggctcatgctcttctctgtcatttaaaaagtcaaactagaaaaaatagtgacggttttaacataattctcagatatttaaatacattcaatgtaggctttaaaaaacttgttgaatctgaagataaatctatgcagtaaggagtgtgggtctacaccaggggagagaggccggtgggatccctgctcttccagttcaactgtaagagctcacatggagtcagcccttccagtgtgcccctaagaggggagggatacagggaactgcctggcgtgagctgcaggcagggcttgagttctcagatgacggcacacgcagcaggtactgggacccacaaagaccagaacggagctccaagaaacaaatgaaaggccgggcttggcggctcacaccgataatcccagcgctttgggagaccgaggcaggcggatcacccgaggtcaggagttggagaccagcctggccaacatagtgaaaccccgtctctactaaaaatacaaaaattagctggacatggtggtgtgctcctgtagtcccagctactcggaaggctgaggcaggagaattgtttgagcccggcaggcggaggttgcagtgagctgatatcgtgccactgcactccagcctgggagacagagtgagactctgtctcag

SEQ ID NO: 205 - DNA, 4051 bp, Homo sapiens
gcgagtggagctctgaagaagctctgagcggagttgtgttcttccccaggtgcgtcctggctgagagttggagctctccagcaacatgcctgagcagagtaacgattaccgggtggccgtgtttggggctggcggtgttggcaagagctccctggtgttgaggtttgtgaaaggcacattccgggagagctacatcccgacggtggaagacacctaccggcaagtgatcagctgtgacaagagcatatgcacattgcagatcaccgacacgacggggagccaccagttcccggccatgcagcggctgtccatctccattaccagccgacagtccttggaggagctcaagcccatctacgaacaaatctgcgagatcaaaggggacgtggagagcatccccatcatgctggtggggaacaagtgtgatgagagccccagccgcgaggtgcagagcagcgaggcggaggccttggcccgcacatggaagtgtgccttcatggagacctcagccaagctcaaccataacgtgaaggagcttttccaggagctgctcaacctggagaagcgcaggaccgtgagtctccagatcgacgggaaaaagagcaagcagcagaaaaggaaagagaagctcaaaggcaagtgcgtgatcatgtgaaggcccttcctgcgggaggagcagctgtgtgtccccggcacctcactcccccaaaatgacacccaccgtcgtcagggtagcatgtataatgcccacgtgttaaacattgcatttaatcgagatgcgtcctattgtccttaagagggcgtttcacaccaccaacagtaagccacccactctggagtcacagaatctgccaggcggttcaagtgaaaaccaacacactcagcatccctgggaactgagaggtgccagcaattgctgaaggtggcgatgaacacccgaaggtgggagggaggactggtacccacaaagcaacatgtaccgagaggactaaatgtcatctacgtgcatgtgagagcgtgttaacctagagttacctgcaccaaccccagacagaagccaatcacatctttgggggaggggaggggcaggaagaggtgagaagatcagatggtccaaagtggaccacacttggtccattttacacttttttaaaggggattaaaaaacacagcctctcccccaaagggtgtccgttcttaattcccacctggcctgttaggagccttgctaccctgaggggatgtgttcaccttacctagacctagttaggaagtatcattttaagctattagagtatttatcttcatgtgcagggataagtgcactaacagtgtgctgctctgtcggaagttcttcagtttttaagtgaggatatcgtgacagtattaaaacatcgcaataatgttcctgtgtgttatacatcgagggttttagaaatgtgattttcttcttttgacctgtgaggagtataacttctttcagccctcagattttaaatacaagcaaataaactcactatttttagacgtttttttcctccaaggtggttttcttctcttaaataactcgatctgtacccagctgggtagcagccagcaaaggccatcagacaaccagaagcacatccatttttgtagtgtcacaaacatgtatatgccacactttgcaccttaatgaaatactttgaaacagaagttattcactgtgtttttgatgatctatctgtattggaaatatgttcctggaaaatgcatttaaataatagtaaattctcttgcatgttccattatacgtgtcttctaagagctgttcaatacagtattcactctagaaacaattatctttttctcttaatgattttgtgtgcatctttaatctttcaagccaaattacagctatttcaggtttcctgtgttagcttggggataggatggtggctggagacaggcaggcttctctgccctgggaagagcccactcagcttaattgctctgccatcgtagagcctggttggacttggcttcctgaaaactcccactgatagtgcctgttagatctcctgtttgtttcagttggcagaacatttactggccccaactgtggcatcatcctctcagcagtcttcctgtcacccgcctggcaggcagaaggagctgcagtcctacgtgggcctgcctgggggggtgggggctgcatggctgttgggtggcagtgtcagcacagggagggcttaagttggggatgtttgaccaggccacctcctgcaactgctgtttctcctgtccctcctatgcagggcttgcagcagcagcagtgtggccatctccatcccccaaagcacacttgctctctcaatatgtcctagttttcttcagccttttctggttcagttcccttgtcctgatctcatcctctctggtctcccaataactcacccttgggatgtgtttagagcgtgggaggtgcctttgagaactgcttgactccatgatctcctagaacaaaaccgccctgactttacagggggaacactcatgctgagctgagaaagcagagaagtggcgtgggagccagctgggggtgaagagcatttgggccagtcccgtggcccccttcagattcctcaagcaggattgttctgttctaaaaagctgttgcacagcattcgcaatgagatctttagttggcggattttctggaacatttgtttttcaacttgtcccgacattttttttctgtttctattctgagagagagatgatcaagttttaatttgggtataggttaaatggaagaagaaacagaacttcatggccaaagtagacctatagattttgattgggttctttgttaacagtagaatgcgatctttgccactgactgtagtattaataaggttttaatgtgagatattcctgcaaaccatcccatttctactgattgtaagtcagaatttcttttatccctttcaaatcagtttctacatgtttaagtgttcagggcttcatcagcatgagaagtttgtaattactgaaagtctgatttcattcaggacacattttttccttcatattttttctgtgaatttataggctaggaaggctattgaagcctcaattatgggtcttcattttgagatcgttttctatgagctgaactgaggatatcaatggttatctcaaaatcgtcttttaggagatccccaattgactcagagtttgaggagttagtatcacagaattagatttttttaaagcatttgtacgtttccattcccaaatatgtagctgtggttcttgaaaacacatcctacattgcatatgggcatagcagtttttgacccaggcagaataagttaatatttaattaaatattgctttgaagatggcgctctgggcatgagcatggggctccatgacttcccttctatccccatgagcccctcctccatccagcgacaagccatgggcatgcatacaatgcagcaagaccaacacaagagcaatattgaattgttcattctatctaaaattacatgtatataaaatatataatttatcttcctgcatttttgaagtataaagtcataaattgtacatatctgtaagctagtatatttgtttcactgtttgtaatatttaagaaatgctcattctttgtagaacaaaaatgtattaaatattttaaaaattgctctgtgatacttaatttttttccccaaaatttgtaatgtgttgcttctacataagttctctggaaatatctacaactaataggacacatgtaaatccttgaagacacatcctggaattcataccccacaaggacagtgtgtatacaaagtatttgcagagcatgacttttatatgtgtgggatatcaatgtgtatatttatatttaaagtgtatttattgttacaagtctattctctattatattttatttactctgcggttataaaaatcacccttgcatacaagtttctagttgccagtgatgttctggaaataatgggagatattacaataaagctacagttatgacaccctg

SEQ ID NO: 206 - DNA, 3455 bp, Homo sapiens
ctacgcgaggaagatggctgcatcccagcagcaagcttcagcggcttcctcagctgctggtgtatcgggtcctagttcggctggcggcccgggtccccagcagcagccgcaaccgccagcacaactggtgggccctgcccagagcggcctcctgcagcgttataagatgctcatcccgcagctgaaggagagtctacagaccttgatgaaggttgcggcccaaaacttgattcagaacactaacatcgacaatggacaaaagagcagtgatggacccatacagcgctttgacaagtgcctggaagagttctatgcactctgtgaccagctggagctgtgcctgcgcctggcgcatgagtgcctgtcacagagttgtgacagtgccaagcactctccaacgttggtgcccacagccaccaagcccgacgcagtgcagcctgacagcctcccctacccacagtacctggcggtcatcaaagcccagatttcctgtgccaaggacattcacaccgccctgctggactgtgccaacaaggtcacgggcaagacacccgcaccacctgctggccctgggggcactctgtgaagtgggggacagggagtggggcaggcagtggttggtgggtggtgtgcaaacggaatgaagagcgtcctgggcctaaacacagcagcctcctctcttcctgcctgagcaccgcagcgggagccagcagggggcagcagaggccaacagggagctcgcaggccgggcccctgcgtccctgccccttcttcctgctccccctcctagcctagggtagactttgaactgtgtgtgttgatgacttctctgttccacaggccctcccccattcttgcctgggtgtggagccctggctgtcccctctccctcagtccttcctgactgtctccagctgggaggtggtctctgtgtgccactcctctgtgtctctattacagttgtgtctctctcatcctgtctctttttcccttgtttctctgttcctgttaatgtgtttctccccatggtcctatttctctcactctgacctctctctcttagtcccctttagctgtcttctatccccagctcctaactgggactctgtgtctatgcagggggccagcacccctgggttatctggggctaagggaagggacttcatttccaggggccacagccaagcccagagtcccccagcggctcgcatgtcagcccagaccccagggtccttggcctaggagaggagcagtggaggggcccaggctctgagctccacaggtctgagctgggagcaactcaggcccccacccaagcctgcgtcagcggaacttgagtgaggggcgttgtgcaatttgtggcaaggctggcccagctggatgcctgggtcccagtatttttagccccaaaggagaagtgaaaaggccccagccggggtgaatcatcagtcctggggaagaacccaggcgcctgagccccagctccgggaagcaggcactggggagggggcttcaaggagggagtgccccctcagactccctgcttccctggaagcttcaggaagctcagcctcagccttcaggcctgagcaagtgcagggcggagctaccagcccaggctcagatgttggggtgtgaaagcctcaagtgactcagcctggttggagaactgccccacccagtatcttctgtgccatggttcccacattcgcactccatggcctcctgtcctggaccccacgtctgcaaggaaaccctaggaccatggatacctctgtgattcacgctgagcccaagtccccacactggaaaactgggaaatggccagctgtgtgtcccaggaaattcctccccttattcttccttgaagtgcccgagcatgtagggcaagaaggaaggctgaagcgctgtccctaggaggaatttctccttcagggaagcctcagttttgcccatttatctaattgaatcagttttttacccaatcccccgattttgtaggataatctcccttatctaaagtcaactgattatggactttaatcacatctacaaaacacttccatggcgacagctagatgagtgtttgaataactgggactgtagcccgtccaagttgacacataaaactgaccatcgggccgggggcggtggctcacgcctgtaatcccaacactttgggagcccgaggcgggcggatcacaaggtcaggagttcgagaccagcctggccaacacggtgaaaccccgactctactaaaaatacaaaaaattagccgggtgtggtggcacacacctgtagtcccagctactcgggaggctgaggcaggagaatcgtttgaacctgggaggcagaggttgcagtgagccaagatcacactattgcactccagcctgggcgacagggcaagactctgtctcaaaaaaaataaaaaactgaccatctagtccttgtcatctgggcacccacacacatctccttaaccacacttaatctccaaataagtacgataacatagtcatagtcccacccaacatgatgcagttatcttgcatacaactgaagacaactaaccctttccccaacagagcccaccagcagtggtggagatgtcggtccatgagcgcacacacaagactgagggactgtcggccctcccaggtggtgtcaacacaacatcacacacaggtgggggggcctgatagcccagcacccatgatacagggcctaccaatgcttaaaaccacacccagggagcccacagaggcactcagtgggtggtggggtgatggatacacatctatcaggcacagggcggaggtgggcaccactgagttgcactcagcaaacacattgggtatcttgtgcccaaggcctgtatttgtggagctgatgttctagtgagagacagtaaatgtgacaaaagtaaaatatatcagatggtgagaaaacagaaaaatgagatcagaagtggagatgttggggccaggcacagtggcccaggcctgtaatcccatcactttgggaggtgcaggcaggcagatggcttgagcccaggaattcaagaccagtccgagcaacatagcaaaagcccttatctgcaaaaaattcaaaaattagccaggtgtggtggtgcgtgcccaggttcccaggtactcggaggctgagaggtgggaggatgccttgagcttgagaggttgaagctgcagtgagctgtgatcgcaccactgcactccagcttggttcatggagaccctgtttttttaaaaaaagaagtggaggtgtttacaccagcaaaatactcattttttaagtgtaattaagttgaagatcaaaaaatggaaatgtataattaaatcatacttagcaaatctaacacatgaaatgtaacatctgcatatggagaatcgtgttactttattgaaaaacattaaaagtttgagaacttaagttgg

SEQ ID NO: 207 - DNA, 3151 bp, Homo sapiens
ctctcaataaactaggtgttgatggaatatatctcaataagagctatttatgacaaacccatagccaatatcatactgaatgggcaaaaactggaagcattccctttgaaaaccgtcacaagacaaggatgccctctctcaccactcctattcaacacagtattggaagttctggccagggcaatcaggcaagagaaagcaacaaagggtattcaaataggaagagaggaagtcaaattgtttgcaggtgacatgattgcatatttagaaaactccatggtctcagccccaaaactccttaagcttataagcaacttcagcaaagtctcaggatacaaaaatcaatgtgcaaaagtcacaagcattcgtatacaataatagacaagcagagagccaaatcatgagtgaattcccattcactacaaacagaataaaatacctaggaatccaacttacaagggatgtgaaggacctcttcaaggagcactacaaaccactgctcaaggaaataagaggacacaaacaaatggaaaaaaatattctatgctcatggataggaagaatcaatatcgtgaaaatggccatactgcccaaagtaatttacagattcaaggctactcccatcaagctaccattgactttcttcgcagaattagaaaaaactactttaaatttcctatggaaccataaaagagcccatatagtcaagacaatcctaagcaaaaagaaagctggaggcatcaggctacccgacttcaaactgtactacaaggctaaccaaaacacatacagaggccaatggaacagaacagagacctcagaaataacaccagacatctacctaggaatacaactggtctcgaactcccggcctcaagtgatcctcctgccttggcctcccaaagtgctgggattacaggcatgagccactgtgcctggcctattttagcctttattacctgttaatttctaaagccatttcacttagtcaatgtagatagttgaagtgatagaaatacagttttagagttttactccaaaattttatttaaaatttaatttgttgaatgccttcatactatcctgcctatacgactgaatttatagattttatgtaaacttagccaccaagttgtcaatgttttagacttacttaccatttctaaaatggatggccggccttccagttggatatgaacactggcttcttttccactttccattttcccaaaattacacaagaaatttaaacaatgtggatcagcttttatgcagtacttgaagggaatataaaagtgctacattaaaattttcaacattggaaaatatttttaaaatattttatatagaatttaatatatactctaatggcattttgaaaatcatctttccataaatatgaaattaaacatctgctttccttagtggcatttaaattacctttaaacaagacatgaatgtttgttttctaaattataataaagtatttaaactgcagcatatgttcttattatttgtattaacataatcttctgggacagaatttttaaaaaatgttcctaatcagagtcttgctaagttacgtattctttgtttgttgtaaaacatggatcatttcaaggtgatgactgcttctccagtttcttttcatacattcactaagctgaaaagaatgaaaattaacccatgccacaaaggctgcccaggtgaagacaacctcttggtgtcctgaagggtctggaacaatgtcttgttggcaaatagtgggcatttgttagataaaaaaatgaaactgtataacatttttttttttctttttgagatggagtcttgctctgtcacccaggctggagtgcagtggcgtgatctcggctcactgcaacctccacctcccggattcaagcaattctcctgcctcagcctcctgagtagctgggattacaggcacctgtctaatttttgtatttttagtagagacggggtttcactctgttggccaggctggtctcgaactcctgaccttgtgatctgcccacctcggcctcccaaagtgctgggattacaggcgtgagccatcacacccggccaacatgtttatatatgggatagaccctgggtctatctcaactttccaaccatgcttgttccttccacgcaagaatactacctaaacttgtcttctctcttattattgaagtgacagctcaaacccattgacttgattttaagtgtctcacttctctgttggaaagcaggaactacaacctgaaaaactgaaacttaccaatagcctcttatcagtcttggacaagaactggactatgcctttcaaggtctgcattgcactcttttgctgctctaatgcacacactctttgataattttcaaagtggcattctccagtagtagtctatgaagacagaaagcaagagaaatcttatctttcaacactggaaaaaacagcaaaaagcaacctggttttaaaagttccagtagcttatctttgctaaaatatatcaagtacctctgaaattgtagaaatttttttgacagatttgggagtgattaaatgtctgtggcagaaacacaaaaacccagccaaattacagcaggttggatataggttctaagctgataaaatggccttaaccttgcagaaatgtgaaaaatgatattggaacattagcatgacattaaatatttctttgcctttataggcgaaacaatataacaccatattcttctctctaaatctggaatttaaataggatttttaaaaatcagacctcaaacctatttagtagatttgttgacttttgtcttcaacctgttaagctcaaaacaattctgatggaaccatcagtgcaagaatatcggttcttaagaagtggtttgaatagtgcttccttaaaaaaaggctataatcctcatatttgcacagtagtttcaagttttatgaagaattctactaatagaagttacctctataggtccatatcacacaacaatgtatcttaaaataattattcaatggagatggtagaatatagttctgttatttaaatcaaatgtaaaagttgcactgtaactctacagttctaaagaaatgtataatattcaaagcataactcaataaatgcatggtgaattc

SEQ ID NO: 208 - DNA, 3902 bp, Homo sapiens
tcaacctagatcccttgcatgcgtagttcacaatagtgttcgcatgcctatgaaaatctaatgccccttgcaggaggcagagctcaggcagtaatgcatgcttgcctgctgctcacctcctactatgcagcccggttcctatcaggccacagaccagtaccagtccacagcccaggggctggggacccctggggtgtcttctggctcctttgcactacctatgccaccaggcttagcagcagtcctagaaacaggtgtatcaagaagactctgctcctggtgggctggggctgagatggcagaggcccatcccatcatatgccagaaagaggacacacttgtgagtccaggacttgggactctacagtttgcagctctgctcagactggcttctgggcagctcctcactttgccattaactcctcagagtcaagccccagatgccccttggaccagccccactcctagggtcatctggtcagggtctgcaggggtgacgctttcactgacaaaaggattttaatttttgtcctatccctagtgtagtcccagccagtctttggtagtcacccacttttcctgctctgacagagatgggccagcccctcacataggggctgctcccgggaaaggctcatccacaggctaggcctctgccgggcctgctgccagccactgagcctttggcgattgagagctgactcccgactgaggtgtaggcctccgtccagccagcacaaagggaggcacatcccttgcagcagtacccacagcccctgtcacggcaggctgtggccagaccctgattgagtggctccctctcagccatctgttcagtcacccagaaacaagtcaagtcaaagctcccagtgagttcctgcctcagccatttggtgtcacaaggaaagccagggcgttgccacttcctgatttgggacaagatgtgtaaatgcattgagcctcagactccttatctgtagaacttggggtaatgataactacttcatggtgttttaagaattccatggaatcacagatggaaagagcctagatgtactatgcctgactcgttggagacttcacataaaagggttttcagctgctgccacccccatcttttaagtattttcacaattccatacacctggtcctggcaaaaagaatttcattccctgttcacttacttgaaaacccctcttcttttttttcgagagagagggtctcactgtgttgcccaggctggagtgcaatggccaaatctcagctcactgcagcctcaacctcccaagtagatgggactacagatgtgcaccaccatgcctggctaattttattttttgtgagacgaggtctcactgttgcctaggctggtctcgaattcctggactccagcaatcctcccgccttggcctcccaaagtgccaggattaaggcacgagccaccacgcccagcctgaaaacccgttttcctgagggaaaactgttctggaagtcaacagcagagtcgcttgccagggccacttctaatattgatgagattctggcctgtgctcccctccctcatatcttgtgtagcattgtgactagagattgggtaaaaagggaagaccttgccaaatgttgcccacctgctaccctctccggctgtctgctgacgttggccacttgagtctcttgtcactgactgtgcccacccttggcccctgccagcatcctccacacaccttgcccacaggaggacagctggagcagggccacaggggagggcatgcaagggacctatctgacaaggccctgaaacttccttcccactgaggaccccaggacttgacctagtcatcccccactttgctgccaatactttgggagcaggcagatgtccaggaagcgtctgttcctctgtaccctccctgccaaggaaggagcttgagaaaaatctcttgaaggtagagcccctgcttctggcctagctctcccggaggcgcagggctgacgagtgccgccaaggtaagaccagctctggagtgtgggatatacaggccttcagtggcaacacctgctcattaatcaagcccttcctttccggaacctgccctggcttgggatggtgggaaggaaggagaacagaatctgttcctcccttcctggccctgcggtgagaggcgctgactagtgtaggtgggtggagacaggcccatcagaaggcctgagtgaggcaccctctgtacatgcagcacaagcgggtgtggagtgtggggaagcatctaaagatctagaaaaatttggcagcaaaggaattttacccacacactggagccctaggctttgtttctaaaagtttttattattctttaggaaaacttgggaagcactagtttatgaaaatttttagaacttcattgctacatggcctttccaaacacatccccagatggtttctttaaaaccatgcagtgggacaaggttgatataaacagttgttccagctgaatccaactcaccaaaacggtgcaggtgaggcaaattacttttgagactgcaagtactgtatatgtccattaacaaaaacacagtaaaagactttaagaaattgtaaggacactggcttgactgattcatgcggctgcaaatccctgggagccaagattcaaaggcagaaatgtctgtggtgacagcaccaccactgcctttgtccaaattacagatctgtcacactcagagcttgctgctagcatggggctgccgtcggcagcaaagggaacttcatggatctgtgaggaggaacagctgagttcctgactgcctttaattttctctgaggctttgctgagtcacctaatctcttggggctgtggttttctcacctgtagaaggagggacagggctgatatccctagagtgcctttcagctctgggattcacgcattctaaggagggtggctagagcacagaacctctaaagatgttcattcattccttcaacaaagtttacatgagcacctgccatgtgctaagcaccagggccgaccactggcccaaaaacacaggcatctgctggcctgcccactgcagcagcagccatacctttgcaggccggtggagcccccctttctacagcctgtggaaaaaatggttctaaatttgcagatcctctcatcaaatcaggaagtcaagaaacatgatagaatagaggaactggtctcagtttgcacaggccatcagtttcacaagacaggaatcgaatatcaacagtggctgattatcacactcaggaattgaaaataattagaaaaagaggcaaagatgctgtggcaatcattggctggtcccctttggtctccagcacccattcccctttggtttagtaacagcaccctaactttcctccctatatcgtgtgataacagaagcactctctccaggataccctccctgagagacaggcatatgacctgagccagccaatcagactccttccctgcaaggatgcactaggtggacagcatggtgggagcatctctcatccaggcaggggtgatctgtgggactgcagtcagtcctgttgcttagagaccccaggactgccatagcttctgtcctggacttgattctccaggctaacagagaacctgactgatgcagattcaggagagctggtttgtttagttctcagttcctttcatgaaatggctattatctctgctagctactatagcagaaatctggaaaacatgatttttcttgatttgtgaaattgttgatgtttcttcaggaatttccgcctgcttctcataaactggcagaaacttagaaatgttacatttcttaaagagagtcattgtaattattatctgaataagatgatagtgttttgaatttaacgtaataaactctatctcctg

SEQ ID NO: 209 - DNA, 3539 bp, Homo sapiens
tattgtctttgggtacatgtgaaagatttccttacataatttattttttaatgatgtatgttgtatttggatcagttacaatattaaattgcccttaatagattgagtatgtatagatgccttagatgttgtagttgtcatgcatattgaacactggaagacttaattttctttttatagactaaaattcccattgtttagtaaggatcatttacatttaaacagtaactatttcgtgattttgtttggtttttttttgatagagttttgctcttgttgcccaggctagagtgcaatggcacgatctcggctcactgcaacctctgcctccagggttcaagcagttctcctgcctcagcctcttgagtagctgggattacgggcgcatgccaccacactgagctaatttttgtatttttagtagagatggggttttgccacgttggccaggctggtctcgaactcctgacctcaggtgatcggcccaccttgacctcccaaaatgctggaattacaggcgtgagccaccacgcctggccactatttcatgtttacctgtacttggttactcaaattgctggggcaaggtaggggataatgttattgactggcagacaaaagggttgttggcaaagggggagaaaaagtgcagaaataggtttatttgtttacccagtgggttttagaaacagtcccactttttaggcatggtacgtatggcatgacagaaaattgtagagaggcagagtgcatggtagattttaacttgaacatgttttaagtatacataatcttttgctgccatgttattaaaacttaattgaactacttagaattggccgcaaaagaagatatacttatttggaaaatggactttggctgatttgttattgatttcattctattttgatgtgaaaccgctttctatgtttagaacatcgggtcagaagttgagatttccactatcgagaaacaacggaaggagctgcagttgctcattggagaattaaaagatcgagataaagagctcaatgacatggttgcagtgcaccagcaacagcttctttcatgggaagaggatcggcagaaagtgttgacactggaagaacgttgcagcaaattagaaggtgaactacataaaagaactgaaataatcaggtcactcacgaagaaggtaaaagctcttgaatccaatcaaatggaatgccaaacagctctccaaaagacccaactacagcttcaggaaatggctcaaaagtagagagagaaaagaggaaagatgaattgcttaatattgcgaagtcaaagcaagaacgcacaaattcagaactgcacaatctgagacagatttatgtaaaacaacagagtgatctgcagtttcttaatttcaatgtggaaaattctcaggaattaatacagatgtatgactcaaagatggaggaatcaaaggctctggactccagcagagacatgtgtttatcagaccttgaaaataaccacccaaaagtcgatattaagagggaaaaaaatcagaagtcactgtttaaggaccagaaatttgaagccatgttggttcagcaaaataggtcagacaagagctcttgcgatgaatgcaaagagaagaaacaacagatcgatactgtgtttggggagaaaagtgtaattacgctgtcatccatattcaccaaagacttagtagagaaacacaacctcccttggtctctgggaggaaaaacccagattgaacccgaaaacaaaattacattgtgcaagatccacacaaaatcaccaaaatgtcatggcactggggttcagaacgaaggaaaacaaccctcagaaacacccactttatctgatgagaagcagtggcatgatgtcagtgtttacctgggcctgaccaactgtccaagttcaaaacatccagaaaagctggatgtagaatgtcaagatcagatggaaaggtccgaaatctcatgctgccagaaaaatgaagcctgtctgggcgaaagtggcatgtgtgactccaagtgctgccacccgagtaacttcataattgaagccccaggccacatgtctgacgtggagtggatgagtattttcaagccttccaaaatgcagagaattgtccgcctcaaatctgggtgcacctgttcagaaagcatctgtggcacacaacatgactccccggcaagtgagctaattgccatccaagattcccactctttgggttcttcaaaatctgccttgagagaagatgagacggagtcctcttccaataaaaagaactcacctacgagtttgttaatctacaaagatgcaccagcattcaatgaaaaggcttcaattgtgttaccctcccaggatgatttctcgcccacgagcaagctccagcgtttgctggcggaatctcgtcagatggtgacggacctggagctgagcacactgctgcccatcagccatgagaatctcactggcagtgccacaaataagtcagaggtcccagaagagtcagctcaaaaaaatacctttgtcagttattgaaggaaacaaaaggcaacttcagtattcatcgtgatcacgaatttctcatctatgtggaaggcagaaagcagacaccaatactgaatgaatacttaaccgtaaaactgaaagaggattctagttcttcataaacggcacttaattccagctgggagcagaactagaaagttaatttttaaacatctacacttcattttcaagttaaccatttttgtgctgaagaaatattttcatgtgtaagaaagtagaccttattgtacatatagaaagttggaattatgctaagaatgaaaaagacttctctgtaaagatacggactacagttaaatgctagagaagctctttaaaaatgtgaatgtcaaatagagaaagaacccctgcatagaaagtgctgttttaactatctgatttttaaaaaatctgtgcatacatttaaattctaaacaatagcttatcagagtcagctcaaaatatatgagaaacagtattctctcatggttttagcttttgactttgctgtgtaaatagacataaggtgctttgatataaaatataaaatgtaactggaaaatagctcgaggtccttctgtcccaagctgagcagagccccatctttctgggtctatattagtcccacctactgacacaaacaaaagcttgctggaagatcgagttttagacgcatttttaaaaatcttaaagactaaaacacttccattttaacttgtaaagtaatttaattttttaaagattatactatatgcctctgtgtcttctctaaaagaatagatcaacttcagtccataaaagatatttttaatattaaagaaaaaatatgtttccttggtttctttttattttacaggagtaaaataaggaaggaacgttcatcactttaaactgaacctggcaagttaatttcctcgggaatggggatgtatttttttaagcattgcagatatcaaagttctattgtgctgaataaatgcccctttgtt

SEQ ID NO: 210 - DNA, 3882 bp, Homo sapiens
ggttttaaatttttttttttgtagagaatgggtgtcgctgtgttgttcaggctgatctaaaactcctgggctcaagtgaccctctggcttcaaagcgctgtgattacaggtgtgagctgactgggcccggcctcaaatgcctttataatttaagaaatggctctgaaaaaaaaggaaatacgtgatgtgggccaaagcagcgaacgtgtgaggtgggcctgaggaaaggtcggagctggagtcccccacagggacaggtgatgttgctttgaagtgaatgagatgcgtctgaaaaaaataatctcagagttgcctgggcactagaaggggcttcccttgccccctcgattcctgcttctactccccgggctggccctgccctggaaaccacacgagggtggcccacgcatccgtcagatgtctggggaccatgtacctgctaagggaggggaggacgaggcagggacatggggatgtatcagggtcagtcatcgtgccacaacccccagcccccagggaacacgggatgggcagcatttttactttaaaatgttgcctcatctagaggggttttccaccctgttggtgctggctttggggagatatgattttatttgatttatgtatttatttatttgagatggaatttcgctctttttgcccaggctggagtgcagtggcgcgatctcggctcacggcagccaccatctcccgggttcaagtagttctccggcctcagcctcccgagtagctgagattgcaggcgttcgccaccacgcccggctgattttgtattgttggtggagacggggtttcgccatgttggccaggccggtctcaaacgcctgacctcaggtgatccacccgcctcggcctcccgaagtgctggaattacaggcatgagccaccgtgcctgaccgagatgcaattttagagcccaggaggccaggctgctatttcttccaggagtgatttcccaaaatggacctggagctgacaggttcctggggggacttgtggggggaccttgtgcccactcggtcgtgcatctactgtccccacatccccatcgccagaaggccagcacccacctttctgccacattttgggaaccataaaaggacccagattggagacttgttgagggacaggcctgtatgaactcaatctcaccaccgatagccctgccaccacgggagcggtggtgaccatctcggccagcctggtggccaaggacaacggcagcctggccctgcccgctgacgcccacctctaccgcttccactggatccacaccccgctggtgcttactggcaagatggagaagggtctcagctccaccatccgtgttgtcggccacgtgcccggggaattcccggtctctgtctgggtcactgccgctgactgctggatgtgccagcctgtggccaggggctttgtggtcctccccatcacagagttcctcgtgggggaccttgttgtcacccagaacacttccctaccctggcccagctcctatctcactaagaccgtcctgaaagtctccttcctcctccacgacccgagcaacttcctcaagaccgccttgtttctctacagctgggacttcggggacgggacccagatggtgactgaagactccgtggtctattataactattccatcatcgggaccttcaccgtgaagctcaaagtggtggcggagtgggaagaggtggagccggatgccacgagggctgtgaagcagaagaccggggacttctccgcctcgctgaagctgcaggaaacccttcgaggcatccaagtgttggggcccaccctaattcagaccttccaaaagatgaccgtgaccttggacttcctggggagccctcctctgactgtgtgctggcgtctcaagcctgagtgcctcccgctggaggaaggggagtgccaccctgtgtccgtggccagcacagcgtacaacctgacccacaccttcagggaccctggggactactgcttcagcatccgggccgagaatatcatcagcaagacacatcagtaccacaagatccaggtgtggccctccagaatccagccggctgtctttgctttcccatgtgctacacttatcactgtgatgttggccttcatcatgtacatgaccctgcggaatgccactcagcaaaaggacatggtggagaacccggagccaccctctggggtcaggtgctgctgccagatgtgctgtgggcctttcttgctggagactccatctgagtacctggaaattgttcgtgagaaccacgggctgctcccgcccctctataagtctgtcaaaacttacaccgtgtgagcactccccctccccaccccatctcagtgttaactgactgctgacttggagtttccagcagggtggtgtgcaccactgaccaggaggggttcatttgcgtggggctgttggcctggatcatccatccatctgtacagttcagccactgccacaagcccctccctctctgtcacccctgaccccagccattcacccatctgtacagtccagccactgacataagccccactcggttaccacccccttgaccccctacctttgaagaggcttcgtgcaggactttgatgcttggggtgttccgtgttgactcccaggtgggcctggctgcccactgcccattcctctcatattggcacatctgctgtccattgggggttctcagtttcctcccccagacagccctacctgtgccagagagctagaaagaaggtcataaagggttaaaaatccataactaaaggttgtacacatagatgggcacactcacagagagaagtgtgcatgtacacacaccacacacacacacacacacacacacagagaaatataaacacatgcgtcacatgggcatttcagatgatcagctctgtatctggttaagtcggttgctgggatgcaccctgcactagagctgaaaggaaatttgacctccaagcagccctgacaggttctgggcccgggccctccctttgtgctttgtctctgcagttcttgcgccctttataaggccatcctagtccctgctggctggcagggggctggatggggggcaggactaatactgagtgattgcagagtgctttataaatatcaccttattttatcgaaacccatctgtgaaactttcactgaggaaaaggccttgcagcggtagaagaggttgagtcaaggccgggcgcggtggctcacgcctgtaatcccagcactttgggaggccgaggcgggtggatcacgagatcaggagatcgagaccaccctggctaacacggtgaaaccccgtctctactaaaaaaatacaaaaagttagccgggcgtggtggtgggtgcctgtagtcccagctactcgggaggctgaggcaggagaatggtgcgaacccgggaggcggagcttgcagtgagcccagatggcgccactgcactccagcctgagtgacagagcgagactctgtctccaaaaaaaaaaaagaagaggttgagtcagcagggacttgggttccctgtgtgtgaggggggcattcttgcctgccagctgctcccgaggtggccttgagaaggaagaagcaggatgacagagcctgagcagcggaaccagcctgcaccctcccttctggcccagcgacctgggctgtggctgagacaataatgaggccagaagtagccggagcctgtcaggaagggcaggggaggactgtggggtctgggctctgtcgctgtaaccatctgctcccaggctgtgtgcagaaaatggcatttacactattgtgcagctcattctcatgaaatactgccattgttgctaaataaagcttgtgtgctctgaatat

SEQ ID NO: 211 - DNA, 3891 bp, Homo sapiens
ttatgagagaaaggcagagggagatttgacacacacaggaggggccacgtggagacagaggtggagattggagaaatgtggccacaagccagggaacaccagcagccaccagaagccggaagacgtgaggcagggttcttcccagagccttcgctgctgagtctgggaatttgttaccgaagccataagaagtgggtacacgccctgagcctcccacacttgctcacctgtcctgagatgagaatctctactctgcagcatatttggaggatcactgcgggggccacagaggtgctgttcagatggcacttcagaagactcaggagaccctggggcaggagcagtttgactgacagcccagagggctgccctctgattccacctgaggccctgcttttcctggctgcaggggttccagggccaggccatttccgctggcgcaggactctgctagcagcaacctgcctgaagtcttcctttggcctggctgagagtttctgagacctgcgctggagcggaggtgcttccttccttgcttcctttcttcctctctcccttctccatccagcaggctggacctgcctggcatctgtgagctctccctactttctcctataccctaacctttgtcctgcatgggcgactcccccagtgagtctcttgcagcttttaccccagtgcctgcttcttggagaatccaaactgatccagttagggatgataaagtgtagggtaggtgctcggtgactgttttctctgaggttgtgactcgtgtgaggcagaagcagtccccgtgagccctcctggtatcttgtggagtggagaacgcttggacctggagccaggaggcccagacatacatcctgtccgagctgcagcttcctgtctctaaaatgagccggccagcgcaggtggccagacatcactgttattctcctttgagtctttaaatcttgttgtctttcttgcagactcggtgagctgtgaaaggctataataggggctttattttacactttgatactattttttgaacattcatattattgttagatattgatattcatatgaaggagcaggatgacttgggtccttcttggcagtagcattgccagctgatggccttggacagttacctgccctctctaggcctccctttccttgtctatgaaatacattatagaataggatgtagtgtgtgaggattttttggaggttaaacgagtgaatatatttaaggcgctttcaccagtggctgggatgtgctctgtagtttctgtgtgttaactataaggttgactttatgctcattccctcctctcccacaaatgtcaccttggaaagacggaggcagcctggtggaggtgtatctcctagacaccagcatacagagtgaccaccgggaaatcgagggcagggtcatggtcaccgacttcgagaatgtgcccgaggaggacgggacccgcttccacagacaggccagcaagtgtgacagtcatggcacccacctggcaggggtggtcagcggccgggatgccggcgtggccaagggtgccagcatgcgcagcctgcgcgtgctcaactgccaagggaagggcacggttagcggcaccctcataggcctggagtttattcggaaaagccagctggtccagcctgtggggccactggtggtgctgctgcccctggcgggtgggtacagccgcgtcctcaacgccgcctgccagcgcctggcgagggctggggtcgtgctggtcaccgctgccggcaacttccgggacgatgcctgcctctactccccagcctcagctcccgaggggaggacatcattggtgcctccagcgactgcagcacctgctttgtgtcacagagtgggacatcacaggctgctgcccacgtggctggcattgcagccatgatgctgtctgccgagccggagctcaccctggccgagttgaggcagagactgatccacttctctgccaaagatgtcatcaatgaggcctggttccctgaggaccagcgggtactgacccccaacctggtggccgccctgccccccagcacccatggggcaggttggcagctgttttgcaggactgtgtggtcagcacactcggggcctacacggatggccacagccatcgcccgctgcgccccagatgaggagctgctgagctgctccagtttctccaggagtgggaagcggcggggcgagcgcatggaggctgcagctcccactgggaggtggaggaccttggcacccacaagccgcctgtgctgaggccacgaggtcagcccaaccagtgcgtgggccacagggaggccagcatccacgcttcctgctgccatgccccaggtctggaatgcaaagtcaaggagcatggaatcccggcccctcaggagcaggtgaccgtggcctgcgaggagggctggaccctgactggctgcagtgccctccctgggacctcccacgtcctgggggcctacgccgtagacaacacgtgtgtagtcaggagccgggacgtcagcactacaggcagcaccagcgaagaggccgtgacagccgttgccatctgctgccggagccggcacctggcgcaggcctcccaggagctccagtgacagccccatcccaggatgggtgtctggggagggtcaagggctggggctgagctttaaaatggttccgacttgtccctctctcagccctccatggcctggcacgaggggatggggatgcttccgcctttccggggctgctggcctggcccttgagtggggcagcctccttgcctggaactcactcactctgggtgcctcctccccaggtggaggtgccaggaagctccctccctcactgtggggcatttcaccattcaaacaggtcgagctgtgctcgggtgctgccagctgctcccaatgtgccgatgtccgtgggcagaatgacttttattgagctcttgttccgtgccaggcattcaatcctcaggtctccaccaaggaggcaggattcttcccatggataggggagggggcggtaggggctgcagggacaaacatcgttggggggtgagtgtgaaaggtgctgatggccctcatctccagctaactgtggagaagcccctgggggctccctgattaatggaggcttagctttctggatggcatctagccagaggctggagacaggtgtgcccctggtggtcacaggctgtgccttggtttcctgagccacctttactctgctctatgccaggctgtgctagcaacacccaaaggtggcctgcggggagccatcacctaggactgactcggcagtgtgcagtggtgcatgcactgtctcagccaacccgctccactacccggcagggtacacattcgcacccctacttcacagaggaagaaacctggaaccagagggggcgtgcctgccaagctcacacagcaggaactgagccagaaacgcagattgggctggctctgaagccaagcctcttcttacttcacccggctgggctcctcatttttacgggtaacagtgaggctgggaaggggaacacagaccaggaagctcggtgagtgatggcagaacgatgcctgcaggcatggaactttttccgttatcacccaggcctgattcactggcctggcggagatgcttctaaggcatggtcgggggagagggccaacaactgtccctccttgagcaccagccccacccaagcaagcagacatttatcttttgggtctgtcctctctgttgcctttttacagccaacttttctagacctgttttgcttttgtaacttgaagatatttattctgggttttgtagcatttttattaatatggtgactttttaaaataaaaacaaacaaacgttgtcct

SEQ ID NO: 212 - DNA, 3547 bp, Homo sapiens
tatttaaatgtgtacatttcaaagtgtttccacatatattaacttcattgatcctccagacaaccatgtagattggacacacccaggaaagatgactaaggaaggctattctttttttattgagacagggtcttgctctgtcacccaggctggagtacagtggcatgatcacagctcattgcagcctcgacctccctgggctcagatgatcttcctacctcagcctcctgagtagcttggattacaggaatgtgccactatgcctggctaatttttgtagagatgaggtttcaccatgttgcccaggctggtctctatctcctgagctcaagtgatctgcctgcctcggcctcccagtgctgggtttgcaggcatgagccactgtgcccagtcaggatggctattcttatgataaaggctaagatatttattcttctttcccgctttggaattcatatacctgagaactctatgattcaccctctcactactaattttagaaaacaagctgtccttttccattccctcaaaaacaataggagtccaagtaataaatgaacactaggaagtcatagcatcatatgtaacatgtttagcatcctccctcctgacatggatgctgttcacatgttcactgataaggagcctgagattcagagaggttcagtggtgtgttcacatagctgagactagaatccaggtctcctaactctcagtcttgccccctttctgccaatacagtgtctctcttgtatttctagatcaaggcaaagaggacactttgatagttctccccacacttgtgtgtccatgattgtgtgtgtgtgtgtgtgtgtgtgtgtgtgtgtgtatgttgtgggtggataatatgtaaatgcaagaactgtgatgtactcaactcagggtccagagggtgctgcagtgtggtgtttctcaaagtgcatctatggcttgtcaggttagggagagaaggcagcactcgggaccttgtccatttattctgaaaggaatacatgtaaaatagtcccataggggtgtcagaaagcttggccttaaggtcaaaagagcacaccctgaatacaggtttgcgcgtttgctggtgtgtgagctaacaaatgccactctcacacggtttctttcagtcccactgtggagcttccctgagggtgcccgggcaagtcttgccagcaaggcagcaagacttcctgctatccaagcccatggaggaaagttactgctgaggacccacccaatggaaggattcttctcagccttgaccctggagcactgggaacaactggtctcctgtgatggctgggactcctcgcgggaggggactgcgctgctatagctcttgctgcctctcttgaatagctctaactccaaacctctgtccacacctccagagcaccaagtccagatttgtgtgtaagcagctgggtgcctggggcctctcgtgcacactggattggtttctcagttgctgggcgagcctgtactctgcctgacgaggaacgctggctccgaagaggccctgtgtagaaggctgtcagctgctcagcctgctttgagcctcagtgagaagtccttccgacaggagctgactcatgtcaggatggcaggcctggtatcttgctcgggccctagctgttggggttctcatgggttgcactgaccatactgcttacgtcttagccattccgtcctgctccccagctcactctctgaagcacacatcattggctttcctatttttctgttcattttttaattgagcaaatgtctattgaacacttaaaattaattagaatgtggtaatggacatattactgagcctctccatttggaacccagtggagttgggatttctagaccctctttctgtttggatggtgtatgtgtatatgcatggggaaaggcacctggggcctgggggaggctataggatataagcattagggaccctgaggctttaagtggtttctatttcttcttagttattatgtgccaccttcttagttattatgtgccacctcccctatgagtgacgtgtttgatcactagcagaatagcaagcagagtatcattcatgctggggccagaatgatggccggttgccagatataactgctttggagcaaatctcttctgtttagagagatagaagttatgacatatgtaatacacatctgtgtacacagaaaccggcacctgccagacagagctggttctaagatttaatacagtgctttttttcctctttgaaatattttactttaataccagtgccttttcttgttgaacttcttggaaaagccaccaattctagatcttgatttgaattaatacacacaatatctgagacacttacacttttcaaaagatttgtgtatgcattgcctaattagagtagggggagaagggcaactattattatccctattttacaaaactgaggcttagtgaggttcagccacatgcctagacttatatactagttagtggtgcagccagggagaggactcagatttcctggaggcaaagtctatctctgaaactccatgaagacttttgcagccagttcccaccaatatgccccagacgtgagacaaacaaggacttttcttttatatagagccatccataaaatcctaagcccttttattaatgtataaccaggagaacatctgtgccaacggttggactttttatggctgagattcgggaggaagtgtgacaccaagcaggagaggaagaatgattttctttgtacttaggttttctaaggacattgttttaatctgtatcgtgccaaagttgtatcactgttaaacttctgaagacataaccagttgagtcttatttcaagatatgttctcaagccaattgtgtgcttctcttgtttctgtgattgctttctagccaaagcgaagcttgtacaggttgagtatcccttatccaaaatgcttggaaccagaagtgtttcaaattttagattattttcagattttggaatgtttgcatatacataatgagatattttgggaataggacccgagcctaaacacaaaattcattgatgtgtcagttacaccttatccacatagcctgagggtaattttatacgatattttaaatagttgtgtacatgaagcatggtttgtggtaacttatgtgaggggttttcccattttttgtcttgttggtgctcaaaaagttttggattttggagcatttcggattttggatttttggattagggttgctcaacccatattattggctgtacatcctggtcacttctgacttctgtttttactaatggaagctttgcaaattgaattctcagtgagttgtatatttatacacctggcttgaagccttaattgtatataatgatgctttttaaaaaatgctatttggaagactatttatttctcgtgtatataatgtatataaaaaaatatggttagtgtttacctaaggttaaccaatttcaagattaaaatttttaaatagtaaaataataaaaaattataaagttctt

SEQ ID NO: 213 - DNA, 4270 bp, Homo sapiens
attgctaaaaggctgcaatcattaggagtatacagagactggaaacagtgctggcctaagtacaaaaatctcaaatatgaatatagaacagttaaatatgcccataactctggagacagctctaaaactatgaagttcttccatgatttggatgtaatcctgcagtatgaacctgccacacaatttacagaggaagatgcaaatggcaggtacctggaaacgctcagcccaagtacagccccagagaccactgaagaatttttattggtgtgtgatacacggaagaagggaagaaaacgaaagtgccttttccactgttgggatcaacctcatgcaagtggtaaaatgtcaattgcatcagtagataaggaagatgtctcaggaaatcctttacttctggtttctcatgtcagaccaatggaactaggtactctacgtcagtattggaaccctctaataatacaacttttaacccaactgtagcaaatgaaggaggaaagcactggactgtgccagaagtcagggctctaatagacatctggtctgataaaagcatacaacgacaactagagggaacagtgagaaataagaggatatttcaacaaattgcagccaagcttcagaaatttggaatagacagagactggaaacagtgcagaacaaaatacaaaaacctaaaacacgaatacaagatcgtaagaacagctcaagatctaggcatgactaagagtatgaaattttttactgagttggatgctattctgggacccaataaaacagaaaaatcacgagaccaggaatcccaagatggagaacatgtcacagaatgtgccaacgtaaaaatgggagaggaccagacaggtaggaaggtgaagaaaaataatcttaacatcatgttacatcacacaggttcaaggatcccttttccaaaatgcctgggatcagaagtgtttcagatttagatactttttcagattttagagtatttgcatatacatagtgaggtatcttagaaaggggagccaagtccaaacatgaaattcatatgtgtttcatatatatagcttaaagctaattttatgcaatattcttaataattttgtgcatgaaacaaagttttgactatacccatcacatgaggtcaagtgtataattttccacatgtagcatcatgttggtgctcaaaaagtttcaaattttgtagcatttcagatttcatattagggatgctcaacctgtattgagaatgttcagtaccataagaggaatattatatatgtaagttaaataggtttcattacatgctatttgacaagctagctgaatttattatgaaacagatttagtatacatttgatcttccccagaatagaaacagtacagttatacaaaaaggaggaaataaaactggattcccagaataaagtttaaaatagatcaattttaataaagcaaatatgcaaccccagatggcagaagttaaagtaaattttcatactaattgtggtaaaattgagtaaaatagaaaaagggcattgaagaacttagaaaaatataaaatacatgagactttcttagaagtagtacatttctctgagacccatcataaatgtctttaaagtatatttaaaccaaaggattgagatacagtacatacacactaagacatgatagcatgaaataaactgaatgagttctagaccaggattcaggaaatcaaagttgtaaggctctgtggaagcttgaagtaaccaagtgtcttctctagaccaggggtccccaacacctggacccttactggtccgtggcctgttacgaactgggttgcacagcaggaggtgagtggtgggcgagccaagcttcatctgtatttacagacactccccatcatgcacattatgacctgagctccgcgactcctgtcagatcaacggcaacattagattctcacattagattagaacactggagcacgaagactgttgtgaactgtgcaggcaagggatctaggttgtgtgctccttatgagaatctaatgcctgatgatctgtcattgtctcccatcactcccagatgggaccatgtagttgcaggaaaacaagctccgggctcccactgattctagattatggtgagttgtttaattatttcattatatattacaacgtaataataacagaaataaagtgcacaataaatgtaatgcacttgaatcctcccaaaaccatggccccctcaccccctggtccatggaaaaattgtcttccgtgaaaccagtccctggtgccaaaaggttggagaccgctgctgtagacctaactccaaaattggggggtgtggacaagatggtcttaaagacctctactaaccacagtgtctccggattttattatctggcttaaatgatgagtcccaattgtaagacagtctgcgtctagggaagagaggggaaccacagacagttaagactggaaatgttggtgagaaatctcaaaatatttcgctggtggacaagaaagaaactggtatgctagagaactatacatctcccccagttagatgactacagataaagcagcccaacagcagtggcatgatatcttcatacagtcattgctggagatgcagctaaagatgattccattagttatgtcagaagacttagttagagactcagatacatacccaatatctatagtgacaaaaagatgcttaagggtagggaatctaactaatcatatttaatattagggtccctttaaaaaggaaaatactgcattagagtttaaaacacaattctgggccaggcgttgtggctcatgcctctaatcccagcactttgggaagccaaggtgggtggatcacttgaggcaggagtttgagaccagcctggccaacatggtgaaaccccatctctactaaaaaatacacaaaaaattagctaggtgtggtggcacatgcctgtaatcccagctactcgggaggctgaggaatgagaatccttggaacctgggaggcagaggttgcagtaagccaaaatcgtaccactgaaccacagcctgagcaacagagtgagactctgcctcaaaaacaaataaataatctaaataaataaaacacgatcctgaagtaaatttaaaaagccaatatatatccccttatgttcatacagtcattgctggagatgtagctgaagatgattcagtcagtaataagtcagaagacataggagatacagataaaaaacaaggtcttgacacacataaaataatattctggttttttttttttgtacgtgtgtgtgtgtgtgtgtgtgtgtgtgtgtgtgtgacaaagtatatacataaaatgctattataagacactgctatggcctgaactgtgttcctcccaccaatattcatatattgaagccttaacccccaatgtgatgtatttggagacagggcctttgaatgataactagctttagatgaggtcatgagagtggtgccctcataatgggttttagattttatatctatatattaatagacgctaccatacctaagaaattatgttataacattatatgaagtactgttggatcataactcaaaacacataaatgaaaggtggaaataattaatggaagcaatgttccccatcgctgtttttctccaagtgtagcagcatcagcattaactgagaacttactcaaaatgcaaattcttgggccccatccagaatcagaaactctggtgttggggcctagcaatctgttttaacaagtcttccaggttataatgatgcaagcaagtttgagaatcattaccctctggtatagggcactaagggtttggaggtgagattttgtgcttgctacctgatagtttgcctcttctacacaaaccaaaactggggaggaggagatcaccaagcccccaagctgaagtatatctgttaaaaagaccttgtacctagtctgtcagtccaaagcttcatataacttcacaaagtgtaaagctcaatgttaatttaacaaactagttaatcaaatttcctatactcctggcaaacttatttctctggtttatcagacaggacagattcttaggtttccataggcatcacagctatggcctttgtcattaagagttaaaaatcaaattatgccaggtgcagttggcacatgcctataatcccagcttcttgggatgctaagattgaagcatgacttaagcccaggagtttgaatccagcctgggcaacacagcaagaacccatctct

SEQ ID NO: 214 - DNA, 3867 bp, Homo sapiens
aatttgtactgctgctaatgatatgcacccagaaaccttgttagacaaaaggcagtttcaagccaatgctatggtttccatgtggacatacagtgcctatgtagcaggcacttagagtaaatggacttgccttaatttataaaggagggaagaggtagaagggaaccatgggtcctcctgctagagggggagtttactaaaagggagtccttggaaaggggaatggagagaaggtgcctttgactgtcttctatccattagttctgccctggagcacactggggaagcaggctgcgggccttccaaaagtaaaaaatggtgatatgcaatcgaagcttatccttagcctatgcacatttgtctcagctgggcattgtcttttcagagagcttgtagcacaagggctacacatgggcgccaagatggtggtagatacaccttggtgcactttttgttttacttgtttcttaagactatttcacaagtcctgtgaggcaaaaaaacaaaacaaaacaaaacaaccaaacaaatacaatctaacttttacccaatctacagcaggaaatcaaaggagtgggtggaatgagagaaaatatgcaaagagatcatttttaagtttgatttcctgtctgtaattttcaaggactaatatagcaaatttttcttctgccattatcatttatgtctccctatttaccacacaataatgtaaatgcagagaatgaggaggcatcttttaaaagccttaggatattctatatgatgacctcaatattgactttcagccatactgggaaaacttacttttcatggagtgccacctaacagtgaatgtattagagtataaaatgtttgccatgtatacacctgtatgtgcacatacacacattacacacacacacagaatgcacatttcacacacatatacttattattcaagttgaaactgcactctaatcaatctgagtctattgctgtttcaactcttaaaatcaatatctcctacattagtagatataaacataattcaaatatttaaatatttaagaggagaaaagtaactagaaaaccaatgaaaagtgaggccatcagaaatagaaaatgcctggcacgaacagtctatctaaattctcaatttcacttcaaattagagaatccataatggactagaatataaattacaaacacatacacacatcttcacttaaagttgttttaagttctttgaagttctgacatgtttttagccagggttatttgttcaggttcttccttgttaggattccagactggaaagttggaagtctcaggaaatgcatgtttccatgagttttttagtttcacagttttacagatccaacgacacaatcttttaatctttggtcactcaaccaaacaggagttccgtaggcagagtgctcactttgaattgctaatagaaaataatgcacagtgtcctcaggatatgctaaacaaggtttttaagagcattttattttacagcactttagtcttttcagctagatttcagtgacactatggtgtaaatgctatatctgccataacttattggtggctcctgtgttacatacagttttaaataatgctctaaattgtttgttttcccaatgataatgataaagtgttctgtagaatttgtaaaacatgtcaattgaatctgttgaaaattgtgtaattgttatttcaattgtgatactattttgtaggtaatagttttaaacgtatatttgtatgagtcaaaagtatgtgcttgtatgtggtatgtgtgtgtaagtatataatatcttatcaaaaatcaaacttatcctaaagaaaaagggcacattgtgaccagccttaatttattaacacttttttgttgtttttgcaatttggatttaaaattgaaacagaaattaagtttttgttaaaaatggtgtcttttaattttgtgaggaatgggctttagaacctatctgagttcccacaagcaaactgtccaccttgtgaggtaccccattgcttttcgtaataatcaaacatcaattcatatattaacttcattttcatacagactaatttgttttcatcaacaatagaaccagtacacctttaaagttgaccttcccaacatggcacccatttttctttaatgataaattttccatgaaaaattgtttctccaaaccattactttttaaaattcaatcttcccaagtaagatgaactgccttggtgttaggagagcttttaaaggcccatccatactaggtggttccaacatggttctcttctcgagaaaacaagcatgcaacccacacacttttctggtctgccccacgtgtagaattagtctagcaatagaaaactcatgactgacaaggatctacacatgtggtcatgcttgaagcaaaaattctgtgaccttctttgggcttggatctgattacagaatattaattaactttcttatttcctttctttctccatccttagttattccttttcaatatttagagttgccaggtaaaatacaggatatccagtgaaattcaaatgtaactgggtatgtcctatatattttttcctaaatctcacaattctatccacactgcctttctatctttttcagctgggctatctataaggggcgagatctacctccctccatacccttgtgttcagacaccttatgaatatctgcagtcataatgtccttcaagaaagaaaacattggtcagctctaggtcctgcaaatgctttttgaaggacgaactcaaatacagatgggataatcaagtaaatatcttcataggatcaatgccaccatgttcaacacttccctttgccagcctgttgtgaggtccaagtttccccattaatcccttatatagcatttcccagtaactgggacaaccaaaaacacaccgacatattagaaatgctcctgaaaagtggcaacaccgcctaactcagtaccaggacctcttttaaattcaatttcttttttctttcagagagataacaaacgaattcattatttcccccattcacatcttaccacaaattatttttatcaggttaaaactggtcatctacggaattgtagaaaggtgacataggaactgtcttcactgctggaagaataaaagagtctgaggtatagacactgccctggtgacaccttctcagaacattgttgggggacaggggaggcaggcgcaagtaggggatagaatctgaccctgacatgcagctatcacctggcagagagactcgtcaaagcaaattataacgaccagtactatttttttttggaattgaaaacccaagaagccctaaaataagaacagtgagatcaaaggctggtttctaaaacaatgcagaaaatagaaccatgttggaattcctaaattctagctttcaaatactactgtttccaacagtgaatccttgacagagactgaatgcagatggaattttgaaacattttcagtagctacctcctctcctgaaattcctataagtggcagaggaaaatccaaatcctttaatataacatgtccatctcatgactcctgcttacacacatttgtgttgatttgcttcatttctggaggatgggaatttgcagagctggtgacatttccttcattagacaccagaaattcaccagagagagacagatctgtgccttctctttttaggatctggttattgatactttaataaatgtggtgtaaagaaaatccatggctacagtctgtatagaaaatgtgaattttttaaataagattgtgttcttaatgtaaaaaataaaagtttatttgtattcagtgaaatgcctaataaagtcctggtaccaat

SEQ ID NO: 215 - DNA, 3304 bp, Homo sapiens
ttgtgaggtgtaaataagataattatcaatccctcagtacaatctctggcatttagtaagtgcttaataaattttagctattttatttgtattatcattattattccctaaggccagtctcctataccatcttttctacttttccaggaagcattcttctccatctgtgagctcccctggatcctgttcatttgttttaggagggtgggaaggttccttgagagagtcctagctattccctgttcagcagtgcagcccaaggagtcctggaaatgcaggagggaccttcaggtgcagggcttggcccacacataggactaccagggcatctgatatatctaggaagtaacaaggagccctggaggcaggccagggctgtggcaaagagacctagatcatgtgggacacgcctagtccctgcatctgtccccctctccctggagtttggacgggccctttcttcagcaggtgtttgctcacgtcccatgcctgaggtggggcccttggccatagtcagtattggtggagtgagcagcccgccctcagggaacccatactcaggaactttacactgctgtggtggagttcacacggggggctgtgagagccactgtgcagtgctggctcaggggtctggaaaaggcttctgggagggcatgggaacaaaactagatctgaatgatgaggcagagctagtgagtcaggcgaggggggtgcagagggatcacagtgcagaggccaaggcagtgaaaaaggtggcgtggatggtgacacataggagtcgagcataaaatgcgtggcaaggtcctcaggggtacggcgggctggggctggaccaaggagtgtagtggagctctctactccaagggggacattggaatgttggaagtcacaccacgagagatttgctttgagaacataaattcctctaggcgctgggagagtggaatagagatgaggggcctggaggcagaaaggctgtctggaaaaagttagtggtggaattggtggaagacatctgagagcctggactcatggtggtgaggagagatgccggagatactaggagagatgacagatttgggtggttgggaagactgcgaaggagtggttgaaaatggttccctggtatctggtgtagaaattcatccgaatgggaatggaggaatagagagggtgaggagtttagttctggaatgtggaatttgcagattcaggttatcagagaaagggggcaggcagggatgcctaggggacatttatgtatttggttctggaattcaagggaggcgtaggctggaggtacagatgagagatgccagcctgctacccaaccatgccttcctttttacagaatcaccgaagattcagctgtgaccacgtttgaggctctgaaggctcgggtcagagaacttgaacggcagctatctcgtggggaccgttacaaatgcctcatctgcatggactcgtactcgatgcccctaacgtccatccagtgttggcacgtgcactgcgaggagtgctggctgcggaccctggtgaggtggcatgggggtcggggaatgggaggccgctccgggcactgcccagatgtctgtgcttatgcctgagcctgcctgggggaagtggggagcatggcgcaaaggagaacagagccaggagccaggatatttacccgcaggatatttacccccaggctcgctgcctctcctccccaactgcaggtttaggaacttctccccctccatgagttcactgcattctcccttccccgccccggtccccgaaggcccactgcatcacacagactggtgaggcctggggtcaggaggaggctggctgtaggtaaacaggaccagggccttggcccctccccctcccattactaagctccttctgctcctgcccctgttcttcgctcaggagcagccattaaaatgtcgcccggagacagtaataaaaggctcggacgtgggctctgtgtcctgatcaaaggccgcgtgtaatctcgttagggctgcggctgccacagctggacccagccttgttctcattactggggctcctgctgcggggctggccaggcggtttgatcctggcgtccccccaacacaggagcgtgcctgcctgctcacagaagctgcctatgcgtccccagcctgggctgacaggaccaaggtctcagcacacactggtgcagagagacatggctgcaggcccaggtgctcacatgcgcacacatggctcattgtgtagaccagagccctccctgttctccctgcagggtgccaagaagctctgccctcagtgcaacacgatcacagcgcccggagacctgcggaggatctacttgtgagctatctgccccaggcaggcctcgcctccagcagccccacctgcccccagcctctgtgacagtgaccgtctccctttgtacatacttgcacacaggttccccatgtacatacatgcacatactcaaacatgcgtacacacacacacatttacacacgcaggactctggagccagagtagaggctgtggcccaggcactacctgctggctcccacctatggtttgggggccatacctgttccagctctgttcccagggcggggcagggaggtgggggttgggggagtagtggggcacggctcctaagatccagcccccatactgacagacggacagacagacatgcaaacaccagactgaagcacatgtaatatagaccgtgtatgtttacaatgttgtgtataaatgggacaactcctcgccctctacctgtcccctccccctttggttgtatgattttcttcttttttaagaacccctggaagcagtgcctccttcagggttggctgggagctcggcccatccacctcttggggtatctgcctctctctctcctgtggtgtcccttccctctcccatgtgctcggtgttcagtggtgtatatttcttctcccagacatggggcacacgccccaagggacatgatcctctccttagtcttagctcatggggctctttataaggagttggggggtagaggcaggaaatgggaaccgagctgaagcagaggctgagatagggggctagaggacagtgctcctggccacccagcctctgctgagaaccattcctgggattagagctgcctttcccagggaaaaagtgtcgtctccccgaccctcccgtgggccctatggtgtgatgctgtgtctgtatattctatacaaaggtacttgtcctttccctttgtaaactacatttgacatggattaaaccagtataaacagtt

SEQ ID NO: 216 - DNA, 3578 bp, Homo sapiens
gcagacagacatcggcacgtatggacggcgcgagccggtactgcgttccggaggagccatccggcgtcacaggctgtgctggggaggtggggtgaccgtcctcagaaacccccgcgggcggggcgctgcacacacgtccacctatagggtgtgtgtgcgtgcgtgaggtgtgcagcccctgtcaggatctggcgagagaagctgaccgggatggaggtcagaggatcgacaagaccatgctggcaagtctgaaggtcaagaagcaggagctggccaacagctcggatgcgaccctcccagaccggccgctctcccctcctctcacggcacctcccaccatgaagtcgtcggagttctttgagatgctggagaaaatgcaggggatcaagcttgaagagcagaagccgggaccccagaagaacaaggacgactatatcccataccccagcatcgacgaggttgtggagaagggaggcccgtaccctcaggtcatcctgccacagtttgggggctattggatcgaggacccggagaacgtgggcaccccaacatcgctggggagcagcatctgtgaggaggaggaagaggacaacctcagccccaacacatttggctacaagctcgagtgcaagggtgaagccagggcctaccggaggcacttcctggggaaggatcatctaaacttttactgtaccggcagcagcctggggaacttgatcctgtccgtcaagtgcgaggaagcagaggggatcgagtacctccgggtcatcctcaggtccaaactgaagacggtacatgagcggatccccttggctggactgagcaagcttcccagtgtccctcagattgcaaaggctttctgtgatgatgcagtgggactgagattcaatcctgtcctgtaccccaaggcctcccaaatgattgtgtcctatgatgagcatgaagtcaacaacacattcaaattcggagtcatttatcaaaaagccaggcagaccctggaggaggagctatttgggaacaatgaggagagcctagcttttaaggagttcttggacctgctgggggacacgatcacactgcaggatttcaaaggtttccgaggaggcctggacgtgacccacggacagacaggggtggaatcagtgtacacaacattccgggacagggagatcatgtttcacgtttccacaaagctgccatttaccgacggagacgcccagcagctccagagaaagagacacattggaaatgacatcgtggccatcatcttccaagaggaaaacacgccgtttgtcccagacatgatagcctccaatttcttacatgcctacatcgtcgtgcaggtcgagaccccaggcacagagaccccatcctacaaggtctctgtcactgcgcgggaagatgtgcccacctttggtccacctctgcccagtccccccgttttccagaagggcccggaattcagggagtttctgctcaccaagctcaccaatgccgagaacgcctgctgcaagtcggacaagtttgcaaagctggaggaccggaccagggctgccctcctggacaaccttcacgatgagctccacgcccacacacaggccatgctgggactgggcccagaggaggacaagtttgagaatggaggccacggggggttcctggagtcttttaagagggccatccgcgtacgcagccactccatggagaccatggtgggcggccagaagaagtcgcacagtgggggcatccctggcagcctcagcgggggcatctcccacaacagcatggaggtcaccaagaccaccttctcgcctccagtggtggcggcaacggtgaagaaccagtcacggagtcccatcaagcgacgctcggggctcttcccccgcctgcacacgggctcagaaggccagggcgacagccgggcacgatgtgacagcacatccagcacacccaagaccccagatggtggacactcctctcaggagataaagtctgagacctcatccaatcccagctctccggaaatctgccccaacaaggagaagcccttcatgaagttgaaggaaaacggccgtgccatctcccgctcctcctccagcaccagcagcgtcagcagcactgcaggggagggcgaggccatggaggagggcgacagtgggggcagccagccgtccacgacctcacccttcaagcaggaggtgtttgtctacagcccgtccccgagcagcgagagccccagcctgggggcagctgccaccccgatcatcatgagccggagtcccacagatgccaaaagcagaaactccccgagatcgaacctgaaattccgctttgacaagctcagccatgccagctctggtgcgggtcactaatgtgaaagtggagtccttcgcctgtccaagggaatcccctcttctgtcctggaaaaggctcctgtaccagcagtttgggagtgccgtccacgaccctgacagtcccagccctgctgccccatggccacgtgcccacagatgtgctgttggtccaggtgtcccagtctggccacagccctgcctccgccctcacctacatgccctcccagcccctcccatctctggacgaggcctccttcctcaggttcctcctgctcctgacctcccagtgtgatgtccgggtcctttatcatcctattcatcctggagaggaaaagtgtcgggcaaagggggatctggggggagctcagcagtgactggggagctggtctgcctcagagacagagtagggggtgggagcagagcctcggtgagggtcttggccacagggcagtgccttcctgaacgtggcaggctttactaccaggaacgcactcggtggtggaggccccatgttcccaggagccaagattcgtagcatccttgaggccatcctgataaaattcggcgctattgcccccgtagctctggagctctaaaccgtctatctgcttctgtgctgaacgcctttcccatctgctgacgtaggcccagggctgccctgcccctgctgccagtgtaccgtgagcggggctccagccagttcaagctcagagccagagctggacgggccagaactgcgctgcacacttcctggactgaggcggggactttgggtcccacccggtttctcctgattatggctgctgtggggtgaggggagggaggggcagccccgaggcagtctcttccctttgagaagatattttcctgctccttagcatgcgtgcagctctctcctgttttgggtgttacccttggacactccagctcggggactgctggcgtgtgagtgtgcagattcccctgtgtggtcgaacctaagaactgtggcttggaagtgatgctccatgtgacgacgactttgctttctttcctcttagtgaggaggcgattcgtagatcccaactgcctatgtaatgtaaataatgtacatttaatttattgctatggtagcacattgtatttgttaatgtacaaaacaaattctaaaaggttgacaaatgtatattttgttgcttaaatgtgtctttgcagaaattgacaataaataacatattttgtgtc

SEQ ID NO: 217 - DNA, 4614 bp, Homo sapiens
aataaatgcagaaagagaaagtggttggaggatggagcacatggaattcaggagaaaacccacaaagacccctgcatgtcagacacaccctgtcccggagcgtggtgtccccttgagctttaatgagctccctgtgatcacagccatgccttctcctcgttggggaggtgtcctaggatgcttcagccaaagacctttgtttcccgctgctatctcttttacctggacaactctcctggcccacgttcctcttgccagcactgggggtcacaggcctgagccctgggtacaggggtgccctagtcttctgccctccccacctcttaaggcacagagctgttgggtgggctgcctggggctgccatccttcccgtggaagccagtagccactctagtccatgggactcttgacaaaagcgccccgagagggcaaacctgtgcccccatactcgcctgcattcttcggactccacatgcagcagggctttgtgcctggggaggggtggccagtctgtcctggtcagtatgaaaagctgttggccccctagggacagagggcccagctaaggctgcctgaggatacaaactgcttgctatcccactcctggggagcagggtctgcagggactgagagtgggtcccaccttgagaacgcatgcaaggtccgtcctgtcttgatgtcttgatgtgactgtatgtgccctgggggctcactgtggtttacaagtggcttgtgaagctcctgggagcaggtggtacacccagtgctgaagacagggtcgccgtggaagagcgaagagcctgaccgggattcctggtgggttgaaactaggaagtgctcacaccagtcagagccaaatgaggggtgcgctatggtcactgctctgtccagcatgcgttcctcctgggaggtcctggccacctgtgcacccacccctgtgccacctccagcagtcccacctggggccacctacggtggcatggcccctggctgagaggccccgagggcgaagggttactggaagccacgaaagtgcctcttgggacagccgaggccaggatgcagggcagcagcatcctgagcctcagccccacgccggtgccgggtaagcagtgtgccctgtccccgtcgtatgaccactctgatgggcctctctgtgccttcgtgcgtctgccacgcccagtgcttgccacatgtctgtcctctgctttctgccatccatgggtccctccgcttcagcctggctgcgtctcgcactcccctcccgtctgttgtcgcagggcctctgaagggagatgcatggccaaggtggcaacttggaagtagggattggccccagggcctccgcgcaggccgctgtcctgctggagctggctgggtgtggggggaacctgccttaatggtgtttccctctgttcttgtcaacaggaggttcaagatgtgagagggtcagacgcctgaggaacccttacagtaggagcccagctctgaaaccagtgttagggaagggcctgccacagcctcccctgccagggcagggccccaggcattgccaagggctttgttttgcacactttgccatattttcaccatttgattatgtagcaaaatacatgacatttatttttcatttagtttgattattcagtgtcactggcgacacgtagcagcttagactaaggccattattgtacttgccttattagagtgtctttccacggagccactcctctgactcagggctcctgggttttgtattctctgagctgtgcaggtggggagactgggctgagggagcctggccccatggtcagccctagggtggagagccaccaagagggacgcctgggggtgccaggaccagtcaacctgggcaaagcctagtgaaggcttctctctgtgggatgggatggtggagggccacatgggaggctcacccccttctccatccacatgggagccaggtctgcctcttctgggagggcagcagggctaccctgagctgaggcagcagtgtgaggccagggcagagtgagacccagccctcatcccgagcacctccacatcctccacgttctgctcatcattctctgtctcatccatcatcatgtgtgtccacgactgtctccatggccccgcaaaaggactctcaggaccaaagctttcatgtaaactgtgcaccaagcaggaaatgaaaatgtcttgtgttacctgaaaacactgtgcacatctgtgtcttgtttggaatattgtccattgtccaatcctatgtttttgttcaaagccagcgtcctcctctgtgaccaatgtcttgatgcatgcactgttccccctgtgcagccgctgagcgaggagatgctccttgggccctttgagtgcagtcctgatcagagccgtggtcctttggggtgaactaccttggttcccccactgatcacaaaaacatggtgggtccatgggcagagcccaagggaattcggtgtgcaccagggttgaccccagaggattgctgccccatcagtgctccctcacatgtcagtaccttcaaactagggccaagcccagcactgcttgaggaaaacaagcattcacaacttgtttttggtttttaaaacccagtccacaaaataaccaatcctggacatgaagattctttcccaattcacatctaacctcatcttcttcaccatttggcaatgccatcatctcctgccttcctcctgggccctctctgctctgcgtgtcacctgtgcttcgggcccttcccacaggacatttctctaagagaacaatgtgctatgtgaagagtaagtcaacctgcctgacatttggagtgttccccttccactgagggcagtcgatagagctgtattaagccacttaaaatgttcacttttgacaaaggcaagcacttgtgggtttttgttttgtttttcattcagtcttacgaatacttttgccctttgattaaagactccagttaaaaaaaattttaatgaagaaagtggaaaacaaggaagtcaaagcaaggaaactatgtaacatgtaggaagtaggaagtaaattatagtgatgtaatcttgaattgtaactgttcttgaatttaataatctgtagggtaattagtaacatgtgttaagtattttcataagtatttcaaattggagcttcatggcagaaggcaaacccatcaacaaaaattgtcccttaaacaaaaattaaaatcctcaatccagctatgttatattgaaaaaatagagcctgagggatctttactagttataaagatacagaactctttcaaaaccttttgaaattaacctctcactataccagtataattgagttttcagtggggcagtcattatccaggtaatccaagatattttaaaatctgtcacgtagaacttggatgtacctgcccccaatccatgaaccaagaccattgaattcttggttgaggaaacaaacatgaccctagatcttgactacagtcaggaaaggaatcatttctatttctcctccatgggagaaaatagataagagtagaaactgcagggaaaattatttgcataacaattcctctactaacaatcagctccttcctggagactgcccagctaaagcaatatgcatttaaatacagtcttccatttgcaagggaaaagtctcttgtaatccgaatctctttttgctttcgaactgctagtcaagtgcgtccacgagctgtttactagggatccctcatctgtccctccgggacctggtgctgcctctacctgacactcccttgggctccctgtaacctcttcagaggccctcgctgccagctctgtatcaggacccagaggaaggggccagaggctcgttgactggctgtgtgttgggattgagtctgtgccacgtgtttgtgctgtggtgtgtccccctctgtccaggcactgagataccagcgaggaggctccagagggcactctgcttgttattagagattacctcctgagaaaaaagcttccgcttggagcagaggggctgaatagcagaaggttgcacctcccccaaccttagatgttctaagtctttccattggatctcattggacccttccatggtgtgatcgtctgactggtgttatcaccgtgggctccctgactgggagttgatcgcctttcccaggtgctacacccttttccagctggatgagaatttgagtgctctgatccctctacagagcttccctgactcattctgaaggagccccattcctgggaaatattccctagaaacttccaaatcccctaagcagaccactgataaaaccatgtagaaaatttgttattttgcaacctcgctggactctcagtctctgagcagtgaatgattcagtgttaaatgtgatgaatactgtattttgtattgtttcaattgcatctcccagataatgtgaaaatggtccaggagaaggccaattcctatacgcagcgtgctttaaaaaataaataagaaacaactctttgagaaacaacaatttctactttgaagtcataccaatgaaaaaatgtatatgcacttataattttcctaataaagttctgtactcaaatgtagccacc

SEQ ID NO: 218 - DNA, 1117 bp, Homo sapiens
cagggtggtgatgagagctggtgcggccacagcaaatgcgaaggcacctttggggtgggaggttgcagagtctcctgaagtgggagaagctgaaagggccagctcagtagccctcacgatggactcccatcccagcagccctaccaagtgctcatgcctcaagagtccaagccacacgatagaaggtccgtgcaaccctccagaccagcccagcctccccaaggagcccggggcagcttagctctgcagccccaggccccacagccaatccactagagcctctctctcagctctgccaaggtccagggaggcctccctcatggcccatggaagtactcaggccttcctcagcccctggagcagccagctactcacctccactacctgcagaataaggggccacagaagtaggcagcgagaaggagtgaccaggggccagatggtccaaggaaggagggattcaaggctgcatgccgggcagagaaatagcaaagggagaagaatagcagaggcaggaggaaaggctgccagggccagagggacacagagctactgtactccaaagaggcagcctgtgttggagagggcagccgccaagccaatttactgttcattttattactctgtgttgccgggccttaggccggggaagttatttcaggcagagatcacagcacattaactagttattaaaagaatgtccttttctgtgtgttcttcctcagacaagaaatagacgctgtggcaagcacatattactgaaagtggatggaccctcaggggcaaaacgccaagaactgggggaataaagaggcaaatctttgtttctgaggaaaaggcccctcacaggttcaggcctggcatggagacaagaatcaaggcaagaagcagggatgggagaagggagaggaggaggccttctgagacctaggcatggacgcacttatccaccccagagcagccttactcgcaatggggaagggatgcagtgtcaactcaccctctcggaaaacaactgcaaaatatgactcttagtacaaaaactttaaagttaaaaaatattttaaacaaaactctgcccaacctttggcctagcaattccacttctgggaatctc

SEQ ID NO: 219 - DNA, 3337 bp, Homo sapiens
ctccccgtcacccccccagggcctggcctccctctccagctgcaggctttcacctcttgcctgggctggattcccccagtcccagattcccaggatgcccaaccaggggaatcccagtaaccatgcgccagcctcctgcctctcctgagtggtggctgaggcctggaggaggagaggccacacagctggcagggtctggcctgggcaaagaagagtagagctcacgtcttcttggtgaaaaggaggatctctggaaagtcctcctctctgaaatgggttgggatggggagcgacaacctcctcttcccacagcaggatgggagagcttactcccaggcccccacacccaggtcagacatcacgtgcaccctgaatgtaggcaagggcctggccctgcagcccagggtcatttcctgctctttccacttcctctttccccaccgtcctgcactagcaccagggccaggccaaggcaagaatcagacagctactccacagacagagaaacaacttccagctaagtatgacatcaggacttgtctttcctactaagcctccatccccgcccctcccctgaggcccacgtctgctgaattatccggactccgcacaagctgtggcttcctctcagttcaacaaacatttcctgagcacccactaccagtaatccagccggtaggcgacggagactgccagcaggagggagggaagaaagccagtcatccggcagatctgggctgttctgggcgggagctgttctgggccacaggtgccctacagggctgggggcaggatggcggtaggagccccaggggaccctcccacctctgcctggcagaagcaagtgcccttctttcttgttatgtgtgccttctgctcctgagccctagtgtggacctcaccgcatggtcccctctgccccctccttctggtcctgccatggctgctgctctctgctgaaggctgtggggctctagggagagtccagatcaccctgggatttctccactgcccaatgtgaagcctaaactgtggggtcccagctcagccttcctcactggctctcaactccaccccacccctctattcaggaaggtgaggggcatctctttagcagaccagactgttttgagaagtgtctctcatactttaactgaagagtcatgcagattctaatggtctggggagggcctgagagttcgtcttttttttttttttttttttttagttagggtcctgctgttatcacctaggctggagtgcagtggcacaatcatggctcactgcagcctcgaaccctccaggctcaggcgatcctctcacatcaacctcttgagtagccgggactacaggtgtgccaccacacctggctaatttttgtattttttgtaaaggcagggtttcaccatgttgcccaggctggtctccaactcctgggctcaagcaatctgctcgccttggcctcctaaactgctgggattacaggcatgagccaccacacctggccgagaattcgtatttctaagaggcttcaggtgaagcccatgctggttcctggaccatggttttgagtagttaagggtttggactagaatatatgaagggctgggggtgaagacagactctagactctaaaggttggtggctggctatgtaggggatgggggagtgctacccctgtcaggtggtgggggcttcctggctgcagagttgggtgggagacttggggaagatgctttggaaggcagtgagtgggtggtgtcaacttctagtagtgcagtgggagatctggtcagggatgggatggagtgaagggggcagaggcatttggtgtggggttgatcagaggaattttggaaaggcttggaaacattcctatgtatgtgagacacacctatgccagggcaaagactccaagctcaagtttttctcttgccttctagtcacaagaacatggctttggagtgtgacactggcctaggaatccatgactcccaaaggacggggctggggtagaggaggttcaggcaaagcccttagattttggagacatcaggcagatgtctccaaaaatgattgtgatcaagaatctgaattataagattcacagtctgctccccaacccagtgctgccaactgtacagctgcgcctccacgaaggggcatatgccaggctcgtctgaccctggaatgaggatgtaggaagcaggcagagctccggttcagccctcacaatgggactgaagcaggagagaaggctgggcagaagggctgtggggaagtagggcttgtctccatggatgacgtccagaaggatgtcaggaggaggaatatcacaggagttatagacattggagggaacagagactggcacaggacctcttcattgcaggaagatggtagtgtaggcaggtaacattgagctcttttcaaaaaaggagagctcttcttcaagataaggaagtggtagttatggtggtaacccccggctatcagtccggatggttgccacccctcctgctgtaggatggaagcagccatggagtgggagggaggcgcaataagacacccctccacagagcttggcatcatgggaagctggttctacctcttcctggctcctttgtttaaaggcctggctgggagccttccttttgggtgtctttctcttctccaaccaacagaaaagactgctcttcaaaggtggagggtcttcatgaaacacagctgccaggagcccaggcacagggctgggggcctggaaaaaggagggcacacaggaggagggaggagctggtagggagatgctggctttacctaaggtctcgaaacaaggagggcagaataggcagaggcctctccgttccaggcccatttttgacagatggcgggacggaaatgcaatagaccagcctgcaagaaagacatgtgttttgatgacaggcagtgtggccgggtggaacaagcacaggccttggaatccaatggactgaatcagaaccctaggcctgccatctgtcagccgggtgacctgggtcaattttagcctctaaaagcctcagtctccttatctgcaaaatgaggcttgtgatacctgttttgaagggttgctgagaaaattaaagataagggtatccaaaatagtctacggccataccaccctgaacgtgcctaatctcgtaagctaagcagggtcaggcctggttagtacctggatggggagagtatggaaaacatacctgcccgcagttggagttggactgtcttaacagtagcgtggcacacagaaggcactcagtaaatacttgttgaataaatgaagtagcgatttggtgtg

SEQ ID NO: 220 - DNA, 1201 bp, Homo sapiens
ctgtgcctctccagggctgtttcttcatctgcaaaatggggagggtgtggtggctcactgggcagggaggaccccgtgagtttcgaacagtctgtgtggctcacacacagtgttgaggaaaaccagcccatccttattatcattcccagtccaaatgccctttcctcctcgacctgctcccaggccaccctcccggacagccgctctgggggaagatgaggacgggaggaaagtgagagcaggactcagcacggggaagagggagcaggacggggactttggcaggcagtggggagagcttatgggcagagtccaagcgcctttcctgcagcctctggccacctggagctcggatggtggggctgtgctgagtctgactccagaaaccctcatcccagctgtgctcaggggggtagataacaagttccactttccctctccagttctcttctgggaggtgggtaccccaggcttcgggggatgacgcccaggggtgagggttgctcaggggcaggctgaggaggatcacaattgggaaagaatcctagcagacccccaggcagaagagtcaggaaggagtagaccctggtgttttgaactcagcacttgtccgggcagtgtgggaaaggggggcccggcgcggggaggcgccctgggaatgttcccaagggctccaccggtgtcgctggggttcccaggcatacgttttggtgggaaaagggtcggggaaggcagtgactaggtctctgtgcctttgttttaggctggaagctaaatccagtggtcggcgcagtctacgggcctgaattctatgcagtgacggggttcccctaccccaccaccggcacagccgttgcctaccggggcgcacatcttcggggccggggccgggccgtgtataatacatttcgggctgcgccacccccaccccccatcccgacttacggagcggtcgtgtatcaggatggattttatggtgctgagatttatggaggctacgcagcctacagatacgctcagcccgctgcagcggcggcagcctacagcgacagttacggcagagtctacgcagctgccgacccgtaccatcacaccatcgggcccgcggcgacctacagcattggaaccatgtgaaaccttccaccgtttccttctcggaccatgaagggcaaaaacaaaaaaacaaaaaaaatcacaaaac

SEQ ID NO: 221 - DNA, 883 bp, Homo sapiens
agtagaagcacctgcgtggtgtgcgggggtggagcgggggctggagggagagttaatgatttgccacaggctcatttcgcaacttaaccaagggtcagcttcccgtgaccatgtaccagctgcgtcctctgggccacgctccacttgcccgcttccacccggaaagccccccaggctgagtgcggcatgatctccatcaccgaatggcagaagattggtgtggggatcaccggtttcggcatcttcttcatcctctttggaacactcctgtactttgattccgtgctcctggcctttggaaacctgctgttcctgacgggcctgtccctcatcattggcctgaggaagaccttttggttcttcttccaacggcacaaactcaagggaaccagcttcctcctggggggtgtggttatcgtgctcctacgctggcccctcctcggcatgttcctggaaacctacggattcttcagcctctttaagggctttttccctgtcgccttcggcttcctgggcaatgtctgcaacatccccttcctgggtgcgctgttccggagacttcaaggcactagctcgatggtctgaaaaacagagatgagctccttgaacttggatcattggttgagggggctagagggagaatgggaaccaccccctcagtcccctgcactgactcactccccgacatatccggacctccccaagtccagaaggaaggaatggagctgagcaactgacgtcaaatccccaagtcgactcaagaggctgccaggaagcagagatgcagaccccaaggagactgggctggggctggtatcacaccctcactctatatttatgggaggaaaagtgaagattaaattcccaagttgtgcgtgtgtct

SEQ ID NO: 222 - DNA, 1019 bp, Homo sapiens
agatttggaggttcaacttcaacatggccgaagcaagtagcgccaatctaggcagcggctgtgaggaaaaaaggcatgaggggtcgtcttcggaatctgtgccacccggcactaccatttcgagggtgaagctcctcgacaccatggtggacacttttcttcagaagctggtcgccgccggcagctaccagagattcactgactgctataagtgcttctaccagttgcagcctgcgatgacacagcgaatctatgacaagtttatagctcagttgcagacatctatccgggaggaaatctctgacatcaaagaggaggggaacctagaagctgtcttgaatgccttggataaaattgtggaagaaggcaaagtccgcaaagagccagcctgcaacgggacaccctgcggcgccatgtgcagaaacaggaggccgagaaccagcagctggcagatgccgtcctggcagggcggaggcaggtggaggagctgcagctacaggtccaggcccagcagcaggcctggcaggctctacacagagaacagagggagctggttgctgtgctgagggagcctgagtgaggagaccgccagccccagaagcagagggcagtcaaggtcaagagcctgtggtccagcatgcctggcctgggcgggctacctctgagaacggctgaaatggtgcccagtccatcagcagtgatggaatttgctggaggactaggccagagcaagcctcactgccactgtgcctttggggcacccttggggttggacatacaccccctttagattcctctgtttcttctacctggataattcttggccatgttctctcttctctaggttcaggtcagctctgcccctccgcccccctcctgctggttccccagcccttttccctggccctggcttggagaatctgttttcaatctccactgattgcccccttgctggccagcccaggggcctttaccatgttctctccacatccgtaaataaacttccttcactacactgt

SEQ ID NO: 223 - DNA, 2708 bp, Homo sapiens
aagccttcccggcttccagcccagacaccagccagccagtggcgttcctggctcctcgggattttccttttcctccgaagctgctgattcatccccaggctggagtcaggctcagctgtggggctgggagcatgggctctcaggctgctgctgagtggaggaactgggcctcctgggaggtgtcctccagcctctctggatgctccatggggtgcttcaaggatgaccgcatcgtcttctggacttggatgttctccacctacttcatggagaaatgggctccccggcaggacgacatgcttttctatgtgcgccggaagctggcgtactccggcagcgaaagcggtgcagacgggaggaaggcagctgagcctgaggtggaggtggaggtgtaccggcgggactccaagaagctgccaggcctgggagaccctgacatcgactgggaggagagcgtctgcctgaatctcatcctgcagaagctggactacatggtgacctgtgcggtgtgcacacgtgctgacggcggggacattcacatccataagaagaaatctcagcaagtgttcgcgtcccccagtaaacaccccatggacagcaagggggaggagtccaagatcagctaccccaacatcttcttcatgattgacagcttcgaggaggtgttcagcgacatgaccgtaggggaaggagagatggtctgtgtggagctggtggctagtgacaaaaccaacacgttccagggggtcatctttcagggctccatccgctacgaggcgctcaagaaggtgtatgacaaccgggtgagcgtggccgcccgcatggcacagaagatgtcgtttggcttctacaagtacagcaacatggagtttgtgcgcatgaagggcccccagggcaagggccacgccgagatggcggtcagccgagtgtctacaggtgacacatccccctgtgggactgaagaggactccagcccagcttcgcccatgcacgagcgggtgacctccttcagcacaccccccaccccagaacggaacaaccggcctgccttcttctccccatccctcaagaggaaggtgccccggaaccggatcgctgagatgaagaagtcgcactcggccaacgacagcgaggagttcttccgggaggacgacggtggagccgatctgcacaatgcaaccaacctgcggtctcggtccctgtcgggcacaggacggtccctggtcgggtcctggctgaagctgaacagagcagatggaaacttccttctctatgcacacttaacctacgtcacgttgccgctgcatcggattttaacagacatcctggaagttcggcagaagcccatcctgatgacctagccgcgtgcggagcctgcgcagagccccggccgggcccagccctcggagtgctgccaagtgcctacctgtccaccgccaccggggtctgcgatggcacgccagtgctggagccgcagccaggcgaggccactcgactcccggggccggggccgactccacgaacaccagcccaaactgaagtgcctcttccctcccctgctggcgctgctccgccctgtgccccccgcccatcgccccccacccatctctggagagccctctgcacccaaagaggactagagatgccgagcggccatgagagagagcggaaggagcagctgatgcccagagcggggccagagcggcgggtctatgttcacgtccccccagcagcaggcggaaccacccagccagggcactcagtgcattggactgtccacatgttcttgaggaaagccggtggaagattctggaatgccgtgcggatgaacttcagcgcccgagtcagtcccagctcatcctccccagtttaccactttgttctaataggagatgggaacacgagaagtttgatggctttgccctgggctgggaatacctcacccacgcccagttccagaaaggcctccagctgagcagacggccccgatcccgccagaacggccttttgcttccagccaaagaacaccgccaacacgcacacctccaacctgggacatcccacgctgggcctcgcacggaggaacctgcagaatttggattctgagggtagtcgggaggcctcggtagccaggcagaacaggatatctgccaaagggtgtctgatgtggggtggggctggcatcctcccaggaaggttctaggtgggaccccgtcttctgggggcgggggtgtcttttcatcttccctggtttcctagaactcacttcctttgacggcgtgtgttggtcccatctctcagaccagctcactgaggcagaggagttgctcagaggctcacatgggcacccccattggttcgtgtgagcagctgcccagccccaggcctgccctcggcctggtccagcatgaaggcgtttccatctgcaaggatgcacggtaccctccccgagagcaggcctgtcccctacccaactgggaataaactggaagctgggtctctttgttgctatgtttttttgtttgaagttcccaggaatatttgaggggttccggtgatgtgtttagggatcttctctgtgggggaaaaggaagaggagggtcttgttctcccatctgtttattctttgggctctgggaacaggggactactttggggctttctccagacttttgtatgttgttattaaaagcgagctattgcatttc

SEQ ID NO: 224 - DNA, 2884 bp, Homo sapiens
ctgactttccagagcccagcacagtacctgggatatctgaggcacctagtaaacaattattgatcaaaggaagccaacataggttgatgaagaaggtaattgcgaatgaatgaatttctatgtggtcatactgagaatattagtgagtggatttttacagaaatttgtggtgcatgaattgctgaatatttggtttctcatacagatgtgtgagatgccagtaaacacaccagaaagtccctggaaggtgagtcctgaagaggaacaaaaacgtaaagacttgaggaaaagccatctcgtattcagcattgaccccaaaggttgtgaagatgtggatgacacactctcagtcagaaccttaaataatggcaacctggaacttggggtccacatcgcagatgtaacacactttgtggcaccaaattcttacattgatattgaagctagaacaaggtaatgctatttgaaatcagctctatggttgtgtgtatgtgactggatattttgtgtctgtactagtttcaggtgttcaaagatctcatgtttgtgcaattttgaaggtcccttccagaaaaaaaaagttgaggtccactctccattttcctttagaaaaacagtaccttgatcaatttacctttgctttttaacataaccttttcacacattgtttcctactaaatcgaaatgggttaaattttcatgtagtaatatactattttttaaaaatactggatcattacactccagtttttcttatacgacaaagattcatgtcacttgctctttctttctcttatcagtggaagaatattcagcccaaagcagtgtcacttagaaaagtgggaccatgggaatagttttattacccagtctgctgcactttatgaaacagcaacagccttggggaatctgtagtgagattttggccatttacctccctgcggcccacacagtcagcagttctgcttctccctgctaaaggtcgcgttgccgcgtgtgtgtcattcacagggccaccacttattatctagcagatcgtcgctatgacatgctgccttccgtcctcagtgcagatttgtgttcccttctgggaggcgttgataggtgagtttatggcttttgtcttcaaagcttgtcctggcccttctgtggctcctgatgctgcctgcttctggcctcatgtttcttctctgctatgccccaccccagccctgtgtctcccctctgacctctcaacctcacccccgaccccaaccccacaccacttatctttaggcagctttatttctctagccttccctgccctttccctcctctcttctgtctgctagcagtggggctctgcgtctccctctgttgctggctttttaaagtcagctaaaatctgagaacaaatgtatgtagctttgtgcttatgcattccctggcggaagttgtttggcatgaggatcatgaactcggggagttttttgtttgttcatttgttgagtttaaactttgtttctctttgaatagctaatagaatcatataggcccgaactcatatgtcccaagaggtatttaatgaaaggttcctccctatcactttccctcacttaccagttccgtattagtttttctagatataatacatacatgaatatgcatatgtgatcttttttacacaaatggttgcattttatatatatatactgtttagcaccttccttttaaaaaagaacttaatggtatcttggagatcattccgtattaataacagttgcactatctatggaaatttggatagtttccaatcttttggtattacaaacaaagctgtactgagttaactttgaacataagtcatttcacattttcatttttatttttattttttgagacggagtttcacatgttgcccaggctggtcttgaactcctgtgctcaagtgatccttccgccttggccacccaaaaagctgggcttacacctgtaatcgcagcactttgggcaggagaattgctcaagtccaggagattgaggcagcagtgagcagtgatcatgccattgcactccagcctgggtgacagagcaagatcctgtctcaaaaaaacaaaaaacaaaaaaagccagatgaatttgaatagtgatgttgtcaatgttactgtttttgtaggtatgctgtaagcatcatgtgggaactggataaagcctcttatgaaattaagaaagtgtggtatggcagaaccattattcgatcagcatacaaactgttctatgaagcagcccaagaactactggatggaaacttaagcgttgttgatgatattccagaattcaaagacttgaatgagaagagcagacaagccaagctggaggagttggtgtgggcaattggaaagctgaccgacatagctcgccatgtcagagctaaacgagacggatgtggtgccctggaactggaaggggtagaggtttgcgtacagctagatgacaaaaagaacattcacgacctcatccccaagcagcccctggaagtccacgagacagtggctgaatgcatgatcctggccaaccactgggtcgccaaaaagatctgggagagcttccctcatcaggccttgctgcgccagcaccctcctccacaccaggagttcttttcagaactccgggaatgtgctaaagccaaaggcttcttcatagatacacggtattcctcttttgagggggcagaggaatggagtggcatgctgtatatttagttatcttacagttgttcttaaaatgtgacagccagatctttgaccaaaaagagaaaacagattcttggctctcctcatttttgaagacacatttttccctcttcattgttatgtatagagacttaaaacaagtttatttaggc

SEQ ID NO: 225 - DNA, 1513 bp, Homo sapiens
ttgcataagtaatgaggagctgaatggaaaccaccaagacaatggggaatatgtctccaggacatttcagagaccttcagatagcccctctcataacaggcttgggggtctaggagggaaaaatggtttcctgggccagggacaggcccagggccctgctgctctttgcagcttcgggacattgtgccctgtaccccagccactccacctcttggccatgactaaaaggggccaaggtatagcttgggctgttgcttcagagggtgcaagccccaagccttggtggctttcatatggtgttgtgcctgtgggtgtgcagaagacaagagttgagctttgggaacctctgcctcaatttcagaggatgtatggaaacacctggatgtccaggcagaagtctgctgcatgggaggagcctacatgtagaacctctactatggcaaggcataggggaaatgtggggttggagtccccacacagagtccccactggggcactacctagtggagctgtgaaaagaggaccactgtcctccagacccttgaaatgcagatccactgacagcttgcattgtgcacctggaaatgcaggcactcaaggccagcccatgaaagcagctgcaggggctgcaccctgcagggccacaggagtggagctgcccaactccttgaaagaccaccctttccttgtatcatcatgccttggatgtgagacatggagtcaagggagatcatttcagagctttaatatttaatgactgccccactgggttttggacttgcatggggcctatggccccttttattggtctatttctcccatttgtaatgggagaacttacctaattcttgtacttttattgtatcttggaagtaacttacttgcttttgattttatgtgctcataggtggaaagggacttgccttgtctcaggcgagactttggacttatacttttgggttaacgctggaatgagtttagactttgggggactgttggaaagcatgattgtattctgaaatgtgagaaaggcatgagatttgggaggaaccagagatggaaatgatatggtttggctctgtgtccccacctaaatgtcatctctaattgtaatcctcatgtgttgagggaaggtcctggtgggtggtgattagatcataggggcggtttcccctatgctgttctcatgataatgagtgagttctcaagatctgatggtttaaaagtgtttggcagatccccaccaccaccaccacctcttctgctgccttgtaaagaaggtacttgcttgccttttaccttccaccatgattgtaagtttcctgaggcctccccagccttttttctttataaattacccagtctcaagtagctctttatagcagtgtgaaaatggacaaatacaaaattcattaaaatacctccaaatttaatatggaattatgtttacatttaagttatcaatatcaaaagctctatcagttgtcaataaatataactgggaatgtcctag

SEQ ID NO: 226 - DNA, 1919 bp, Homo sapiens
cttgagtgaattcttttatgccacgtaccagctttcacacttccagagcatatctgttttaggcaacctggaggccaggatggtggatactgttttgtatgacaacactcagctacagctaaaggcagagtcaccatgggaggctttggactggggacagaagctttgggaagtagtgcatgctgctgtgcccggttacatggggcggcagaacgagctgacaatctcaccagggcttggccatcatgatgactatacacagaatcatagtttccagaagaaaaccagtgggctgctgccaccgtcccctgtcctggacagctccaaacagtaccaaaacatcctcaaatcagggactctctacaggctgactgtccaaaacaactggaaggcatttacatttgtgctgagcagggcttaccttatggcttttcagcctggcaagctagacgaggatccactgttgagctacaacgtggacgtgtgtctggctgtccagatggacaacctggatggctgcgactcttgctttcaagtcattttcccccaggatgtccttcgcctccgagctgagacccgacagagggctcaggaatggatggaggctctgaagatagctgccaatgtggcgaggagttcagagcaaaacctgcaagtcacactgaggaacaaacccaaggatcaaatgggtgggcatgaactcaggaagaacaaacgccaatctgtgactaccagcttcctgagcattttgacgactttgtctttggaacgaggactcactgctcagagtttcaaatgtgcaggctgccagcgatccataggtctttccaatgggaaagccaaggtgtgcaactacagtgggtggtattactgcagtagctgccacgtggatgacagctttctcattccagcacgcatagtccacaactgggatacttcaaagtataaggtgtcgaagcaggccaaggagtttctggagtacgtgtacgaagagccgctcatcgacatccagcaggagaacgccatgctgtaccaccacgcagagccgctggccgccgtgctgcggctgcggcagcggctgaagtcgctccgagcctatttgttcagctgccgggcagcggtggcagaggatctccgccgcagaattttccccagagaatacctccttcaacagatccacctgtattcacttgccgacctgcagcaggtaatagagggaaagctggctccattcttgggcaaggtcattaaatttgccacctcacacgtgtacagctgcagtctttgtagccagaaggggttcatctgtgaaatctgtaacaatggagagatcctctacccttttgaggatatttcaacaagcagattcggagacccatatgcagatttattacaaggatatgtggcctgatgctgagatggagtttcactcttgttggccgggctggggtgcaatggcgcgacctcggctcactgcaacctctgcctcctgggttcgggcgattctcctgtctcggcctccggtgtatctgggattgcaggcacccaccaccatgccccactagttttttttgtgtttttagtggagactgggtttcatcatgttggccaggctggtgtcaaactcctaacctcaggtgatcctcccccgcctcggcctcccagagtgctgggattacaggcgtgagccactgcacccagcctcaaacacaaattaaatacatacctctctttaacctaaatagaaaaaccgtaaagcccagattgcaagatttttaaatacaataagaatatcctgaattataaaactgctttgctaaagcctaatccaggatttatcctcctagaggactacaaggaaagcacagccttgggagagataaacattttgacaaaacaatgataaaattccacatcct

SEQ ID NO: 227 - DNA, 1672 bp, Homo sapiens
atccgaggccgcgcgcgccgcgggcctggggaatggagcgacgccgggggcatcggagcctagctcagctcagctccgctccccagccttctccgcggcagcctcttcagcctgctggccgcaagtgcgccctctaaaggccccaaatgccctgtacacaccaggtgaagagcgcggaagcgcctgcagagcagaattaaagaaaaatcttggaaaatgtataccagtcatgaagatattgggtatgattttgaagatggccccaaagacaaaaagacactgaagccccacccaaacattgatggcggatgggcttggatgatggtgctctcctctttctttgtgcacatcctcatcatgggctcccagatggccctgggtgtcctcaacgtggaatggctggaagaattccaccagagccgcggcctgaccgcctgggtcagctccctcagcatgggcatcaccttgatagtgggccctttcatcggcttgttcattaacacctgtgggtgccgccagactgcgatcattggagggctcgtcaactccctgggctgggtgttgagtgcctatgctgcaaacgtgcattatctcttcattacttttggagtcgcagctggcctgggcagcgggatggcctacctgccagcggtggtcatggtgggcaggtatttccagaagagacgcgccctcgcccagggcctcagcaccacggggaccggattcggtacgttcctaatgactgtgctgctgaagtacctgtgcgcagagtacggctggaggaatgccatgttgatccaaggtgccgtttccctaaacctgtgtgtttgtggggcgctcatgaggcccctctctcctggtaaaaacccaaacgacccaggagagaaagatgtgcgtggcctgccagcgcactccacagaatctgtgaagtcaactggacagcagggaagaacagaagagaaggatggtgggctcgggaacgaggagaccctctgcgacctgcaagcccaggagtgccccgatcaggccgggcacaggaagaacatgtgtgccctccggattctgaagactgtcagctggctcaccatgagagtcaggaagggcttcgaggactggtattcgggctactttgggacagcctctctatttacaaatcgaatgtttgtagcctttattttctgggctttgtttgcatacagcagctttgtcatccccttcattcacctcccagaaatcgtcaatttgtataacttatcggagcaaaacgacgttttccctctgacgtcaattatagcaatagttcacatctttggaaaagtgatcctgggcgtcatagccgacttgccttgcattagtgtttggaatgtcttcctgttggccaacttcacccttgtcctcagtatttttattctgccgttgatgcacacgtacgctggcctggcggtcatctgtgcgctgatagggttttccagtggttatttctccctaatgcccgtagtgactgaagacttggttggcattgaacacctggccaatgcctacggcatcatcatctgtgctaatggcatctctgcattgctgggaccaccttttgcaggtaaactctctgaggttttaagagctcagagtgcatgtacatatggtgcgttatgttataaagtcccagataaag

SEQ ID NO: 228 - DNA, 1711 bp, Homo sapiens
atctgcccggggccgctaagggagcgcaaggtcaagttcgccttggccccgcctccagctcaggtactaggggatctagacctgaggctgcccgggccggaggcagccttgagtcccgagaccaaacgtcgtttccctctcggacctcgggcgccgggccgcgcgctgaccgacagcccctgctaggcccagcaggtcccctagtcccccgcagtcccccgagactcgccgagcgccgttgctgagccctgcaaatagcagctacctgcttcagcctagatcctgccatgaagcggactgctgctccctggctcccactctgatctgcttttcactcttgccttgtctcccaattaataagcagggtggccactgcaacaggtgtggatgtgcctgacaagatgaagagccgaatacctgtggtgctcctggcctgtggctcctttaaccccatcaccaacatgcacctgcgcatgtttgaggtggccagagatcacctacaccaaacagctgtgcctgagctgaagcttctctgtggggcagacgtcttgaagaccttccagacccccaacctctggaaggatgcgcacatccaggaaatagtggagaagtttggcttggtgtgcgtgggccgagtaggtcacgacccaaaaggttacatcgcagaatctcccatcctacggatgcaccagcacaacattcacctggccaaggagcctgtgcagaatgagatcagtgccacatacatcaggcgagccttgggccaagggcagagcgtaaagtacctgattcccgatgctgtcatcacgtacatcaaggaccatggcctctacaccaagggcagtacctggaaaggcaaaagcacccagagcactgagggcaagacaagctagggaggggggactcagcacccacacctcctccaacaagctcctgctggggagagggctgttaaggtttctgttttactttggtttttgcttctccatttttcatttgctttatttctacagtgattctacttctgaagagtcttctgtcccaggaagagataccttctttacaggagaggaaaggtctaaatcacaaggatagacatttatcaaagaagttaaaatggtgtggcaggtcattaggattaggcagaatctctcagagctgctggacaaggaggtctacttattttgtgtggatggtaattatggcatgcacgctgaatgcagttctgagcatggcagcggcccctgagggtcagatcagaattgcccacaatgtgttttttaactaggaccaggtgcagcatgctagtcttgattggaaagatttgacaggatgctaattactgaacagtgggttttgtcaacgccctggtttcagaatatgaactgaggagtcaaacagttggaaacagcacattgctgatttacactggatcttgccttagaaaccattgtctgcctgcctaaccagcctttcataaaatttaaacaaaactctttctacgtagtgatcctcaagcaatatttttgatacagcaagtgtcaaacttgctatagcataaaagccggggctcctgatttccaggtttctaaaaaggaactgaggtaaaacagatgcctgaccgttttaaaggatcttttttaatgttttatgactgcctgtctgtttgaatactggcaaagggataaataataaattgacatcaaaaagt

SEQ ID NO: 229 - DNA, 1840 bp, Homo sapiens
ttgttggacaagatgaagattcccttcatagtgtccagttgcacaaatgggtaactatcaggaatatctgaagacattggcttctccactgcgagagattgatccagaccaacccaaaagactgcatacttttggcaatccgtttaaacaagataagaagggaatgatgattgatgaagcagatgagtttgtagcagggccacaaaacaaagtgaaacgtccaggggaacccaacagtcctatgtcatctaagagaaggcggagtatgtccctgctgttgaggaaaccacaaacaccacctactgtaactaaccatgtgggcggaaagggaccaccctcagcctcgtggttcccatcttatccaaacctcataaaacccacccttgtacatacagatgctactatcattcacgatggccatgaggagaagatggaaaatggtcagatcacacctgatggcttcctgtcaaaatctgctccatcagagcttataaatatgacaggagatcttatgccacccaaccaagtggattctctgtctgacgacttcacaagtctcagcaaagatgggctgattcaaaaacctggtagtaacgcatttgtaggaggagccaaaaactgcagtctctccgtagatgaccaaaaagacccagtagcatctactttgggagctatgccaaatacattacaaatcactcctgctatggcacaaggaatcaatgctgatataaaacatcaattaatgaaggaagttcgaaagtttggtcgaaaatatgaaagaattttcattttgcttgaagaagtgcaaggacctctggagatgaagaaacagtttgttgaatttaccatcaaggaagccgcaaggtttaaaagacgagtcctaattcagtaccttgagaaggtactagaaaaaataaattcccaccaccttcacaacaacattagtcacatcaacagcagatcatcatgttagtgcaaagaccagtgagaaaaaaatgacaagttttctgtgctgtaggatggaacaggatattgttgaagcctcctggaatgtttgagtcaaggggattgctttccagatgctaagaagcagcagtggggcttttgaattttatgattatctggcagtgaaagctgggcttttgccttaataattttttaaagtatgaattgttttgttttgttttcctcaattgaggaagctgatgttattaattcacaggctaaattcggtaaacaccactgcccctaccacgggtaatgagaggtcactcacttgaactttgccattccaggcattctcagagtggcgaggggccacctgcaagtggagcacaacttggtgctcttactgtgtccttcagaaagaataggtgtacagaaaggaaatggcaatcttatgtgtgctgaacaaagttttcaacaattcctagttgtgccttttaaaccatgcaatattcaggatagtttgaatcaaagaagtaagaagctgctatttgggtaacttatttctctgtgggaaggggcagggagagtcaccaaacaatctacctccaactctcttctcttttgtctagagacattacaaagtgcacttgaggctgcccccaacctctgacatttgttcttgcatgtgatgatagaaagtcttcagatggacttatacattctgtgctttggaagcacaagaagaacaaaatatgtgtatatttcctttaatgtttatacaaaagtttatatggagcagtattgttatgtttgtatgaatttgcaaaaattaaagtgtacaaagagattttgattttgcatatataaaataaatcattttattgattttcac

SEQ ID NO: 230 - DNA, 2448 bp, Homo sapiens
ttgcctacacttaaactcaacttatgtgtattgtaaatctctaagacaatattagtcttaccaaacttacctgaccattttgttttatttttatttttagccaagaatatcatggaactaatgatacaagaaaaatcctttggtaactccctgctcctgaattctgccatgcagccagatctgacagtgagccggacatacagcggacccatctgtctgcaggaccctctggacaaggagctcatgacagagtcctcactcttcaaccctttgtcggacatcaaagtgaaagtccagagctcgttcatggtttccctgggagtgtctgagagagctgagtaccacggcaagaatcattccaggacttttccccatggaaacaaccacagctttagtacaatgcatcccagaaataaaatgccctacatccaaaatctgtcatcactccccacaaggacagaactgaggacaactggtgtctttggccatttaggggggcgcttagtaatgccaaataaaggggtgagcttactcataccacacggtgccatcccagaggagaattcttgggagatttatatgtccatcaaccaaggtgaacccagcctccagtcagatggctctgaggtgctcctgagtcctgaagtcacctgtggtcctccagacatgatcgtcaccactccctttgcattgaccatcccgcactgtgcagatgtcagttctgagcattggaatatccatttaaagaagaggacacagcagggcaaatgggaggaagtgatgtcagtggaagatgaatctacatcctgttactgccttttggacccctttgcgtgtcatgtgctcctggacagctttgggacctatgcgctcactggagagccaatcacagactgtgccgtgaagcaactgaaggtggcggtttttggctgcatgtcctgtaactccctggattacaacttgagagtttactgtgtggacaataccccttgtgcatttcaggaagtggtttcagatgaaaggcatcaaggtggacagctcctggaagaaccaaaattgctgcatttcaaagggaatacctttagtcttcagatttctgtccttgatattcccccattcctctggagaattaaaccattcactgcctgccaggaagtcccgttctcccgcgtgtggtgcagtaaccggcagcccctgcactgtgccttctccctggagcgttatacgcccactaccacccagctgtcctgcaaaatctgcattcggcagctcaaaggccatgaacagatcctccaagtgcagacatcaatcctagagagtgaacgagaaaccatcactttcttcgcacaagaggacagcactttccctgcacagactggccccaaagccttcaaaattccctactccatcagacagcggatttgtgctacatttgatacccccaatgccaaaggcaaggactggcagatgttagcacagaaaaacagcatcaacaggaatttatcttatttcgctacacaaagtagcccatctgctgtcattttgaacctgtgggaagctcgtcatcagcatgatggtgatcttgactccctggcctgtgcccttgaagagattgggaggacacacacgaaactctcaaacatttcagaatcccagcttgatgaagccgacttcaactacagcaggcaaaatggactctagtccacttcctcccatgagacagagtgatggccagcttggggacatttgctttaaatgggaaagaggccgctttctgcccagtggcgttgggggaattcagccttcatttataatcagtgagattcccctgttgaagaaactaaattttatataggtaaaacatgttaatagggaagagtacaagctctcttacatataagagggctctactatctccttggaatccacatttgggttaactcctcagatttggagtggcaaggataaaagtgagggcagaagtagctgtgggaaaagatgagctatgataatgctgggaaggcagagattgattaagtgcatgctttgaaataggtttttaatgatgtgccccaaagggccagctgattctggtactagattgtcagagttttctaccaactggcatctgtgatgtcagagatcattgtaaaaatggcttttagacgtgaaacagggttgccaacccatttgtatgacttcaacaacgtcaaggagggcatttagaatttagaatctgagcacatcacaccagcaccagctccctgtctcttctagccacttaatggagacacaatggagaggtaagacagaccacaaactagttcttatagtgtactccaccttttacttttttcctgagacaaatctacccttattctttcttcctcttccttaccccttgcagtagggaggtatcaaggagcataattaaacttgtcaatacgg

SEQ ID NO: 231 - DNA, 2672 bp, Homo sapiens
aggacccgatgggtgcccggacgcggaagaactggcccagcggaggttcccgcttctgaagcgtgggaggcggaagagactgcagcccccgcccccgtccccaagcctccgccccttagcccccgcccccagctgccagtccccagcagctcagtcctgcagtgagagtcttgggagtccatagctaagcaccaggagctgagcactgcccgctgtgcctgcctgcaagtctgacatggctcaggagaaaatggagctggaccttgagcctgacacatcttatgggggaaccctgaggagatccagcagcgctcccctaatccatgggctcagtgacctttcacaggttttccaaccttacacacttagaactcggaggaatagtacaacaattatgagccgtcacagcctgttgctgtcatcctcacctaatcgtattcctagtagcagactgcatcagatcaaaagggaagaaggcctggatatggtgaacagagaaactgcacatgaaagggaaatgcaaacggcaatgcagataagccaatcatgggatgagagcttgagcctgagtgacagtgattttgacaagccggagaaattatattctcctaagagaattgacttcactccagtttctccagcaccttcacccaccaggggattcggaaagatgttcgtgagcagcagtggattgccaccaagtccagttcccagtccaagacgattttcaaggagaagtcagagtccagtcaagtgcattagacccagtgttcttggtcctcttaaaagaaaaggtgaaatggagacagaaagtcagcccaagagactcttccaaggcactaccaatatgttatctccagatgccgcgcaactgtctgatctcagttcatggtggtgttatcaaggagaagaaattcctgccttgaccagatgtgtggagcatctacaaatgaatgaatagttatttacacacaaaccactgtgtacaaaagcgtccatggagctgtcagtgtctcgagtggtattatgaggcctcaggtgccttggggtacattgtcatgctataagggatgtatatcataaggtatggtggaagaggggccttatgtgaatgattgccacatactgtttctgttgctgctttttttccgattcctttttgtcattggatttgtttgttttgtcatgtggtgaatggtgttttagttattgtgttgctgccagaatcagaatccagttcttgttcttactgccttatagttattgtgttgccaccagaatcagaatccagttcttgttcatactgccttgtagtgagggcagtttaatatctacaaagaagcttttagaagctgaaaaagtcaatgtgattgtgcattctgcttttaagaagctgtttcagctatgaactgtgtatgtgctataagtgtgaggtaccataagttatttaatttttaaaagaggaaactcctgagtgagctgtttaagaaatctgagtgtgatctattgttacgttatttataactaggtaaaatgtctgtcgtgatagatttcttttaacgttcagatactgtggttgggttgtctatatttaatatgcagatttgcctgctggaatcataatccatttttaagtgaatgtaagaaatgaaaactactgcatttgtgtcttttgaaggcaaggatccttggattttaaaggaagagtatgtgctttgaaggcactcagagactagtaatagcatatggtttgaagggaaacccattctctttcaattacaagagagcatcacttagcgtgcagtacttctgttacagcatccgatgtgtcctttattttaaattgtaaccataacagccattaatggctttatttcttgtattgctctcatctgggaaaagtctctacttcttcaaacgtaacataaatctattatgaagcttgtcccctagtatgccattataaagaaaaaattcttcgatggtatgcagtgtatctattctgtttgtaaaagatcatgtcaaaatgttctgcctctataatgataatagatggttttgtctttcaggatatttatccacctactgtcttctttgccttaaagggacacttggccatcatttttaggctcgaacttaacactgttaagaaataactgaaatatgatggtatttgcattaatttttgaaattcaatggtgggatagaattaggtcaggaaatggaagttgttccaatggtgtgagaactaggagacaagatgattcactttattatttaaaccaagcttcatttttagtttttgttgtttaaatggactggaaagttaagtttttgcagggattgttttgaaataaagagatatgctaactcacagatgaactttgttaagacccctttatttttatataaagtctaatatttgaaaagcgattgttataaagtaaaattctctcttcctattctaatatatatcatatatttcaggcttctatttgaaaacaggtataagagatgatatgatacaaccctatagataatgttttttgcttgattgacttatataatcactgtttcatgattactgcttttggaataataggaagttttgtgaaatgctggccttgtgtatatcttagaatgcaaatttaataaagtgtgtatacatgcat

SEQ ID NO: 232 - DNA, 2245 bp, Homo sapiens
acattgactgtaaaggaaccaatgtgaagagtggtgtttcctgagcaaacggtgacttaaaaaaaaaaaaaaaaaagtggtggggtggaggtcagcagtgccacagaacaaactggagttaagaaatgtcgttcttcagatttaaaaagaaaacctttactgaatcagctgagtgttaataatacgaatttccttttcttgccaattctgatctgaacagaaaatccaagaacagggatatgtgtggattacagttttctctgccttgcctacgactgtttctggttgttacctgttatcttttattattactccacaaagaaatacttggatgttcgtctgtttgtcagctctgcactgggagacaaattaactgccgtaacttaggcctttcgagtattcctaagaattttcctgaaagtacagtttttctgtatctgactgggaataatatatcttatataaatgaaagtgaattaacaggacttcattctcttgtagcattgtatttggataattctaacattctgtatgtatatccaaaagcctttgttcaattgaggcatctatattttctatttctaaataataatttcatcaaacgcttagatcctggaatatttaagggacttttaaatcttcgtaatttatatttacagtataatcaggtatcttttgttccgagaggagtatttaatgatctagtttcagttcagtacttaaatctacaaaggaatcgcctcactgtccttgggagtggtacctttgttggtatggttgctcttcggatacttgatttatcaaacaataacattttgaggatatcagaatcaggctttcaacatcttgaaaaccttgcttgtttgtatttaggaagtaataatttaacaaaagtaccatcaaatgcctttgaagtacttaaaagtcttagaagactttctttgtctcataatcctattgaagcaatacagccctttgcatttaaaggacttgccaatctggaatacctcctcctgaaaaattcaagaattaggaatgttactagggatgggtttagtggaattaataatcttaaacatttgatcttaagtcataatgatttagagaatttaaattctgacacattcagtttgttaaagaatttaatttaccttaagttagatagaaacagaataattagcattgataatgatacatttgaaaatatgggagcatctttgaagatccttaatctgtcatttaataatcttacagccttgcatccaagggtccttaagccgttgtcttcattgattcatcttcaggcaaattctaatccttgggaatgtaactgcaaacttttgggccttcgagactggctagcatcttcagccattactctaaacatctattgtcagaatcccccatccatgcgtggcagagcattacgttatattaacattacaaattgtgttacatcttcaataaatgtatccagagcttgggctgttgtaaaatctcctcatattcatcacaagactactgcgctaatgatggcctggcataaagtaaccacaaatggcagtcctctggaaaatactgagactgagaacattactttctgggaacgaattcctacttcacctgctggtagattttttcaagagaatgcctttggtaatccattagagactacagcagtgttacctgtgcaaatacaacttactacttctgttaccttgaacttggaaaaaaacagtgctctaccgaatgatgctgcttcaatgtcagggaaaacatctctaatttgtacacaagaagttgagaagttgaatgaggcttttgacattttgctagcttttttcatcttagcttgtgttttaatcatttttttgatctacaaagttgttcagtttaaacaaaaactaaaggcatcagaaaactcaagggaaaatagacttgaatactacagcttttatcagtcagcaaggtataatgtaactgcctcaatttgtaacacttccccaaattctctagaaagtcctggcttggagcagattcgacttcataaacaaattgttcctgaaaatgaggcacaggccattctttttgaacattctgctttataactcaactaaatattgtctataagaaacttcagtgccatggacatgatttaaactgaaacctccttatataattatatactttagttggaaatataatgaattatatgaggttagcattattaaaatatgtttttaat

SEQ ID NO: 233 - DNA, 3316 bp, Homo sapiens
acagctcagcgtccgcggagccgggcggcgctgcagctgcacttggctcgtctgtgggtctgacagtcccagctctgcgcggggaacagcggcccggcgctgggtgtgggaggaccaggctgccccaagagcgcggagactcacgcccgctcctctcctgttgcgaccgggagccgggtaggaggcaggcgcgctccctgcggccccgggatgacttctcagcgttcccctctggcgcctttgctgctcctctctctgcacggtgttgcagcatccctggaagtgtcagagagccctgggagtatccaggtggcccggggtcagacagcagtcctgccctgcactttcactaccagcgctgccctcattaacctcaatgtcatttggatggtcactcctctctccaatgccaaccaacctgaacaggtcatcctgtatcagggtggacagatgtttgatggtgccccccggttccacggtagggtaggatttacaggcaccatgccagctaccaatgtctctatctacattaataacactcagttatcagacactggcacctaccagtgcctagtcaacaaccttccagacatagggggcaggaacattggggtcaccggtctcacagtgttagttcccccttctgccccacactgccaaatccaaggatcccaggatattggcagcgatgtcatcctgctctgtagctcagaggaaggcattcctcgaccaacttacctttgggagaagttagacaataccctcaaactacctccaacagctactcaggaccaggtccagggaacagtcaccatccggaacatcagtgccctgtcttcagcccagcccaggaacattggactaatagctggagccattggcactggtgcagttattatcattttttgcattgcactaattttaggggcattcttttactggagaagcaaaaataaagaggaggaagaagaagaaattcctaatgaaataagagaggatgatcttccacccaagtgttcttctgccaaagcatttcacactgagatttcctcctcggacaacaacacactaacctcttccaatgcctacaacagtcgatactggagcaacaatccaaaagttcatagaaacacagagtcagtcagccacttcagtgacttgggccaatctttctctttccactcaggcaatgccaacataccatccatttatgctaatgggacccatctggtcccgggtcaacataagactctggtagtgacagccaacagagggtcatcaccacaggtgatgtccaggagcaatggctcagtcagtaggaagcctcggcctccacacactcattcctacaccatcagccacgcaacactggaacgaattggtgcagtacctgtcatggtaccagcccagagtcgggccgggtccttggtataggacatgaggaaatgttgtgttcagaaatgaataaatggaatgccctcatacaagggggagggtggggtggggagtgctgggaaagaaacacttccttataattatattagtaaaatgcacaaagaagaaggcagtgctgttacttggccactaagatgtgtaaaatggactgaaatgctccatcatgaagacttgcttccccaccaaagatgtcctgggattctgctggatctcaaagatgtgccaagccaaggaaaaagatacaagagcagaatagtacttaaaatccaaactgccgcccagatgggcttgttcttcatgcctaacttaataatttttaagagattaaagtgccagatggagtttaaatattgaaattatttaaaaggtaggtgtctttaagaaaataacaagcaaccctgtgatatgttccgtctctcccaattccctcgttatatagagggcttaatggtataaatggttaatattggtcccaacagggctgactcttctatcatataatcaaaactttttacatgagcaaaattcagtaagaaatgggggaagacaaaggaaacgtctttgagaagccccttcatatttatttatttatctcttcctgaaccatgaatttcatatgtggaatattgctatattgacagattcttgcctgtctgtgttattctaggatctgttacaggtccatggcaattactgtttattttttcctggaaaaatatttttttataaaaggctttttttttttaaatacatgagaggcattgggctaagaaagaaaagactgttgtataataccttgttcaatggttgtatttagtgagctcatagaggtccatcatatcatgaccgagctaggttgtgtgggcaggaaggtagggctaaggggttgtagccttgctgggcagcctctcagagcaaggttgttcagatctcccttgctattacagtaggttactattaatgagggcagcacctgatgccttttgtactgaggtatgtaactttctccttatttgacaagtagaagttaacttacttgtcagggagggcagacgtttttttgttctgtttcgtttttcaaaataatgctttttgcaaaagaggtaagactgagactaaaggtgttatcttctggtgtgctcctggaagtgtctaccctacatttgtgtcagctcagggttgcagtgttgcccagatgcattttacatcactgtaaagagattacttttgtggttactacctggcttggctggccttgcggttcaccagattaatttacaaactcccccactttattttgtgctatgtagatctggccatacttgcattagtgactgtcttgccttaaccacacttaagcaacccacaaatttcttctcagatttgtttcctagattacttatgatactcatcccatgtctcaataagagtgtcttttctttctggatgtgttctcttactccctcttaccaccatactttttgctctcttctcctgcaagcgtagtcttcacagggagtggcttcctgacatttttttcagttatgtgaatgaatggaaaccaacagctgctgcaaacactgtttttccaagaaggctacactcagaacctaaccattgccaaccatttcagtattgataaaaagctgaatttactttagcattacttatttttttttccatttgatggttcttactttgtaaaaatttaaataaatgaatgtctatactttttataaagaaaagtgaaaataccatgacactgaaaagatgatgctatcagatgctgtttagaaagcatttatcttgcatttctttattctttctaattatctaaaattcaataaaattttattcatat

SEQ ID NO: 234 - DNA, 2306 bp, Homo sapiens
gttgctgctgctgctaacgccgcctccgggtggtgagccgggggtgggggcggcccgtcctgccctgggaccgggcagacacttccccgcgctgcctctccaacgagccgggcagcaccagccccactatgccccccactgacccctgattgccccgaggccgtcagcgaacccccacgactgcggacccctcctccaccccagcaccctccttgcctgaacaaccctgcctagacaccaggcagctgccacctttgtctgtcctggaacggtggggaggggtctgccctcccgcccatgttccaggggatggagtccccagaggctaggccctagctcagaggctcagattgggctgtgaagaccttgctgcatatgggttcacctgagccaccaggcacgggccatgctgatgataccagctttcagcacgtggtgaggtgtgtatggcttcccgtggactcagcctcttccccgagtcctgtccagatttctgctgtggtacctgtgatgaccaatactgctgctctgacgtgctgaagaaatttgtgtggagcgaggaaaggtgtgctgtgcctgaggccagcgtgcctgccagtgtagagccggtggagcagctgggctcggcgctgaggtttcgccctggctacaacgaccccatgtcagggttcggagcgaccttggccgttggcctgaccatctttgtgctgtctgtcgtcactatcatcatctgcttcacctgctcctgctgctgcctttacaagacgtgccgccgaccacgtccggttgtcaccaccaccacatccaccactgtggtgcatgccccttatcctcagcctccaagtgtgccgcccagctaccctggaccaagctaccagggctaccacaccatgccgcctcagccagggatgccagcagcaccctacccaatgcagtacccaccaccttacccagcccagcccatgggcccaccggcctaccacgagaccctggctggaggagcagccgcgccctaccccgccagccagcctccttacaacccggcctacatggatgccccgaaggcggccctctgagcattccctggcctctctggctgccacttggttatgttgtgtgtgtgcgtgagtggtgtgcaggcgcggttccttacgccccatgtgtgctgtgtgtgtccaggcacggttccttacgccccatgtgtgctgtgtgtgtcctgcctgtatatgtggcttcctctgatgctgacaaggtggggaacaatccttgccagagtgggctgggaccagactttgttctcttcctcacctgaaattatgcttcctaaaatctcaagccaaactcaaagaatggggtggtggggggcaccctgtgaggtggcccctgagaggtgggggcctctccagggcacatctggagttcttctccagcttaccctagggtgaccaagtagggcctgtcacaccagggtggcgcagctttctgtgtgatgcagatgtgtcctggtttcggcagcgtagccagctgctgcttgaggccatggctcgtccccggagttgggggtacccgttgcagagccagggacatgatgcaggcgaagcttgggatctggccaagttggactttgatcctttgggcagatgtcccattgctccctggagcctgtcatgcctgttggggatcaggcagcctcctgatgccagaacacctcaggcagagccctactcagctgtacctgtctgcctggactgtcccctgtccccgcatctcccctgggaccagctggagggccacatgcacacacagcctagctgcccccagggagctctgctgcccttgctggccctgcccttcccacaggtgagcagggctcctgtccaccagcacactcagttctcttccctgcagtgttttcattttattttagccaaacattttgcctgttttctgtttcaaacatgatagttgatatgagactgaaacccctgggttgtggagggaaattggctcagagatggacaacctggcaactgtgagtccctgcttcccgacaccagcctcatggaatatgcaacaactcctgtaccccagtccacggtgttctggcagcagggacacctgggccaatgggccatctggaccaaaggtggggtgtggggccctggatggcagctctggcccagacatgaatacctcgtgttcctcctccctctattactgtttcaccagagctgtcttagctcaaatctgttgtgtttctgagtctagggtctgtacacttgtttataataaatgcaatcgtttgg

SEQ ID NO: 235 - DNA, 2247 bp, Homo sapiens
acaaactcaagcattagcaccaacaagctctgagcatcatcagtctctggaaagccttctgaattagacaagggctgcctcccagcacagctacaaaacactttaaacctgaccagctaaatggataaacctagcctgcatagcttttaaactggggtctcatacagcacaggaggcctacttgcttcaagaactgaaaatccagaggatgaattgctttatctgggaatggcaaaagccagcacaataaggaatgccaggtggtggtggtttccgcacaagagaccaaataagaagaaagctgagagaggggggaaacgtttttggatgacaaaggatgggtttccatttaattacgcagctgaaaggcatgagtgtggtgctggtgctacttcctacactgctgcttgttatgctcacgggtgctcagagagcttgcccaaagaactgcagatgtgatggcaaaattgtgtactgtgagtctcatgctttcgcagatatccctgagaacatctctggagggtcacaaggcttatcattaaggttcaacagcattcagaagctcaaatccaatcagtttgccggccttaaccagcttatatggctttaccttgaccataattacattagctcagtggatgaagatgcatttcaagggatccgtagactgaaagaattaattctaagctccaacaaaattacttatctgcacaataaaacatttcacccagttcccaatctccgcaatctggacctctcctacaataagcttcagacattgcaatctgaacaatttaaaggccttcggaaactcatcattttgcacttgagatctaactcactaaagactgtgcccataagagtttttcaagactgtcggaatcttgattttttggatttgggttacaatcgtcttcgaagcttgtcccgaaatgcatttgctggcctcttgaagttaaaggagctccacctggagcacaaccagttttccaagatcaactttgctcattttccacgtctcttcaacctccgctcaatttacttacaatggaacaggattcgctccattagccaaggtttgacatggacttggagttccttacacaacttggatttatcagggaatgacatccaaggaattgagccgggcacatttaaatgcctccccaatttacaaaaattgaatttggattccaacaagctcaccaatatctcacaggaaactgtcaatgcgtggatatcattaatatccatcacattgtctggaaatatgtgggaatgcagtcggagcatttgtcctttattttattggcttaagaatttcaaaggaaataaggaaagcaccatgatatgtgcgggacctaagcacatccagggtgaaaaggttagtgatgcagtggaaacatataatatctgttctgaagtccaggtggtcaacacagaaagatcacacctggtgccccaaactccccagaagcctctgattatccctagacctaccatcttcaaacctgacgtcacccaatccacctttgaaacaccaagcccttccccagggtttcagattcctggcgcagagcaagagtatgagcatgtttcatttcacaaaattattgccgggagtgtggctctctttctctcagtggccatgatcctcttggtgatctatgtgtcttggaaacgctacccagccagcatgaaacaactccagcaacactctcttatgaagaggcggcggaaaaaggccagagagtctgaaagacaaatgaattcccctttacaggagtattatgtggactacaagcctacaaactctgagaccatggatatatcggttaatggatctgggccctgcacatataccatctctggctccagggaatgtgagatgccacaccacatgaagcccttgccatattacagctatggccagcctgtgatcgggtactgccaggcccaccagccactccatgtcaccaagggctatgagacagtgtctccagagcaggacgaaagccccggcctggagctgggccgagaccacagcttcatcgccaccatcgccaggtcggcagcaccggccatctacctagagagaattgcaaactaacgctgaagccaactcctcactggggagctccatgggggggagggagggccttcatcttaaaggagaatgggtgtccacaatcgcgcaatcgagcaagctcatcgttcctgttaaaacatttatggcatagagaaaag

SEQ ID NO: 236 - DNA, 2775 bp, Homo sapiens
actagaagagaatttctggttatccggtcaccatattcactttccaccccacattcttcagctaaacgcaaagagaagcagtgaaacagccttacccgcttctctcttattaaagaatcactgatgtttttactcaatgaaaggtaaagtaatacccttagccatttattaaacaattcaaccaagagacctcaaagtgtgattgatgataagaataatcaatgccttttcccttccaacatacttgagcagtcatgacaacctaaaaatatcattggttgctttcccattaaaaccaacgttccctgtgggtcttaattctttattttcactcatttggtgctttccaagtcatcttttctttaaagtgcccttcctccaaactttaaaaagtacttccttgacaaaatttctattcattataaaacatttcgatattttaagcttaaattttgcttttgctgaaagcctaccatttggcgtgttaagtatgaaatatagtgcagacttttatcttggttttaagtggggctcaataaaaaacaccagccacttttgtaataatggcatcacagtgtcatcatgtatgcaagcaataaaactctttagggtatggttttatactgaaaatttaatatgaaggccccttcccacaagaatatagataattattaactttctagatgtgatacggtaattcgaattgcagagtataaggaagggaaatgggaaggggcatcattccttggattttaaataacaagaacatttttactttaacaaagaaaatggatagaaaaagcacattttgttttccctgaagtttaatttgacatcaggtttgtgtacttatcttcactaggtgacttaacttaccccaatttttttaaaaattattaaactttttacagaaactaaccttttaaatgtaccctttccccatatatatatacgcacacgtttggattttttttttttaagaacacttgttctagttataaatatataaagaaaacgataaagtttgtggtactgcagggttgttaaagattctttgatgccttctaaaaacttttgtcaaaaatacttttgagttcacaattctgttttacttttccttgtccttactttttggaaacagggtggttgcttttatttgttttctggttatattcaaagccttaagttcttaatctgagcatattgtctgtgataaatttctgatgatctttctggactagatacaacctgagtagcaagcaccaaccggagcaagtaaacttctagggaacaagcgtcttgggttttataggtatctttgctataatgcagaatagattaatgaagatttcctatatcatatgatatttgtgttagtgggtctaagattaagcacatgatatttataagctaaaattaactcaaaagtcaagaatgtcttaatgttttcattcttgaattttgtattctccaagaatgtattagtatatgaactgtggccaaccagttcctattcttcagactgtattgacatctgtagtggatcatgttgcttcttcattcttaccaattttattagaatcaaacttcttgttatttgcatactattatctactatagattctcagctttagaaaatgactatgatacataaagaccactaggtcaacttaaaaaaccctttctgtgaatttacacatgtatgtatatatgtaaaaacactgttgatttgcaattctgtctttccatagaaatgaactttttctatcgaaattgtttaacttaaatattttaacataaattatttacatggatctttatgtataattcatccttatatataccccttaatcacgtagtcatgagaagataactttgctttctttacagaaagggcagagaggaataagataagaaactgaaacaagcaagaatgaagagagatgtgggggagagactgctggtctccagaccacagcaatgtgttttaagataagatgaaatattttaactgcagaagggatataaaatctatgtaattacatgctgatgggatccattgcacccaggtttttgaccttggcctgtaaatgctagactatgatatcttgttattctttttctcctttgggcttttaaaaaataatttcattctcagatcattttctgtactgtttactgaggcaaaaaaaaaaaaaatctgaagtcaatcatggtcttctactttctggactgagcatttggcagaatgcagtatcttttcctgtattttgacatgaaatagcacatggcttctacaagatagttttaacttgttggggtcaccgggagttatatgatggtcaaccccttttcccaaaattcattgtggtagttttagtggaaaacgtaaatcaagaaatctcatatcatactttaataaataaataccaaatacatagtgacatataggtttgggaagaaactagtctgtggggaccattataagagaatcacattatatattacacagtatatggatattggaatgtatcacttgtggggggttctcttcattagcaaaacagtcatgtctgtctgtatataagactttttttttttaaccaaactagcatttcattttgtgagtgacaattgacattttaaaataagcataggccgggcatagtggctcatgcctgtaatcccagcccttgggaggccgaggtgggcagatcacttcaggtcaggagtttgagaccagcctggccaacatggtgaaaccctgtctctact

SEQ ID NO: 237 - DNA, 2298 bp, Homo sapiens
aagacccagccccagaccaggccctagcagttcatagtctgatacggtggttctcagccaggggtgattttgatccccaggtaatatttaacaatgtctggagatgcttctggctgtcgcacttgtgggggctgggaggtatgctattatcatctagcgggtagtggccacggatgctgctaaacatcctactctgctgaggacagtccttcaacaaggagttccccatcccaattgtcaaaagtgccacggttgagaaactttggtctaatgaaagtgtcagaaacatatacagacaccaacagcacagcaggtcagcatgcgggcttcagcgtccagaggaggtacatagaccagcaggcggtgaggtgtcagataaggcttctgagggaagaaactcccctgcagggggtttggaaagaacatgtatggaagggagcaggacacatggaaccaaggaacaactgcagtccttcagtgcacacagcccagagagagaggggagaggagttccaggctagagccacggaagccttggaggctgtgttaaggagggagacttcatccagataggagtggtaaggcattgtgggatgctaagcaggggagggatgtagacagatgcctgctttagaaggcacctcctcctggggatacaggaaccctcaggcactgctggtaagatggtaaattggtgccgctcttctggaatctgtagaaatctgtcattattcggtcacttcagtcttattaagttcatgcatacccacgactgagcagttccactcatggatacatagctcgggggaatattccacaggtccataaagagagatgcatgaggaagttgatcagtgttctttgtggtggtggggagaggaggcagcctgggtatccaccccttgggagagtatgtgtgctgtggagccctgcacagcagttcggggctgccagatgggacctaaaacccagtgctgaggggaaaaagtgtatcaagaatgtatacacaaaagttggccaggcgcggtggcttacttctgtaatgccagcactttgggagcctgaagcgggtggatcacctgagtcaggagttcgagaccagcctgacaaacatggttaaaccccgtctctactagaaatacaaaattggccaggcgtggtggcgcatacctgtaatcccagctactcaggaggctgaggcaggagaatcgcttgaacctgggaggcggaggttgcagtgagccaaggtcgcgccattgcactcctgcctaggcaataagagtgaaactccatctcaaaaaaaaaaaaaaaaaaaaaaaagaatgtacacacaaaagaattcacattttggaagaacacttagaaactgagaagacacagtaaacacactagaggccaggtgtggtggctcatgcctgtaatcccaacactttgagaggccaaggtgggaggatcacttgaggccaggagttcaagaccagcctgggcaacatagtgagacctccatctctataaaacaaaacaaaaaaatgctaataaaacatgctagaatgattgattagggtaaggaggagggctttggggtataaaagggagtaaataaaaaaggaagcagaagaagctcactatgtcatggagtgaaagggctggatggcagggtggacaagagcaccatcagggagacttagccagaaactgctgagagaacagtgaccagaccttgcagcacaaaatggagaggatggccaggcctgcaggagactgaggaaggggattttcagagcctagtggttgacagaatggaggagggaggagggagagggaggagctgagtttggcacccagatttctgggtggatgactaagccaatggagcccacactaagtggtgaacccaggaccaggagcaggttgtggggcaggggatgagttcaatatgggcatggtaagcttgagggactgtgcagcaagctagtggagatatccacagggcagttggctgccgctgtggtctgaatgctgtgtccctgcaaattcatatgaaatccgaacccccaaggtcattatattaggaggtgggggcctttgagaggtgattagggattagtgaatgggattagtgcccttataaaaaagagccttcagagagctccctcactactcacaccatgggaggacactgagaagatggcatctgtgaaccagaaagcaggccctcaccagacaccgaatctgccaggccttgatctcggacttcccagcctccacaactgtgagaaataaatgtttgctgtttac

SEQ ID NO: 238 - DNA, 3057 bp, Homo sapiens
tcattatgctggcaaaggcatgggtacaacctgctctgtgatctaccttctgaaccacacaagcttgtcctgaacgaggttggggctgagtctgttgataacagacccccatttttgggcagaaaaaacagattctgtatgatctacagtatttaacattgtggcaaataaattataaaggaaaaatggaatctcaagtagttacagtctcttggtgtctttcaacattggttttattttgaagtcattttcacccagcattgcaagtttagcagacctcaaaacagaatgccaaagtgatcttaaaattcaaaaatgagtttactttctttgttaaagttctcttttgatgcatatcccccattcatggaatggaagcattatcttgggtgcagcattacacgtagagttaaaatgtggaaacaacccaaacatcctgatatggtttggctctgtgtcaccacccaaatctcatcttgaattgtactctcataattcccatgtgttgtgggaggaacccagtgggagataatttgaatcatgggggcagtttccctcatactgttctcatggtagtgaataactctcacaagaccgggtggttttatcaggggtttccgcttttgcatcttactcattttctcttgcggccgccatgtaagaagtgcctttcacctcctgccatgattctgaggcctccccagccatgtggaactgtaagtccaattaaaccccttttttccccagtctcaggtacgtcttttatcagcagcgtgaaaatggactaatacagtaaattggtaccagtagagcaggtgttgctgcaaagataccgggaaatgtggaagcaactttggaacttggtaacaggcagagattggaacagtttggagggctcagaagaagacaggaaaatgggaaagtttggaacttccttgagacttgttgaatggctttgacaaaaatactgataatgatatggacaatgaaatctagactgaggtggtctcaggtggagatgaggaacctgttgagaactggagcaaaggtgactcttgttatgatttagcaaagagactggcggcattttgcccctgccctggagatttgtggaactctgaacttgagagagatgattaagggtatctggtggaagaaatttctaagcagcaaagcattcaagaggtgactcaagtgttgttaaaggcattcagttttaaaagggaagcagagcattaaaattcagaaaattagcagcttgacaatgcgatagaaaagaaaatcctattttctgaggagaaattcaagctggctgtagatatttgcataagtaacaaggaactgaatgttaatttccaagacaatggggaaaatgtctccagggcatgtcagagacatttgtggcagcctcttctatcacagacctggaggtctaggaagaaaaaatggtaaaaatggttttgtgggcaaggcctagggtccttgtgctgtgtgcagtctaaggacttggtgccctgtttcctagccactccggccatggctgaaaggggccaacatgaagctcaggccatggcttcagagggtgaaagccttaagccttggcaacttccatgtgatgttgagcatgtgggtgcacagaagtcaagaaatggggtttgggaacctctgtctagatttcagaagatgtatggaaatgcctggatgcccaggcagaagtttgctgcaggggcggggctctcatggagaacctcggctagggcagtgcagaagggaaatgtggggttggagccccctcacagagtccctactgggacaccgcctagtggagctgtgagaagaggaccactgtcctccagaccccagaatggtagatcgacttacagcttgtaccaggtgcctggaaaagctgcagatactcaacaccagcccatgaaagcagccaggatggaggctgtaccctgaaagccacagggccagagctgcccaagaccatgggaagccacctcttgcatcagcgtgacctggatgtgagacctggagtaaaaggagaccattttggagctttaaaatttgactgccccactggattttggacttccatgggccctgtaacccctttgttttggccaatttctcccatttggaatggctgtatttacccaatacctgtaccctcattgtatctaggaagtaactagcttgcttttgattttacaggctcataagtggaagggacttgccttgtctcagatgagacttttgaactgtggacttttgggttaatgctgaaatgatttaagactttggggtactgttgggaatgcatgattggttttgaaatgtgaggacataagatttggaggagccaggggtgggatgatatggtttggctctgtgtccccacccaaatttcatcttgaattatactcccataattcccatgtgttatacgtgggacctggtgggagataatttgaatcatgggggtggtttcccccatactgttctcatggtagagaataagtctcatgagatctgatggtttcatcagggggttccgcttttgcatcttactcatttctcttgctgccaccctgtaagaagtatttttaacctaccgccatgattctgaggcctccccagccatgtggaactataagtccaattaaacctctttttcttggcttaatttcttgggtatgtctttatcagcagtgattctattcctatgaaatgtctagaacaggaaaatctatgagacataaagtaattaagtggctgttcaggggatacaggaataggggataataactaaagggttgggagggtgtttttgaaatgctaaaatattctgaagtttactgtggttatggttgcacatacttatgaatatacctaaaaatgttgaattgtacattttaagtagatgaattgtatctaatttgaaccatatctcagtaaagatataaaaatgtttttgggtactaagactaaattagaaagaacataagaggaaatacatattatataagaagaaaagagtaaaaataaatcttt

SEQ ID NO: 239 - DNA, 2464 bp, Homo sapiens
caataatcggagaacaccacaagacatttacaaccaactgaagattgaaccaaggaatagacatagccctgttgcatgttcaacgaaagacaccttcatgacggaactcttgaacagagttgataagaaagcagctccacagacagaaagtggatcaagtaatgcttcctgcaggaatgtgttaaagggcagttctcagggctcctgtctcatcggcagctctatcagtactcaaggaaaccacaagaaaaacatgaaaatcaaagccgatatggaagtaccaaaagactccctggtaaaagaggcaaatgaaaacttgcaagaggatgaagacgatgcagttgcagattctgtatttcagagccacatcatagaatccaactgccagatgagaacattggacagtgggatcggaacctttccactcccagactcgggaaatcgctcgacaggacgctacctatgccagccagactccccagaggacgctgagcctctcctgcctctccagtcagccctttctgcagtttcttccatgagagcccaaacccttgaacgtgaagtgccttcctccacagacggccagcgccctgcagatagcgccattgttcattccacatccgaccccatcatgaccgccagagggatgaggcctcttcagagccgcctccccaaaccagcttcctcaggaaaagtcagttcccaaaagcagaatgaagcagagccaaggcctcagacatgctcatcattcggatatgctgaagacccaatggcaagccagccgcttccagactgggggagtgaagttgctgccaccgggacccaggacaaggcacccagaatgtgtacgtactctgccagcggtggcagtaatagtgacagtgacctggactatggagataatggttttggagctggaaggggacagttagtgaaagcactgaagagcgctgccccagaaattgagacaacttgaagaaacaaaagacgatcccgagaatagattatcgaaaatttccctagagtcattcaataaatttaacagcaatactgtgattttattagaaaaagagaagaactctctgaacaaggttgaaggacagaaggaagaaaaagaaaaaaatgaagagacatctttgagtagttcagataggcctggggtagacaacttggaatctttgagtgattctttatatgatagcttctcttcctgtgccagtcaaggttcaaatgatgtataaaggacatctcttcccttagtgagctgggactggagcgcttaagaaatgatgggtggggggtggggggtgcaccgcttgatagagataacaataaactattgcagtaccagagccttccttgtcaaattcacagcaggcaacccaccagagcttatttctctgacagggcaataaagatagactccatttattgtgtttcaagaggattaagcgtaaacacatctatgatacagaatccttaattttgcactttttttgaatatttgtacagaagttgtaaattttttggaagagaaattatatttgtagcaaaaaaagacagcaataaatggaatcagtgccatgctcttgaaataatgtactaagtcttagaagttgatgataatatatattttttaaaatcccaactgaagtttttgtgaagttcgttgtcctggtcctcaaattgtttgtgggtacactctgtaaacctacaacagggcctgccaaaaaatcggagggttcctcctcatctccatctcacaaatctcaatttgatggaaatgttcattttagtgtaatttcagattcgttgccagagattcaggtgatagtaataagtgtcattctgcttctgctgaaaaatgaaaagggtcctgaagtgtggacactgattgggagtgtgacattgtatcagaaatgaccgaattctattcccaataccagtttttccttccagacatttctttggattgtcttttacttagtgcttctctatgatcctgaatattatttgatttttatcttcttgctctttttattaaaatctgggcactctaaaaatgaaaacaaatttctatttgcaatgttcacttttaaaaataaaattaatggtgctacgaagaattctttttaatatccttttttttctacaaagactgtttatatgtaaggataaattctattttaaaggttatgtgtattttttctagatgtgaactatttataattacttatgtacaggagcttgtaaactaggcccaatagaaatatttttaggatctatatggctactttagcacataattgtttctttaaagagtattgtatgatcagtgttatttggttaatttgtgcaatttgttttattttatcttaaatgaaaattatgtaaaatgtccttgtctttcagactttaaaaaatctttttgtttcctttctgaataaaagttatatcacatttg

SEQ ID NO: 240 - DNA, 2894 bp, Homo sapiens
tgttatttgcacaggattatggtgcaaggtagaaggtgagaaagaatgcagaaccaagctagacccaccaatggatggaactgactgtgaccttggtaagtggtgtaaggctggagaatgtaccagcaggacctcagcacctgaacatctggccggagagtggagcctgtggagtccttgtagccgaacctgcagtgctgggatcagcagtcgagagcgcaaatgtcctgggctagattctgaagcaagggattgtaatggtcccagaaaacaatacagaatatgtgagaatccaccttgtcctgcaggtttgcctggattcagagactggcaatgtcaggcttatagtgttagaacttcctccccaaagcatatacttcagtggcaagctgtcctggatgaagaaaaaccatgtgccttgttttgctctcctgttggaaaagaacagcctattcttctatcagaaaaagtgatggatggaacttcttgtggctatcagggattagatatctgtgcaaatggcaggtgccagaaagttggctgtgatggtttattagggtctcttgcaagagaagatcattgtggtgtatgcaatggcaatggaaaatcatgcaagatcattaaaggggattttaatcacaccagaggagcaggttatgtagaagtgctggtgatacctgctggagcaagaagaatcaaagttgtggaggaaaagccggcacatagctatttagctctccgagatgctggcaaacagtctattaatagtgactggaagattgaacactctggagccttcaatttggctggaactaccgttcattatgtaagacgaggcctctgggagaagatctctgccaaaggtcctactacagcacctttacatcttctggtgctcctgtttcaggatcagaattatggtcttcactatgaatacactatcccatcagaccctcttccagaaaaccagagctctaaagcacctgagcccctcttcatgtggacacacacaagctgggaagattgcgatgccacttgtggaggaggagaaaggaagacaacagtgtcctgcacaaaaatcatgagcaaaaatatcagcattgtggacaatgagaaatgcaaatacttaaccaagccagagccacagattcgaaagtgcaatgagcaaccatgtcaaacaaggtggatgatgacagaatggaccccttgttcacgaacttgtggaaaaggaatgcagagcagacaagtggcctgtacccaacaactgagcaatggaacactgattagagcccgagagagggactgcattgggcccaagcccgcctctgcccagcgctgtgagggccaggactgcatgaccgtgtgggaggcgggagtgtggtctgagtgttcagtcaagtgtggcaaaggcatacgtcatcggaccgttagatgtaccaacccaagaaggaagtgtgtcctctctaccagacccagggaggctgaagactgtgaggattattcaaaatgctatgtgtggcgaatgggtgactggtctaagtgctcaattacctgtggcaaaggaatgcagtcccgtgtaatccaatgcatgcataagatcacaggaagacatggaaatggatgtttttcctcagaaaaacctgcagcatacaggccatgccatcttcaaccctgcaatgagaaaattaatgtaaataccataacatcacccagactggctgctctgactttcaagtgcctgggagatcagtggccagtgtactgccgagtgatacgtgagaagaacctatgtcaggacatgcggtggtatcagcgctgctgtgaaacatgcagggacttctatgcccaaaagctgcagcagaagagttgacctctagcaggctggctggatcacagctctttgcaattacattatttataaacacacacactagcatgtttttcagaccaaatattatcagattacatataatttaatcaaattaatttatttttttgcctgccaaacatccaatgtggtgcttgttttggttacacaaacattttgatttatactatatggcttcataaataattttatatgaatgaattagttggatccagtaatataataaaaagaaaaaggaaaaaaatagatcattatacttaaaacaaggtttcgttgtttgttagggctatctctaaggtgctactctctccccaccaataacattgaattatccagaatgtatactgacttagcataatagtttaggtgtatatgaagagaaactatttttgttttttggtgtcctgctgcagaattagcccattttctgtcacctgcaggagatgtgtaaacataatgaacctcatgctgttgaacaggtttttagagaatgtattatgaatttggttcagatttatagacatccataggaaaaattctgctgtaattataaccttattttgatatggaaaagaaaagtcaaaatagagactttgatcatgttcatgaacatgtacttgaacacaagtattgtaacaatgaaacactgtaatgatttacactgaatcacaattgcactgttgatatagtgtagagaaatcgttagaaatggtgacatcttacaaaaaatgtgtattattttaacatgttatcactagattttagctttttttaaatatttttaacaaagaaaacattgatccacccatttccctgtatctttttagcagatttattaaagagtatagtacttagcctcacgaatcataattagaaaatttactagtatttctcagccttttccctaggaacaaggaaaaacagaaagcatataatacggtggtcgtttcattgtgtttttcttccttttaaaaattaaaaagttttacaattatgtgaaacgttc

SEQ ID NO: 241 - DNA, 1868 bp, Homo sapiens
ctgatcattagagaaatgcaaaggagaaccacaatgagataccatctcatgccggtcagaatggtgattattaaaaagtcaaaaaacaacagatgctggcgaggctgtggagaagtaggaacacttttacattgttggtgggaatgtaaattagttcaaccgttgtggaagtgtgtgtggctattcctcaaagatctagaactagaaatactatttgtcccagcaatcccattactgggtatatacccaaaggaatataaaccattttattataaagatacatgcacatttttgttcattgcagcactcttcacaatagcaaagacacaatagcaaatgcccatcaaagatagactggataaagaaaatgtggtacatatacaccatggaatactgtgcagtgcagccattacagcttttggtgatacagtgaatcagatttttcattaattcttttaattggttattactgaacgtgaaaaagtaatgtttgtattgaaatcttgagtctggccatgtttctattttaaattcataaagaattctaacaagaggaattccaagaatgtcataaatggatgtttctccatggatgaaggaactgttttattcacttgctgataattcagcctaatccagtttgacatcatatagataagtagttgaattatggatttaaaatacatatcattttctaactccaaaggtaatacttatttaaatggttttgaaaatatagaaaggcacaatttctttttaaatctgttattctccaccaccactcaatctgtctatcatctatctctccattcattcttccatttgtttatatctgttaatctttgtatgtgttcatgtatagcttttacatgattggaatcataatgcatattccattttgaagtctgcttttttttacacaaaaatatgttgtgaatattttcctatattatgaaatatcattagctgagcttttagaattgactgcatgttttggtaccatttagatatagtttaagatacttagaagttatgtggctttgccactatggatgaatcttatttactcaatattaactacttacaaataacctcacctaaacactactcagccataaaaaggaatgaattaatgacattcacagcaacctggagactattactctaaaggaagtaactgaggaatggaaaaccaaacattgtatgttctcactcataagtgggagataagctatgagggtgcaaaggcataagaaggatacaatggactttggggacttaggggaaagggtgggaggggggtgaaggataaaagaatacaaattgggttcagtgtatactgctcaggtgatgggtgcaccagaatctcacaagtaaccacttaattacttacgcatgtaaccagataccacctgttccccaaacacctatggaaataattttgtttttttttttaaaaaaggaatgagatcatgtcctttgcagggacatggatgaagctggaagccattatcctcagcaaactaacagaggagcaggaaaccaaacaccacatgttctcacttgtaagcggaagctgaacaatgagaacacacggacacagggatgagatcaacacacactggggcctgatgcaggggccgtagcggggagagcatcaggataactagctaatgcatgtggggcttaatacctaggtgataggttgataggtgcagcaaaccaccatgggacacgtttacctatgtaacaaacccgcacatcctgcacttgtatccagaacttaaaatattttaaaaatctttagagaatacaaaaaaaaaaaaaaagattcttcaatgcatacacaataaaattgcagttcagtc

SEQ ID NO: 242 - DNA, 2188 bp, Homo sapiens
tttgcacaaggtgatcgcaaaacaccaggccaaatgaaatcaaaagaacgtcatccttgttctccaagtgatcacaggagatcaagaagccccagccaaagaagaactcgaagtagaagttcttcatggggaagaaataggaggcggtcagacagccttaaagagtctcgacacaggcgattttcttatagccagtctaaatctcgttccaaatcattaccaaggcggtctacctcagcaaggcagtcaagaactccaagaaggaattttggctctagaggacggtcaaggtccaagtccttacaaaagaggtccaagtcaataggaaaatcacagtcaagttcacctcaaaagcagactagctcaggaacaaaatcaagatcacatggaagacattctgactcaatagcaagatccccgtgtaaatctcccaaagggtataccaattctgaaactaaagtacaaacagcaaagcattctcattttcggtcacattccagatctcgaagttatcgtcataaaaacagttggtgaacagcaacagaaagagcaccacgccgtctttaatataagttattaaactctcattatgttaaataaaaattctttaaggcatacagaaaatgcgagttgatattagttactttgggcatatggaagaaataaaatctctagctttggattaataagaatttggtctccatttaaagggcccacactacaaattatgatttgtctaatgtcaccattttatggaccattttttatttacattgtggcagaagggtacttttcaagggaaatgagtaaactggaactaatttttaaaattctacttgcatagtattagtactattaataataccttttacacaaatatttttgactttaaagcactttcatgtaaaaagtaactatgactgtataattgcatagagcagacttaagctgtttgacacctatgtctcttttgtgtcttctgtttaaacttgggccaattcctggtggatattagttcatattacaaaattctgatgttccaaaaagtagaatatatatagagatcaaacattcaaaagatacattctctcctaagctcaaaggttatatttttattgggtagaacagtataggtaagttgacatgaaattgcatcctgcaccatgaccacattagtaatatcagaacttttgagaaatactggattttgaatggtttgagactaattctttaaaaattaggctgagcaacactcacaatccaaaaatattcatattaagacttacacatttgaagaatggtacattttgtataaaatcatatttgataccattatttccacatacctacttttcatctgttgcttaattttttctttttagagttcttgctcaactttatatggaacaagtcttattatttttgaaagagtgtttagtaccttgtattaagaaacttggccaagcgtggtggttcactcctgtaatcccagcactttgggaggtcgaggcgggcagattgcttgaggccaggagattgagaccagcctgggcaacatggtgaaatcctgtctctaaaatttaaaaaaaagaagaagaagaaactcgagactacatcttcaaaaaacaactttgcagtatttgaattttacattatactgcccttcatttctgacagccaaataactttattgatatttattgcttttgtagttgttataactaataatttctttgaaaatgtgttgtagtttatgtttttcaaagggttttggtagtgtttgtgatagaatggttttgcatatgattattataggggatatatttatagagctctacttgtatactttgtgacttacattatgaaaacttcaaagttctcaatccatacagttagtatttgtatccagagtgtttaagaaaaaaatctgtcttatatttttagtatataggagccagtgttgcttctatttgttttgaatacaaattccagttttctttgcatattagatcccatatgtaagaaacaaccttaaacaataatttgtatgctggtaatatttggacaagtgccataaattaatgtatattgtactttctgaatagattttctctaatcatagcaaaatttatttcaaaactgcaactctttgaattattccgctataataaaatttagttataaaatt

SEQ ID NO: 243 - DNA, 2369 bp, Homo sapiens
acagtcctgaggggtgcagcgggtggcactggaagggcctcctcagcaggttgtcagccagctggaagagcctggggccacctgtctggtcagagtctctctgctgtgggcctcttggagccagggctggttttgtggtctgactgaagtgacaatgaaattaataggatcctgatgctgtgactgaggccatttccctgtgtctccaaacaggaatgagagaggaaatgtcattaggatgccaggaggcttttgaaatcttcaagagggaccacgctgacagcgttaccatcgatgacaacaaacagattctgaaacagagattttctgaagccaaggccctgggagaaagtataaatgaagcaagaagtaaaattggtcacctgaaggaagaaatcacccagcggcatatacagcaagtagccctaggaatctcggaaaacatggccgtgcctctgatgccagaccagcaggaggagaagctgcgatcacaactggaggaagaaaagagaaggtataaaacaatgttcactcgcctgaaagccctgaaggtggagatcgagcacttgcagctgctcatggacaaagccaaggtgaagctacagaaagagtttgaagtctggtgggcagaggaggccaccaacctgcaggtaaattctccagcagtgaattcactcgatcacacgaagtccaagatcaaggcactggcagattcgatgtctgtgatgtgaatgccaggaaaatcctgccctcgccttgccccagtccacacagccagaaacagagcagcaccagcaccccactggaagacagcatccccaagaggccagtgtcgtccatccctctcaccggagacagccagacggactcggacatcatcgccttcatcaaggccagacagagcattctgcagaagcaatgtttgggaagcaattgaatttccaggaaatatccatccatgaattatgccagcaagaatgaagcacagatgaaggcagcgcccctcacttgctctggcttcagaagtgaactatgggctgctgggagcaactagtgactttgattcccatggaggggactgtgtttctttaaggatgctgacctggaggccaccgagaggctggggctggggctgaccacaacatccttcctgtggttgctggagctgctggcagggccaggcaaggccagagtgctaggggcagggtgaaggcttcagctcactgttgtagtgacgttttgtgtagatctttataagcttttgagaatgtgaaatagcaccatcaaaatataatgtcagaggatgctcacaccagtggaatgtggggggaatatttttatttttaacgatttgccagctctctcccttggcccatgctctggtttggaagcccagaaatggccatgacaggtccaggcaggatgtcccagccacagacaaggcagtggaatgcagggcatcctgaaggccaatcctgatctcccagactacatctttcaccatcagcctcttggccaggatgacctggaggcagtgcctgaacagctgtgtctccagggagccatctgccctgcagggtctaaggacatcatagcacccagagaacagtgggcagctcccaggggctctgctgagagcttgagagagggtagtgtgggtaccttgggcctcacaaccttcacccagccacttgggaggatttgggctgacactccccacttccacagggaaaaacatagctgcctgggggtcttgtctccatgggccctctccatgacagatccaagggaaggtgggcagccctcaaggaggttcttgaagaactgccccctgggccagggggtttcaacccagctgcagccagggaggggcagcggagggtgagcaggagtggcacctggaaatgaagctaactggataaaagtgctggtccactgctcctggtgtctctgtcctataaatacaggacctgatgaccctggaggggagcagagtggtaatatagtataattggcttgattttctttttcgttttttaggactgggtaacaggatcatgcaggagaagattaaaccattacatttctaagctaggcaggcccatcgagctcctctaatccacacccctattttatataattagaaggccagagtgaaggggagattcagcttgctgttctatgccactgacaaatgtcccctcttcagggggcttcccctgaccactccatctcgagtcaccccctagttatcccctatcccattaccattttttctgcatcactatctgacatgttatccttccgaacttgcctatttttgaaatacctgcaaccccccataatactaagagctccaatgcaacagg

SEQ ID NO: 244 - DNA, 2861 bp, Homo sapiens
tttcaactccatggcaagggtgaggaaagggaagggacttggtcaaggtcacacaggaagtggcagagctgggacccacacccagatctgtctccctctagactcactctcctgccctttgggaacaaatgaggcatggaaggtagaagagaggcattgtttggagctctgctggaaagttctggttggagagaataaaaaccgttcaaccttctgggagctattgctggtttggtttgggacatttggtcttcatctttgcagtctcgggtgcccacctcagctgtgggcctggtgagagtgcctcagtcatcagtgtcctcaggtgacctgttgcccaaggctgcactgggaggagagactgggccgaggaggagttggtgtcccacacagctgagatggcctggagcagggcttcctgctgccctctctggcttcctccggcaggcagcagtgtagtccaggagtctctgggccaccaggtgttcgctgccagactgctcttcaaggacagttttaagggcatcattttccaagcagtagcccctaagcggccccagtccaggccatggtctctagactcctccaccaagccattcccctacacaacagccagggggcgccctgacctcccagctctccttggcctgagacccaccgggcactctggtgcttggaacagcaattctcacccaccttgaggtttatgggctttagcaccatcagcttccctgccactcaccctggcaagctgcctgggagactaggggagagtgcttgctgctgggtaaactccccgcgtgatgtggcctcacctgcatctccagccttagctgccagcattccatcaccgtgtttctctttctgcatcctccaggagggctcagtcacttcagttatgggacatgctgcacagttttatgcctgtcacttagcttaagctgttccctcagcctggaatgcccacctcttctttctatgcctgcctaaccctcttccttcatactggacccaggtgtcacctccaggaagccttctcacaccccatcttagtccgttctggctgccataacaaaatctcatcaattgggtatcttagaaacaacagaaatgtatttctcacagttctgaagactggacagtcctgggtgcgggtgctggtagagtcagtgtctggtgagggcctgaggtgcctttccactgtgtccccacgtggtggaggggtgaggggtctccctcagggctcttttataaggacacggatcccattcatgagagctaatcaccccatggcctaatcacctcccaaaggccccacctcctcataccatcaccttgagggttaagatttcaacatatgaacttggggacacagactttcagagcatagcacccccaatttcattccatatccccccaggatcccccatggcaccagccacctcaccctgtgtcacagttgactgccacataacacttgccccagatctggcttactgtacatctcagcacccagctcaggcccgggcacagggcaggcctcagaggacgtgcgtagagctgagggcacaaaggagccaagcaagtgtccagagcccttctctccccccaggtactggaagttggaccctgctcaggtctatgctagcgggcccaacgcatgggacacggctgtgcacgacgcctctgaggagtacaagcaccgcatgcacaatctctgctgtgacaactgccactcgcacgtggcattggccctgaatctgatgcgctacaacaacagcaccaactggaatatggtgacgctctgcttcttctgcctgctctacgggaagtacgtcagcgttggggccttcgtgaagacctggctgcccttcatccttctcctgggcatcatcctcaccgtcagcctggtctttaacctccggtgatggctgctcggtggccccacacccaccagggtcccgaggaaacagccgccatcccttttggttccagatttttttctcctcaccccaaaaggcagggttgggcctgctgttgtggaccgggggtcggggctggcaggatggaaggactgaggaccagcatgaagtgggggtttgttgtctccctgcctctcagaagcaccctgtcccctcctccccaggcctgtgactccggccctggaagcccctttgttcttctgttgaaaggctttggcttcccgctgtagagctgctcccgccaccacctgctggggtcctgcctcagcccagtgcccagtatggggagaggaggacatttgggctcacctgtcaaggtggccctgggaccagagctggtcccagcatggggtgcaccgggtacacttaacgtgtctctataagccaagttgcttcaggaccttcaccactggcctctagaatggtccagaggggctggctgggtccctttgtcagactcctgccggcagctgccctgggggacatgtgtgcccatctggcatcctccagcccgtgcagtccgctcttcactgttccacggcctcccagtgcctcccagcattggacccatctccccctgcagtttgaggccagagaggtgagtggacctgacaagtgccagagtaaccgtgtagacagagcagtgtagacagcactcagccccagccccaggtgtggacctcatgctggtgatggctcccctgggtggcctgccagcacagccagtgccatcagggagctgaaggggctgtcccccacctaactccagctcccccttcacgttgtcaccaaggccctgtgccgcccgcctcgcccccctgctctgtggattcctttgggaagggctccctgggcaggacaataaagagttttgactcc

SEQ ID NO: 245 - DNA, 2078 bp, Homo sapiens
atggaaggccggccgaggtgcagcgagccctctggtgccggacgttgcgcggccgcgacgcccgacgccaacgcaggcgcagcgctccgattcggcgcggctcatggtccggttcgggctcgcgagtctccgtctggggtagggcaggttcttagactctgtgagtaaagacagcttcatcttcccagttcatcatggcttcaacatccagataacaacgaacttgatgcaagtgataggtttgccaaggtcagacctctcatcatccggatgaactgcaatttccagaagcatgcacccttggaagagttctacagctttggcgagtctatgtgtgagtactttgggcaccgggggtccaagcagctgcacagggggaagcctgtgcgacttggctacaagatttggtgtgggacaaccagcagaggctacttggtgtggtttgagccctcacagggcacactgtttaccaagccagacaggagcttggatctaggaggcagtatggtaataaaatttgtggatgcgcttcaggagcgtggttttctgccatatcacatattttttgacaaggttttcacaagtgttaaactgatgtccattttgaggaaaaagggggtgaaagccacaggaactgttcgtgagtacaggactgagcgatgtcccctaaaagaccccaaagaactgaaaaaaatgaagaggggttcatttgattacaaagtcgatgagagtgaggagatcatcgtgtgccgctggcacgatagcagcgtggtcaacatttgctccaatgctgtgggcatagagccagtgaggctgaccagtcgtcactctggagcagctaaaacgcggactcaggtccaccagccatcactggtgaagctgtatcaggagaaggtgggtggcgttggtaggatggatcagaatattgccaagtacaaggtgaagatccgaggcatgaagtggtactcaagctttattggctatgtcattgatgctgccctcaacaatgcatggcagctgcatagaatctgctgccaagatgcccaggtggacctccttgccttccggagatacattgcctgtgtgtatctggagagcaatgctgacacaacatctcaagggaggcgaagcaggcggttggagactgagagccgcttcgatatgattgggcactggattatccatcaggacaagaggacccggtgtgccctctgccactcacagaccaacacccggtgtgagaagtgccagaagggtgtccatgccaaatgcttcagggagtaccacatccggtgacatcatgagacatgcttctttggtttataatgagatgtttacagttaaatacagatggcagttgagcacttctgttttgtgttggaaaaaagacctgaatttctaatgacttgattttctattttctccctacccacaatacagttatcttttttattgtgttgtgttatgcctacatgtgatataaattaatatttatattcatttatatttatatttttgaacttatttatttaaagttatggatcactttttattcaaataaaagttgtgctttggggtatatttgaatcctagcaagaataatcaaaggaaaacttgcaagaacagtaagaagactttaccattgcatgccatggtttataatctaagataggcaatagtgtataaatatcatgtaaatgtgatggatttcttaatcatatttatttcatattaatccaagtttatcaaacttttgagggataatctgccttgtatttagtcagagggctagaggtgcagatttcatattttcttaatgaaaatattttcctaatacacatatatcaatgtgagattcatttttgtaaaaaaaattatttttttaattttgtgggtacatagtaggagtgtatttttatgggttacatgagatattctgatacaaacatgcaatgtataaaaatcacatcagggtaaatggggtatccatcttgtcaaacacttgtcctttgtgtttcaaacaatccaattatactgttagttattttaaaatgtgcaattaaattatttttaactat

SEQ ID NO: 246 - DNA, 2186 bp, Homo sapiens
aggtttcaaggcactccaaatatccatttgcagatactacaggaagagtgtttccaaattgctcaataaagagaagggttcaactctgtgagatgaacacacccatcacaaacaggtttctcagaattcttttgtctcgtttttatgtgaagatatttccttctccaccatgggtctcaaagcactccaaatgtccacttgcagattgtacaaaaagagtgtttcaaaactgctcaatcaaaagaaatgttcaactctgtgagatgaatgcacacgtcacaaggaggtttctcagaatgctgctgtctagtttttatgtgatgatgtttctttttccaccataggcctcaaagatctccaagtgtccacttgcagattctacaaaaagagtgtttcaaaactgcatgtcaaaggaagggttcaactctgtgagttgaatgcacacattacagagaggtttctgggaatgcttctgtctagttttaatgtgaagatattcccgtttccaacgaagaccacaaagcagtccaaatatccacttgcagattctatgaaaagagtgtttcaaaactgctgttcaactctgtgagttgaatgcagacatcacaaagaagtttctgagaatgcttctgtctagtttttatgtgaagataattccttttccaccatgggcctcaagtcgctccaaatatccacttgcagatcctacaagaagagtgtttccaaactgctccatcagaagaaaggctcaactctgtgagatgaatgtacacatcacggggaggtttctcagaatgcttctgtctggtttttgtgtgaagatacttccttttccaccaaatgcctcaaagcgctccaaatgtccacttgcagattctacaaaaagagtgtttaaatacttctcaaaaaggaagggttcagctctgtgagatgagtgcatacatcacaatgaacattctcggaatgcttctgtctagcttttatgtgaagatatttccttttccaccatggtcatcaaagtgctccaaatgtccacttgcagattctacaaaaagagtgtgttaaaactgctctatcaaagaaaggttcaacacagggagttgaatgcacaaatcacaaggaggttactcggaatgcttgtgtctgatttttatgtgaagattttacctttttcatcaagggcctcaaagcgctccaaatatcccctttcagattctataaaaagagtgattaaatacttctcaaaaaagagaggttcaactcagtgggttgaatgcagaaatcacggagaggtttctcagagtgcttctttctaggttttgtgtgaagatattttcttttcctctatgggcctcggaaagctacaaatgtccactttcctatactacaggaggagtgtgttgaagctgctcaatcaaaagaaaggttcaacacaggaagttgaatgcacccatcacagggaagtttctccgagtgcttgtgtcttatttttgtgtggggatatttccttttccaccatgggcctcggtgtgctccaagtgtccagttgcagattctgagaagggtgtttcgaaactgctcggtcagaggagagtttcaactctgtgagatgcatgcacgcgtcgcagggaagttcctctgagtgcttctgtcaagtttttgtgtgaatatatttccttttatttatttatttatttattttattttattattattattatactttaagttttagggtacatgtgcacagtgtgcaggttagttacatatgtatacatgtgccatgctggtgtgctgcacccattaactcgtcatttagcattaggaatatctcctaatgctatccctcccccctcaccccaccccacaacagtccccagagtgtgacgttccccttcctgtgtcaatgtgttctcattgttcaattcccacctatgagtgagaatatgcagtgtttggttttttgttcttgcgatagtttactgagaatgatgatttccaatttcatccatgtccctaaaaaggacatgaactcatcattttttatggctgcatagtatttcatggtgtatatgtaccatattttcttaatgaagtctgtcattcttggacatttgggttggttccaaatctttgctattgtgaatagagccgcaataaacatacatgtgcatgtgtcttatagc

SEQ ID NO: 247 - DNA, 2366 bp, Homo sapiens
agtgacggagctgagcctgcccctgcaggtagctcatcccagagcattggcgctggctcccttaccgggaaatgaaatgagaagtcagtgcatgacatgctggtggtgacagctatattccttctgagttcatgtctccctcctgggaacaacccccgtcttctggtccggtggccatccagctgcagagtgagcactccacttcatgcactgggatctcagctggagagaaggacatcagggtgaccatatccaccacgggccgggagctgcagggcagaaggcaaccaactctctccctccaacccaactgcacgtcccccctcagatgtggggctcccgccagcaaagccagagaactctccttccctaaagcagacctcaacatgtcactgtctcctcttaaggaaaataataatgatactttttatttatttattttgagagagggtctcaccctgttgcccaggctggagtgcagtggcatgataacagctcactacagcctcggcctcccgggctctagtggtcctcccacctcagcctcccaaggatctgggaccacaggcatgtgccaccacacctggctaactttaaataaatttttgtagagaagggaccttcctatgttgtccagggtggtcttgaactcctgagctcaagcaatcctcccggcttgggctcccaaagtgctgggattataggcatgagccaccatgcctggccaataatggtgataactaattagggctcccagttcattctagcagcctctgacccattttccatgaagaagagaaagctcttaggaagagaaatcatactgagttactttcatgcttatgtttaagccttcagtgatgcttgcatgaattttattatgcttcataataaagttgcagcttttgttgttgttagagcctcgctttgttgctcaggctggagtgcagtggtgcagtcatagctcactgcatcctcacactcctggcctccagcgatcctcttgtctcagactcctgtgtagctgggattacgggagtgagccccagtgcctggctcctattttttttttttttttttgagatcctcctcttgggctcaagcggttctcctgcctcagcctcccgagtagctgggattacaggcgcatgccaccatgcccagctaatttttgtatttttagtagagatggggtttcaacaggttggccaggctggtcttgaactcctgactaagccccccgtgcctcccaagtagctgcgattacagggtcttgttctgtctcccaggctggagtgcacggtcgcaatcatagctcactgcagcctcagcctcccgggctcgagcgcctgtggtctcagctgcccgagaggctgaggtgggaggatcgcttgggcccggcagttcgaggctgcagtgagttgtggtcatgccactgcactccagcctgggcaacagggagagaccctgtctctaaaaaaaaccaaaataaataaataaaataaaatataaacaaaacaggataagagctggggtcatcaggtgtgacctgggagacccatctcacctcagcacgatcatctggctctcagcccccacagccacatctgccaagccatccccttcaaggtccttcaccccatggatggagcgtccaaaccactgaattcctgagagcacttgggtcccttctatccgctgagagcaagaaagaaattgccactaagctgaggagaggctggagtgcagtggtgcaatcgcagctcactacagcctcgaactcctgggctcaagcgatcctcccacctcggcctcccaagtagctgggactacgggtctgccttcaggtcaagaaagcccccagcccagtccttggctcctactgcccccacgactgcatggccctgcccagggaaggagatgagcgggtcagctacccaccgacccaccccccagagccaactgcactccctgcagcccattgctccagcccagcacgcaccctgctgaggtcagcactgatgccgctggaggacagctccatgttgaaggaagtcaggtcctgtttgcttgtgcctggggaacaaagcagagaacagatggagtttcgctcttgttgcccaggctggagtgcactggcacaatcttggctcactgcaacctctgcctcccgggttccagcgattttcatgcctcagcctcccaagtagctgcgattacagggtcttgttctgtctcccaggctggagtacagtggcatgatcacagctcactgcaacctcgacctcccaggctcaagtcatcctcctgccttagcctcccaagtagctgggcctacagtcatgcacccccatacctggcccatt

SEQ ID NO: 248 - DNA, 2520 bp, Homo sapiens
attgagcagcaagaatgagagcagagggggaagcaaaggtggcacattgattataacacacagctgaggtctcgatcacactagatgtctccagtcagccgtgtggaaatcgatgtgcttcagaacagtctattggatgacctggctccaggatcagggaagtcagagcccagacctcggttcacggtgcttcctcagattctgggaatgctgcaggaagctgaacttcaggggcccagtgggttcaggccccagacaccagggtctttgcagtcccatcatgagtcttgttctgtcgcccaggctggagtacagtggtgtgatctcggctcactgcaacgtctgcctcccaggttcaagcgattctcccacctcagcctcctgaatagatgggattacaggcacccaccaccacgcccagataatatttgtatttttagtagagatggggtttcaacatattcaccaggctggccttgaactcctgacctaaggtgatccacctacctcggcctcccaaagttctgggactacaggagtgagccaccatgcccagcctatacttattccctgacttctcccaactagtatgtaaacttcaagctgacaaggaatttgtcttaaaacagtatctggcatgtaagaagcactcaattaatattcattcactgaatgaaagaagaaaggaaagagcatatgacaagaaaaacaacaacaacaacaacaaaaaggataagcaagacaatctacgtttataacagaagaattgaatctaggggtgctcgttaagaattgtgatcaagcttaaatttttcccagaaaaaaaaaagatgtttaaatagtacaagaaaatgaatacgacagattgcatcttgtaataagtaagttctaaagagagagagtgttccatgtctgaaaatgtctagctgatagcatcatgggcataatagtggatcttcatctaagtttattcagtctttacccaacttgtcctggatggccaagagactagcaaaggttggatgcaggtggaacatactctgactcagggatacttatttcatgattagacagcagtttcctaatcattgtccatcccttctccccatgcacacgattcagcccttagggttatctctggatacccatcacttgggttgctgggcactcttgtgtaaagagaaccagccctgagaaaagagaaatttccttcagcagtctacaccttcatagatgagggtagtagcaacaggagaaatctattttacagattaaaatcagaagaaaggagagatttctgctaagacagaggagaacagtagactggctatcaacaagataaactatagaaaagcgatcactagcgtatgaaccatcccccaaggcactgtaggtcaaaacagatgatctaggaacctgcagatgaatccctctagaacaagaaaacaacattaataaaagtttatatttattgaactttttgttaagtggttacctaaaccttttatgcatattgatgagtttaattctcaccataaccttaccgggtaggcatcattattatctgaaaggcagcgagattaagtaacctgctcaaggccacataattaggaaatgaaggggtcttgagatgaacccagacaatctggctttggagctcatcatccgtttttttaaaacaaaacaaaacaaaacaaaaaaaaccctgttgtatacactataatatgcattttaaagtgtacaatttaattatttttagcatatttgtgaagttgtgcaaccatcactacaattttagaacattttcatcactccaaaataagctccatacccattgtcaatcaccctccatttttcttcagctccccaaacccaaggaacaactaacctactttctatctctattgaattagctcttctgaacctttcagatgaatgggattatacaatatgtggtctttgattcatccatgttgtagcatgtatcagcattccatttcttttttatcaaatgatacttggttgtctggatacaccacattttatttacccattaatcagttgaagaacatttgcattgttttcacattttcctgttataaataatgcttctgtgaacattcatgtacaggctttcattgcttttgtgtatacatctaggaatggaattgctgggtcatacagtaacttggtatttaacctcttgagcaacacatggtcttaatcactacacaggatatttcacacagtggatatgaagtcacaactgtctctcaagattttggggttgttattgcctcttacattctaaaaactttgtgtttttcttgttttgaaattcaacatactgttatttcagcataaaatggaacttggctaatttgaagcttgaggtcaacacattttaatgaatctatgatatgtgccaaggactattataagatctatgatggatacagggaaaaaaatatatttctatgaacagtctttatagctttaataaaccctcattgagcatcc

SEQ ID NO: 249 - DNA, 2850 bp, Homo sapiens
catatcatggcgctgggcaagctgcgtccgcccaccccgcccatggtcatcctggagccgtacgtcctctctgagctggccgagggaggaccctcctgtccgggacgtcgctgccggaagtgccagggttgagggcctcagctcctcctcctccatcctctctcctctgccgcctcacaagcatcactccttgaatcttcttgcatcccttgtctgtctcattcctctacctgctctgaatttcctccatctcttcagcttctttctttggcccgaccggaagaagggcctttcatccaggcctggtggctcatgaccgcccccccaatcagccatgagtattatgacccggcggagtttatggagggcggcccgcaggaggcagaccgcttggatgagctggagtatgaggaggtggagctgtataaaagcagccaccgggacaagctgggcctgatggtttgctaccgcacggacgacgaggaggacctgggcatttatgtcggagaggtaaatcccaacagcattgcagccaaagacggccggatccgtgagggagaccgcatcatccagattaacggtgtagacgtccagaaccgggaagaggcggtggccatcctgagccaggaagagaacaccaacatctccctgctggtggcccgacctgagagtcagctggcgaaaaggtggaaggacagcgaccgggatgacttcctggatgactttggctctgagaatgagggggagctgcgtgctcgtaaactgaaatcaccccctgcccagcagcccggaaacgaagaggagaagggggctcccgatgccggcccaggcctgagcaacagccaggagctggacagcggggtgggccggactgacgagagcacccggaacgaagagagctctgagcacgacctgctgggggacgaacccccgagctccaccaacaccccgggaagcctgcgcaagtttggcctgcaaggggacgccctgcagagccgggacttccatttcagcatggactctctgctggccgagggggcggggctgggagggggcgacgtcccgggcctcacggatgaggagtatgagcgctaccgtgagctcctggagatcaagtgccacctggagaacggcaaccagctgggcctcctctttccccgggcctccggaggcaacagcgccctggacgtcaaccgcaacgagagcctgggccacgagatggccatgctggaggaggagctaaggcacctggaattcaagtgccgcaacatactgcgggcgcagaagatgcagcagctgcgtgagcgctgcatgaaggcctggctgctggaggaggagagcctctacgacctggcggccagcgagcccaagaagcacgagctgtccgacatctccgagctgcccgagaagtcggacaaggacagcaccagcgcctacaacactggggagagctgccgcagcaccccgctgcttgtggagcccctgcccgagagccccctgcggcgggccatggccggcaactccaacttgaaccggacccctcccggccccgctgttgccacccccgccaaggcagctcctccaccggggagccccgccaagttccggtccctctcccgggatcctgaggccggccggaggcagcacgcggaggagcgcggccgccgcaaccccaagacggggttgaccctggagcgtgtgggccctgaaagcagcccttacctctcgcggcgccaccgcggccagggccaggagggcgagcactaccacagctgcgtgcagctggccccgacgcgaggcctggaggagctgggccacggccccctgagcttggccggtggccctcgggtgggcggggtggcggccgcggccactgaagcaccgcgcatggagtggaaagtgaaggtgcgcagcgacggaacccgctacgtggccaagcggcccgtgcgagatcggctgctgaaagcccgtgccctgaagatccgggaggagcgcagcggtatgacgaccgacgacgacgcggtgagcgagatgaagatgggccgctactggagcaaggaggagcggaagcagcacctgatccgggcccgtgagcagcggaagcggcgcgagttcatgatgcagagccggctggagtgcctgcgggagcagcagaatggcgacagcaagcccgagctcaacatcattgccctgagccaccgcaaaaccatgaagaagcggaacaagaagatcctggacaactggatcaccatccaggagatgctggcccacggcgcgcgctccgccgatggcaagcgggtctacaaccctcttctctcagtcaccaccgtgtgagctgcccgggcgggtacacggcccaggcccagggaaccccctggggccccggccctcactctcctatagagattgtgtgtgtgtgtgtgtgcgcgcgcgcgtgctcgctgtgcgcacgcacacatctcgtctgggtgtgcgcacagggctttgttagcagagagaagcccctgaggagaagggacgcttttcttccttctgcccaagtaaagtgaccatgccagtggccagcactgggggcacacctgtgatgggcaccccttcagctgtgcgtgtgcattccccatcccccatgctcttgcgtgtgcttgcacgtgcacgcacacacacacccagtgctctctccacccgacccgtgtacttgcagacagggaagctgagctgaaaggagcacaagagagtgtccggcttcgctgctgagcgcggcctctccccgccgctgcgcactgcagttatttgtagacaaaggcacccctgcatctcaagaataaagcaagctgcctttgtacttggttg

SEQ ID NO: 250 - DNA, 2297 bp, Homo sapiens
tttgaactcctgacctcaagtgatctacctgccttggccttccaaagtgctgagattacaggcctgaaccactgctccaggccataaatactttttagatttgttctgtaactcagttatgttacttgaaagcagtttgattctttttggtaagatggtaattattcccaccactggacccttttgtgtactctgagcattgccccattaattatggcattttccagtacacatccccacactgcttgcaggaaaggacctagagaaaagtcgcagggcagaaaagcagaggaggacggccctggatttggcttatcagtccttggggccctcctgccccaggaagggcagcgaggaccatggtgttgctgccatcattatcaccctggccatgagattgcaggactggggcagacccagaggaggactggaagggccagagtcagccaggaacacagcagctcagctctcggctgttggcaggtggccttgatggcttttcaaaggcaatcactccacccaggacaaagctcacttttctctggggcaaaacacattggttcatttgttcagttcattaattcaaccagtctgtttctaagggaaacctggctgtggccagtcctgctcccacatccctaggtgcccagtgttcccaagggacctgaattccaaccccagttaggagttcaggggtcagcatccccatgccccacatgcctgttagggaggacagtgaaggctgagcactcttgggctcaccaaacaccagcattgagaaactgccccccatcttccctaggtaaggtgaccttgtaggacagttcatgctattgggatggtctgggtaaggtggccacgagggcaggggaccaaggtctgccccacctttgaccttagcgacatgcccctgattgcctggcccccctctggttgtcgtctgagtcccttctctgggggtacctgggccttgctgcacttcctttgtatgctaacttcatcctgatcaaacttgattttcctactgtgatttctttccaatttcttcatcaagttaaaaattctgtattgagagcagtttcctacattacctcaaatcctgttcaaacaaggattatccctagaagtcagaaaggagggaaaacaagcttagtcacagaagactactctatacttgagcttctgtttcaagggaagtgagtaactggtggtggagccctgcccctctgcagtgtgtggttttgtcctgatatattttaagattgagatgtaactcacctgtcataaaatgcccagacttatgatgtgtggaaacaaaagagttttccagtacagaaagttacttagcctctctggtgctgtgtaagcaacaggtagtcttcccacttcatttttggtggttctttccttggcttgggtaatttccttgcatgctcctttctggagttttctgtatgcagctttctgctctctggtaccctgtcttgtaaactctagcagtccagatctatctggactctaaacttcatctcatcaacttaaagtttgctgagatctgcctgggttcctgcttcatgcgctgtattctgtaatctccctcaaggtagtacctgggcaatcagataactcatctattaataactgattccctgtctctaagggtttactggttttgttttctgatgtctagtatcttgaagaccattctttcctatatgttgtccagtgcttttggctttttcaagtgagacagcaaatcctattcttgtgaccttatcatggtcagaagtagacatttgtatctattttaaaaataaatttctcatatgattatgatataatcaccccagccctagtctataggttagcatttgagaatcattgctctaagttgctctggactacttctttgttttttgagacagagtctcattctgtcaccaggctggagtgcagtggtgcgatctcagctccctgcaacctctgcctcccaggttcaagtgatcctcgtgcctcagactccccagtagttggaattataggcatgtcaccacagccagctaattttattttttttcaattttttgagacagagtctcactccagcctgggtgatagagcgacactcggtctcaaaaaacaaaacaaaacaaaacaaaattagagattgggtctttcccaggcatatggtattctataaaacagacttactctccttggaggatatattttggagaatgcttcataaaatctatgaatactgtacaatgctgataataaaaactttttatacctgt

SEQ ID NO: 251 - DNA, 2035 bp, Homo sapiens
gtttttagtagagacagggtttcaccatgtttgtcaggccggtctcgaactcctggcctcaggtgatccaccgccaccttggcctcttaaagtgctgggattacaggtatgagccaccacacccaaccttgttttgctttttgagacaggatctcactctatcaccgaggctggaatgcagtggcacaatcacagctcactgcagccttgacttctccagctccagtgatcctcccacctcagcctccccaggagctgggaccataggtgtacaccaccatccctggttaatttttttttaattttttgtagagatggggtcttgccatgttgcccaagctggtcatgaactcctgggctcaagcagcccttccaccttggctcccaaagtgctgggattacaggtgtgagccaccgcacctggcctcccctgctgttataatgggggcagtctggcagcccgagggccccacagtgaccctggcctctccctgttgccccttcaaaggtctggtgctccgtccgcacacctgagagctcccacgaaggcctcatcaccgatccccacagcccctctcgcttccgggtcatcggctccctctccaattccaaggagttctcagaacacttccgctgcccacctggctcacccatgaacccgcctcacaagtgcgaagtctggtaaggacgaagcggagagagccaagacggaggaggggaaggggctgaggacgagacccccatccagcctccagggcattgctcagcccgcttggccacccggggccctgcttcctcacactggcgggttttcagccggaaccgagcccatggtgttggctctcaacgtgacccgcagtctgatcccctgtgaagagccggacatcccaggcacacgtgtgcgccaccttcagcaggcattcgggtgctgggctggtggctcatcaggcctgggccccacactgacaagcgccagatacgccacaaataccactgtgtcaaatgctttcaagatatatttttggggaaactattttttaaacactgtggaatacactggaaatcttcagggaaaaacacatttaaacacttttttttttaaggaaagaattggtatatttattatgttctgtttttctaaataacctgtggacaagggaagccccactgatttactccctctcttccccactccctgtgaggctgggctgaggcacggatccctgggccacagagcaagtctccaaatcagacagctgcctcagcccctgggatgtgtgatttcagctcctgtcacctcatgcaagggcgtggagaccagtagaggtgtggaggccaggcagagagaggagcctgctctgcggggggcccagctcatgggcactgccccttcagctagcctgcctccgtcccctgagtccaacagtgggagccctagctgggaagttctgatccccaaagccacagcaggggactgatggctatagcagaatgaggtcgggtcaggaccctcaaacaccatctgggaacaccaagcaccctgaatcgagactgcaggagccctgcggggtgagactgtgtcagagatacactgctggccacaagtgtcccctctcagtcccaccttttcgggctgtcccatgtctatctcaggggcccgttacctctctgcagcagtcccccatcccagccacaccagggtctgtccggccaaccctcttccccagggaaaggagaagagagaaaacaggctgggcccggtggctcactcctgtaatcccagcactttgggaggttgaggtgggcggatcacctgaggtcaggagtttgagaccagcctggccaacgtggtgaaaccccatctctactaaaaaaaattacaaaaattagccgggagtggtggtgggcacctgtaatcccagttactcgggaggctgaggcaagagaatctcttgagctcaggaggcagaggttgcagtgagctgagattgcgccactgcactccagcctgggtgacagagggagactccgtccc

SEQ ID NO: 252 - DNA, 2295 bp, Homo sapiens
agacttgcttcaggttccaacccggtaaggcaaatggagaggctgtcaggagaccagaagtttacctcagctatgcaccgacgcaccacgtgctctggtgcacatccaccgcctcttcctgcctcagtttctccttttgtaaaacaacagcttgtaaaggcctggggatcttctcatccacgggagttttctaaggatgcaggcgaaagaggatctcactctgttgcctaggctggaatgtggtggcatgatcacagctcactgcagccacagattcctgggctcaagcaatcctcctgcttcagcctcctgagtagctgggactataggcaagcgctactgtgctcagctctcactctctggctgaatgtagaggactctgaaggcttaggcaagaggggagttataaggcaccacagaaccctgaatgactgcatggagcagaacccttcgcaaacctgctcttcaggcctcctttttgagacagctggaaaagattctttctccttttctagcaattacttcctccctccgactcaaatgcctactcagcctctagtattcagtggctgctgcagtttgcggggttcttctccagaccatagatgcctcagtttttgcagtacctggaggtttcaccagtgaaagctctgaaacagcaaagatggcagcctgccctttcctctgggagttccatcctaggggtgtacagaactgttgctggcctgaatacacctgcatgaggtggctgaagactccagttggattatttatgaggatggcctgtgcaaaaagacacccagagatttcatgctgttgattcacagaaagcctgttcctcttcactccgtagagtcctcagagtctggatcatcccttacagaagatccttgataatatttctgatatacctccaaggttccgtttgtcaaatgtgtgcgacccttctgataagtcaccagaggtgatgagggagagagagaaagaaagcaaattacaactgtaaagagtctctgaacagtgaaagatcaaaacagacagtctctggctttactggatgagtcaccattgcagcccgaccgcaaaaacaagcgtggcttctgtacttagcagcagtcttcctgtctggaaaggaaacattgctcagattggagatactggccattttatagacttcaaagcaacttaggccactgaactgtcaggcgggaaaacaggctgaagaaatgtcaacaattgggagttttgaaggattccaggctgtgtctctgaagcaagagggagatgaccaaccctctgagactgaccacctatcgatggaggaagaggacccgatgccaagacagatttcaaggcagtcaagtgtgaccgaatcaactctttaccccaatccttatcatcagccttatatctcacggaagtactttgctacacggccgggggccattgagactgccatggaagacttgaaaggtcacgtagctgagacttctggagagaccattcaaggcttctggctcttgacaaagatagaccactggaacaatgagaaggagagaattctactggtcacagacaagactctcttgatctgcaaatacgacttcatcatgctgagttgtgtgcagctgcagcggattcctctgagcgctgtctatcgcatctgcctgggcaagttcaccttccctgggatgtccctggacaagagacaaggagaaggccttaggatctactgggggagtccggaggagcagtctcttctgtcccgctggaacccatggtccactgaagttccttatgctactttcactgagcatcctatgaaatacaccagtgagaaattccttgaaatttgcaagttgtctgggttcatgtctaagcttgttccagctatccagaatgcccacaagaattcaactggatctggaagaggaaagaaactgatggtgttaactgaacccattttgattgagacctacacagggctgatgtcattcattggaaaccgcaacaaacttggctattcccttgcccgtgggagtattggtttttgagagtctttttggtaccataagcatatcatccacagatatgtcactttgaaaattccagtttgacccacgctatttttggactgaaacaattaattatttttaaatgacgctttatgatttagaaatttagtatttccgaaaatttaaaagcttgattggactgatagatacacactttagacctcatacaagaataatcaaattttcttaaaactagaaaataaatgctgctgagcctatc

SEQ ID NO: 253 - DNA, 2073 bp, Homo sapiens
agtgatgctggagttctgctcaggctgccagggctctgggcctgtagcctggccctgagagtaccacctcccttcagtggaactttgtctaagatatccttggggaagctgataccccatctcctgtgtccaggccctgctgtgtccctgcagcactactgtgtcaacttcagctgggtcaaccttggggagcgctccgagcagcccctgtggattgagaaccaatcggactgcacggcccacttccagtttgccatcgactgcttggagagtgtctttaccatcaggcctgcctttgggacgctggtgggcaaggcccgtatgaccctgcactgtgccttccagcccactcaccccatcatctgctttcggcgtgtggcctgtctcatccaccaccagacaaatgtcacaggacccactgttcctggacctgatggggacctgccactcggacagcaccaagccagccatcctgaagcctcagcacctcacctggtaccgcacacacctggcccggggcctgacgctctacccccctgacatcctggatgccatgctgaaggagaagaagctggcacaggaccagaacggggctctcatgattcccatccaggatctggaggacatgccggccccgcagtacccttatatcccccccatgaccgagttcttcttcgacggcaccagcgacataaccatcttccccccgcccatcagtgtagagcctgtcgaggtagacttcggtgcctgcccagggcctgaggcccccaaccctgtacccctgtgcctgatgaaccacaccaagggcaagatcatggtggtctggacgcgaaggtctgactgccccttctgggtgactccagagagctgcgacgtgcccccactcaagtccatggccatgcgcctgcacttccagccgcctcaccccaactgcctttacacggtggagctcgaagccttcgccatctataaggtgtgtgcacgcaatgagagggaggaatgcggggtctctgctaggagcctgagtggcttggtggggtggcaggaagtgaccgagggcagcttcaggctccatcctctgcgtgccaggctttctcttggctggacagtgacccctatgagtttgtctcctccaaagctcctggcctagctcggcccatctgattttctcattcttatgtaagtctcccctcccctccaagggagaactcagctgagatcaagctgtttgggaaaactgggtgcacagggagatactccctggggctcctggctaggaggcctcctagcttctctactagtccttgaattaagaagtggtcactctaaaggagctttgagcgggcaggaagctgggcctagagacaaagtcagcagcaccagataattgtgatggaaagggcttctgactcagcttccctgggtcgggaactccgagtgccggctgtccccagccctgctgttctggccccagatgcgtggtgccccctcctcatccgttagtcctgcccatcccttccttcttgactctgcccaccccactgcccttgcccagaggccaaggtcttggggcccagagaaaagtagggctgtgcggtcaagatcagggtcacttaccagctatgtgaccttgggcaagttccttaatgtctctgagtcctgatcttttcatctctaaacttgggaccacgtccgatcttttgaggaggctttccaaagtggaggctttggttgcccccgtcctaatgctctggcagtggggtgatgttgaggtttgtaggaataaggttgtagatgcctggctctgctgaggttcagcctgtcagatatttaggttacaggctctagacctgcacagtccagtacagccactgacagccacacgtggctactgagcttttaatatgtggctggtcccaattgagacgtgccgtgagtgtaaaatgcaccctggatttcaagacttagtatgaaaagaatgtaaaatacctcgttactaattttatattggttatatgttaaagtgataagattttagatctgttgggttaaataaaatatactattaacatt

SEQ ID NO: 254 - DNA, 2190 bp, Homo sapiens
gtccagttcggaggcaagggctcccgctccccttcccagacagcgggtgtcgcgctttcgctggggatgaggccacgccgggagcagggcggctccggccctttcctcctccccgcctctgtcctctgactcccgtccctctcctccctcgccccagagatgctaggtcctgcctccctcccgagaggacacggatcagggctggctccagtcctcccccaccctaccccaggttctccttcctgcaaactaaatttagaggtgaggatgtggccgcctgcacggggcgggcggggagggtcagcggcgatgccgccggatgtctgccagccgggccgggacgctgcgtcaggtcggtaaacacgcggcgtgctccggaggggccgcgccagctgcgacggggacgccgccaccctgggcaccctggactgacgtggcgccgcaacccgcccggcgggtctgccccaggccaccccacacacagtctcctatccactacggaaagggatggctgcagtggctctcacgccttactggtggaaccccttcttaaaaagctgctatgggggtcagggtgtagcaggtattaaactgggggtccccctcaccccaggctccctggagcaccacctctgaaaaccaggggaccagataagctccagcgttgggaagccaggataggggaacagcgctcggtgccagcagggccgtcccagccagctacctgccttccctgctcccagagccatgcatggcccgcttgtcctcaccgctcctttgtgaccgtcaaataaggccctccatggatgtcacaagactgtcaacattttcaagggcctcgtgcatgaaaataatttgtcaagtgcagaagctacatcatgagcagactgtctttggaacaagctgtggaatggaccgtggaatgaatgcaggcagccactctgcctccaagatcagcacagaaagaacccccagctccctgcacctggtctcagagactttgaactcaaacagacatcgcacatggaatgacacgcaagtaagcaggggccacgtgagtcccctgcattctgaccctcacagctaatcccacggtcctgtccctcctcaggccctgtcccagataagcctgtcaatccccaatgcctccaggaagccagaggagccccctacacagcccacagagggcagagaaatgagtccgtcctgtggccctgatatcatcccatggagccagcacaccctgtggtccaactgaaagggagagagagaacatagccaggacacctactgtgtgctaaatgcctgctggggagtgggggcactaaggggcaacttgttttctgttggtttgtgtcatcgtttcctttcccttctgggttttgttttgttttgttttaatgtatgagaaactgccttactgaggaaggagaatcgcttaaatggtactcggtgcctgccctgtccttctctcgccttggggaaagaaagaaagaaataacatccgctccttgatctgtatgcacaggagaaacagaacaccctgtactttctgagcagataaaggagagaagaaagtgctggctcagccaggcagggaagaggaggagggcgggcaacagacacttgccttcttgctcctgcttccatggcaaagtgggggtgtgagcctcttgcccagcgcctgcacccacgccttgaggttattctccatgtccccaagcaggcaatgcctaggagtgccaagaaatcaggccagccagggcatgagtgcaccccccggtcccctggcaatttcatccaagataccacgcagccagttctccagcctgcaggccaccgcctcccccagctgtccagagccaccaccaccctgactgaagtgtcccaagaggccacattggacacaggaaggcagcagggtatggagagaggaaaaaagggaggaaaaaccccgtcctgtggcagggttgccaaagacggatgaatagaataaagactcagaggtcaggtgaccagagtgggcacgagcccccaaagtttgtgtgaactgccactttttcatcccatccctggaacatcctccccaatttcattttgacaccctcagaaatttacgctctagttgcagtgagctgagatggcatcatggtgctccagcctgggcaacagagtgagaccctgtctcag

SEQ ID NO: 255 - DNA, 2491 bp, Homo sapiens
tgttccaggccccttccccagctcacatccctgccgctcagtgtccccatgctctccctctctgtcgctgcccccctctgggtcagctctgccctctggaaccccacagagcaaggctagaccaatgggtttcagactcgaagacaaaaattatgtttatctcaagttttctcctctgtctgactttctcctgctccctgaaagccctttctgtgacctggtttctgcttcccatcctggccatttctttgtgaataggattcaatttgtccaggaacccttcaaagggatcccacagttcagagagaggaagggaaacatctgacccaggcatacagctcaatgctcacctcgccagtctggatgttaaactgctgcccaaccaggagagatcatttactgcctcctttggtctccgagattccctccagtcctgatcttctctagagtcagttattggcacctttgccaccacaccctggaccatgcccacgtcagacatgaccagtcaatcacagcactttctccctgagcccagacacgatctcagaaacctcaaaaggacactcaagcagcccctatcatcagttgcagttggcacaagaagtgaagctattcatcatcctggtgacccaatgaccagcatggggagtggcctctgcctggctgcaggtgctaaccaatccttctctgcctctcaggtttgctaccggttttgcctactatagtttggctatgggtgtggaagaatttggagtcaacctctacatcctccagatcatctttggtggggtcgatgtcccagccaagttcatcaccatcctctccttaagctacctgggccggcataccactcaggccgctgccctgctcctggcaggaggggccatcttggctctcacctttgtgcccttgggtgagagactggggctaccccagaaccctctggaagaggctgccaggttgggtgccagggacttcactgctggctctgcctctaagtcactgtgttaccttgagcaggtccctgcactctctggggctcagggtctctcttctagaaaataacgcaattgggctagatgacatgaaagctcctttccagatctgacttggactgggcaaaaagtatggtggtatctggatagtgtgaaaatttttgaggtattgagagtgtcctgagtgacatcactgtagagataagctgagatggtaaaacgacagagctcatgctcaagaaagaccccacaacctactccatcattaccttggaaaagctacgtttattttatatgggtgttagttggttgataacacctatacccttccaaaagaacttgaggtattttaagacaagaacaagaacatatacaacaaaatataaatggaaatagaggatcagaggcaggggaaaacacaaacatagcaggacacaggcatgcaaagcattactcagctttaagtttggatctgagcttcttggaagccaaagcaaaaagggagacaagatcagctaaggagtgagaactcttaggtgctcctgaactccaaggcccaccacattttcttccctctgcagacttgcagaccgtgaggacagtattggctgtgtttgggaagggatgcctatccagctccttcagctgcctcttcctctacacaagtgaattataccccacagtcatcaggcaaacaggtatgggcgtaagtaacctgtggacccgcgtgggaagcatggtgtccccgctggtgaaaatcacgggtgaggtacagcccttcatccccaatatcatctacgggatcaccgccctcctcgggggcagtgctgccctcttcctgcctgagaccctgaatcagcccttgccagagactatcgaagacctggaaaactggtcagtcactgcctctggccccatcagtgctcctccctggggaagcaggtctgggcccagggcttttccttagctctctgtccctaggtccctgcgggcaaagaagccaaagcaggagccagaggtggaaaaggcctcccagaggatccctctacagcctcacggaccaggcctgggctccagctgaggacaacggagccccctttccctgccctccagagactgatcctagccaggcaccttaggagtatagggaggccccatataggtccatcctcctaggatgaagccttctgagagcttggtgaaggtgtctccatcaccaccaccagagcctcctgcccagccctggccagttcaaaggttcagccatccctgcccttgttctccctgcaacccaggccctgccattcttctgtctagcccttccccactggccaccttcccccactgtcccggtcctcttcccctgaggtcccctgatatcccctggctcagtcctaacaagactgagtcttaacaagatgagaagtcctccccttcttgcctcccacacttttctttgatgggaggtttcaataaacagcgataagaactct

SEQ ID NO: 256 - DNA, 2353 bp, Homo sapiens
atatcagcacctggatcttgcctcctgagtcagtaaggatatgccacagtcacgaaggcagtgggatttcgagggagggaagggaaggcggcaggcggggcatgccctccggggtgcccgaacacacctgctgcatccacatgtcttcagagccctctccctgtgggaggcctttttcaggacagccttggtgaactggaaacggaatcccagcccttggtggccctgcagtgacttggacctttccgaggtcaccctgccactgcgtgcccttcagtccctcctggcaggtgggggcacatcccccagccgctcccatttcctgacattgtcactttgtataactggaagccttctgtgaaattttagttttcaaagcattatctggtgatgggcaacccagggcagcgaatcattcagaattttcttatctaggctaataaacataataaaatcaataaggactttgaaagtaactccactgggttcaggaaactgagtgtggccgccctgtggggtggtgtttggtgagtgcttcccggaggtgagtagttaattcacaggagtgactaatggcagcgtcccactcactcctccttccggggtcatggtctcaaggggtcactccatgcactggggatgtcagctcattacagaatgatatattcgggaagtgtctcagttctgagtgcctttgagggaatttgcacttccgttcccacacagccttgcattgtgtgtgttagaggctgtgggccttgggcaggaggggtgagtgttggcacatacctcccgtctctcccagccttctctgactctgactttccctcttgaaggctaccggctctctgaccagttccacgacatcctcattcgaaagtttgacaggcagggacgggggcagatcgccttcgacgacttcatccagggctgcatcgtcctgcaggtgacggaatggcttcacgtgggtttgtggtggtggtgggaggggcttgcttgccagcgtgatgcacctgaccttcaatctaaggagctgggcatgtgtagaattagtttttggagcttataaaagtgagtctcatctttggagaagtagccggttagtgaagtgtggacaaacatgttttcctccccttggaaatggcacagagcagcccatctgcaagacgtggtttttcagtatccggtgggttatttacatgtatgttctggtgttgtggttttttttgttttttgttttgttttgttttgttttgagaccgagtctcgctctgtcacccgggcgggagtgcagtggcgcgatcccggctcactcccacctctgcgtcccgggtttaggcggttctcctgcctcagcctccccagtagctgggattacaggtgacacccagctaatttttgtatttttagtagagacgggattttgccatgttggccaggctgatctcaaactcctgacctcaagtaatccgcccaccttagcctcccaaagtgctaggattacagacatgagccaccatgcctggccaactatggtgtatttttacaaaaacttttattctgagaaaatgggcacgttttctgttgtggtcatcactgtgtcctgccgtctgtgtgtgaggtcagctgtggagcctgtggtcgctcaggccgccctcagtggggtctccgagctcttcccgtgcactccagtgtctgcaggagctggtaatgcaccctgacctgcaaggcaagctccttggtggtgtctctcctgctgggctctctttgagacccacgggagatggagagcagggctcaggggacccgcctgggagctccacacagacctctgctgctgtttgcaggtggtgatccaggtctctacccaggttcctcaaggtcctgtcttgttggccttggaattcagtgagagataggaacagcatggggtttttagaaataatgtggaaatttggaaaacgttcccaaattgtttattctgtataataattaagatgctagatctgtaaaagtgagtttcctctgatttggcatggatgcatcagtccctgttcttcagggatttgttggagaaccaggtctgtgaacatggaagcttcaaaactctacggttggggaccctttcctgcccctgcctctcggggttcctgccaggttggatgacatttttacaatgttctctgaacactttcaaaaaagtgtaggctgggcctggtgtcgcatgcctgtagtcccagctactcaggaggctgaggcgggagaatcgcttgagcccgggaggtggaggtttcagtgagccgagatcgcgccactgcactccagcctgggtgacagagccagaccctgtctt

SEQ ID NO: 257 - DNA, 2013 bp, Homo sapiens
gtttgtagcgccccatgatttgtaatggaaaacaaaattgggaacaatagaaatgtccatctttgagaggaagaaactctgtgatcacatgtggagaatgcccaagtggtgaatacgaatgaaccagagtgagacctagtagcccgaacgagcccagatgtcatgctgagtgagcacaggaagatgcgggacacatagaaggacagcgtgtatgtgttcaaaggcatgcagagtgacgacatatgctattcaaggatgcgtgtggatggagcagaaatgttaacacacatgggaataacaaatcactacgtccgagacagcgattttggggagcacacagggaggggacttcatctgggaggaacgcattattaggctgctgtgacaggtgtgtgggcgtggaccatctctgtacctttgtgtatgtctggaatattgcataataagtaatagcttaagaaagagagagagacagccagggtgtgtggctgtggtgtgtgttgggcttatttttaattctcccataccaggaaaggcggtctggggagagagcggcgagctggtgtgtactaagccgatcccttgccagcccacacacttctggaacgatgagaacggcaacaagtacaggaaggcgtatttctccaaattcccaggtatctgggctcatggcgactactgcagaatcaaccccaagaccgggggcatcgtcatgcttggccggagtgacggcaccctcaaccccaacggggtgcggttcggcagctcggaaatctataacattgtatacgctcaacggcaagaaagtggaagttgccgtcaaacagatcatcgctggaaaagccgtggagcaaggaggtgctttctcgaaccccgagaccctggatctgtaccgggacatccctgagctgcagggcttctgagtcagactggctggcgtgtcactcagccgcacccgtgtgcactgtaacttttgtgtgctcaagaaattatacagaaacctacagctgttgtaaaaggatgctcgcaccaagtgttctgtaggcttggggagggatcgtttctctgttttgttaaatctggtgggtacctggatcttccacacgagtgggattctggccttcagagaccaggagggagtgtctgggccgcaggtgtggcactgtggtgagagtgtgtgtctttgcacacacagtgcagtgggaacggtggggctggctggtgctgaagacagacacactcctgagccaaggtcttgtcttcaacctccccgtcccgttgtcccattttgctctgtgaaggtgcaaatccctttcttcccttcccatctcaggctctcctgttttccctcagggtccagtatgcctttgagctttagctgttagaaaggaacccccgtgacttgacacagctttcacagctggctgctaggaccggcgggctgggtgttcacgtgtgtctgtgtcatggatgcaatgcaggccctggaggactgtgcgtcacccgtcaaccagagcgtgcctccgggccagcttccctccaaggaatgagtggatttcatacaggatctctttattgcacagactgaatggctttacatgtttctaatgtgaattaggcatgtgaagcagtgggtgtccacccgtgtccctcatgggtgagccctccagctgtgagcccaggcagtgtggtcaccgagtgaggaccctcctcaccaggaaccgcatccctgtgctgcctccacctgagagttgctagggggttcttgtcgagatcatgtcatcagcacccctaagtcaagtcacgggtttccatagccaggcagttggtatgtacaattcagttcagcgtatgaacttgtatctctaatctgatgtccatttttatattttttgaaactgagcacaatgaaatcctttcttgaatcattttccttttggattataaaaatatgggggaaagtgctatgatgaattttatgcaataaatgtatacatgtgtgcacatgcaccc

SEQ ID NO: 258 - DNA, 2656 bp, Homo sapiens
tagtactataaatgtaattgtttttgagtgaagcaccatgtaatccatgtctcaatcccatgcccgctccactgacactagtcgaattccactgagaacagaagcaagaataatagtagtttatttgcattgtttaaatgaattctatgcaaaatcatatttcaaattttcatcaagtgattccatatggtacatggctacacattaagcatttaccttgctattggcagagatatgaaacttaagctaaggaatgtatccatcccaaagcaggaaagcagaagtgtgttttgcatacttcaggatttgtttttcctccactaatatacagaggcttttgcagaaaacttgcatcagtattcctgtttctgcacgtaggtgactatataaatgcctgtatgttttttttaaaatatctcctcagagattttcctagggaattataaaattacatatattttattgttagttagatgtttattcttggattcttaccattagaatttaagtgttatttaaaactctgatacagttacagacactttacattttattatgaggtgttgattttagtggtatttctcctcagcaaagcattcctaataatggctaatacaccatcaaatgaaaaactgctgatgagagtgtaagagaaagcgctaacgtttccactagatggcgcaatattttatttatccaaaactcctcccttgcatctgagtttttatgttatgtgtacagtctgcattagcttagaatggaatttcattctcaggtaaattttcgaatccatcaccagatctaagcattctgcttcaacaataccctctctattcctctcattcccattttaaatccataggtggcttgccctgcggcagtaaaatcttccccttgatattgattctttttctgctcattcatcttgatgttctttttctgcatcctgagatacatgtcgttaattttaataagaatcctattgacttcctcacgggagtctgttctcctatggttgataaagctttaaatactatttaaagtggttctggtctgtacttactagcacttccctgaacagtctcaaaatagcctaaacataagaaaacaatcctgcaaagtaaaggtttttacaagcagagatgaaggaaagggagcagcagctgaccatcagatgtggtatcaggtagctggaagaggatccaggacccatcagggaagcaacgactgtacttagcaatttgggttataattacaaaaaaagaaaaaatagtagaaaggatctttaccagacagtaaggtcatggtacaaatcaggtgagtgaatgttggtcagaggtagcctgacactctgatgaggacttcaagatgagaatgagaaaaatgtctattaaaatcactacatttgataatatctcagatttagaatctcttttgggattcagatagtctgattattccaattcaagtgttcagttaagttttagttactattcctataatacccaattcactaatatcatatctcctgtggaatattcattggtgcgatggcctcatccccttttttactttttattgacatggtggttataaaatgaagagacttactctattggaattttcatctacgtagtatttgggctgtcaagactaaatagcaaaagggtagaatattagatcattctcttaataagacctgatttattccttaggatgttatacaaacctttttatttcaggcctactttcttgttttttcctaaaaggatctaggatagaggagaacataatatgcctgtatacttctcccatggtttattcataagctgcttcatctcattggagatggtcattgaggagagcagtaataagtgacgatgattctgaggacttggctagactgagcggatcaatggcacacaccagcactggtagaggctgaccagaagctcatcgattccatatgctgtcacccagggtgcagatttactctcttttgctgttattttattgtttttcttaaattaagccattgtttttcatggattatttttaaaatacctaccccataattttcaggcaattgtaaaaataaaccttatttaagataacttttaatggtacatatcaactatatgtggggaaaaaatgcaattttctgggcaagagaaaccaaaggattttcaatatatgagatgccaggttgtcaattttctaaaccttttcctctagattattctggccctaggcctttcagcaaccccactaatcaattattagatcctgccccaaggagcagtggcttgggggctggatttagggaggaaaacctgattaaactgttttgcttagtactggttacagctgtagctggagaagagtttataatcataaagtacatttttgttattaccttgtggattttaattatccatcttgtctaatcttgttctctgtcatcctagataatgaggtgtttgtgggagcagagctctgcacacaccaggggatgtaataaatgtttgcacttggcccagtatattatgaatgtggcacagtaaataaagtttgtgtacaaaatactagtttatttctatgggagccattatgttcaggatatataaaatgtatctaattaaacaattttgaatct

SEQ ID NO: 259 - DNA, 2869 bp, Homo sapiens
gtggtgcaattcagcagacaggggctgagtgcccgctgcccacaggatgtgcaataaagctggggaaacagtgcagcacacacgggggcaaccgttccctctgatggtcgcggagctcacacccgggggaggtcttacccctgcagcaagggcacggctggattttaggaatatggctctcttagcgtgggattctcgggctgtggagattccagtgggtggaaggccaggcccatctcacggtttagggtccaggaagcccaggttccataccatggaaaggcagcccccggcttgggctggtcgtgggctttctcacctccttctgagttcagctgggctgaggagggctgagctgccaggagctggagtagccaatgaagacaacaagcaaatgtaagtaccagtgaagctctcatctcccgctgtgaccgtgtgtgctagaggctgaccaggaaggcagctgctggtggggcaggtggaccagcaaaggcgtggggggtgccttactactaagggagcctggaacaagaggcttctgcagttttagggacccctggcaagagaagggctggggaggagaaagtgctaggcgtggacaataactgatgcctgaggaagagtgggagaaaggattcccctcccccagtaaggagatctcagcagaaaaatctgagcctggcctctgctgaaggccccagatagaggctccagatggaggcacctgggctaggagccagctctgcatagaagcacagccctctggggtagggggtgggcaggggccaaggtccttggctgtagctgcctccagagcctccacacactggctgaaccaagcatggcctggggagggccacccccagagccttggaattgcctgtggcccggcctggaagatcacagaggggatttagccagcagccaatggctcctttatagtggctagagtggatatgattatattcccaaaagtaaagaagttaaattagtaaagttaacattgatgtgaaatatgaatgttcagaatacaatattttttgtttttgaggatagtggaccaaattcagtgtatgtgaataggtatgcatacatatccaattatacatatgttataaatattaatattgtctatgatatagtatatttataacatataaatatgatatgtaatatataagatttataacccatatttttctagaaaacatatatttataatatataatatattaatatagagtacatatttatattgtatataaatatataaacaatatgaatatgtatttatattatataatatatagtatacataatatgtatatgtatgcatacctactcacatacactgaatttggtctgaatacactgaatatttaccaatattttatatataagatacatattttgcaggctatagatacatatagactgcaaaaatactattgcagtctatactaaatactatagatatagagagactgcaaaaatactatagctctaatactatagatatgtctatactaaatactatgtatatatttatatacatatggattgtaaaaacactattgaaaaagaacccttgcctctgactcttgtttcctttccctttttcctactacctgccccacactcaaccttgagtaactcacaagtcacaagtgttgcaaaaacggttctccatggtaacttcctgacagttaccaggttgggattaagccagaacaatatctacacgttccaaccacgggtatagctgatggtgaagatgaaacctgctccctggatgaaacctgctccctcaatgaaaccacaaggacacctgctgctcacttcaccacgtgccctgcttctgctcagagcgtcacttggtcttcaggtgctccccaagggacatctccagggaaggctttcaaactttgtttgagtcatagaaaccatttccttttgatgctatgaaataaaagtatggggacctgaaagaggaaatagctgaagacataattaagttcttctcagaggatatgctatctaagctgaggcctaaaggttgagtaggcatcaaggaggcaaacagtgggagggaaataactggaggtttagggaaccttgtgtcactgacatattaaattttacacaatggcctcaccatggaactaccccccaaataaacatactcaacacttccagcaccccaagaccatggaggtgtccctcccagaactttcccactccaaaagtattctcagccttttgtcccatagatttcctttacttgtttttcttaaaattaacataaattgattatgcagtatgcacacttttttggctgactcttgtcactcaatattgtgactgcacgtggagcagttgtttcttttttgactttgctgtatcaaattgcactgtgtgaatataccccaatttatccactctgtttttgatggacttttgagttgtttccaggttttagcttttatgaataatgctgctgtggacattcatttgcatgtcttttgcacatatgtttccatttcttttgggtttgtacctatgattcaggtgttgctgggcatgtgcaggtcgagctttgcaagatgttgccgaaaaaactgagtggtgaaagttcctgcagaaattcactcccaccaccagtatctgagagaagttctggtttctccacaccctcgacagtacttggtattgtcttactgatttctttttaatgtttgccttttaaggaggagtgttatatcaaaacaacatggtatatcatattgttggtttatattccatttccctaatgaatttttaaacatttaatggttatttaatgtccccctttataaaatgacagttcaat

SEQ ID NO: 260 - DNA, 2287 bp, Homo sapiens
aataaatgctttggagcatcccagaagttgccaaggaagaatagtggcaattggctgtgagatgctggacacaggacccaaggggcatgttactttcttggttccatgtagcactgtcagctacagcggagatgtgcttcataacgagtacatccttccccccggccacactgtggactgccagaccaggtggagtggtgtccagaagcagcacatggtgaatgccatgctcttcaagattgctcatggcatatattgaagatacagggaagatggtggtggacatgccatccacaatgacttcaaagccccagtactttcatcccaagtccctcaccagtgacaactcccatatcccccttctcctccccaactggaaggctgattgcccagtgaacgtcaccatgtctttgaagcatctcatcaagaatctgctgaattgggacatctgggttgggaaaataggcattcctctgtggaagacacccaggctaccatggagctatacaaattggttgaactcaagtgggaagaacaccttgcccagaattccccgaaagactggtgacaatggggatgttggtgacgtggggaggcagaagcagcaccaggagaaatagggcagtggaccaatggacatctcaactagttccacatctttggaagctaaaattgttggcaagagaaaggttctactctagatttaatatccattgaaattccatctctggtgttatgtcctgtgtctggttaagtgtcccatggaaggagggcgcctccatgtcagaaccagccctgtgtcttttacctctttcatggtgctatccctaggtcccagggtgcgctgtgccagtgaagcgttttgaatttcaagggacagggcatactgagaaatgtagtttcccaaagtgcctgatcactagagtggctatatggctcattttgtgcctcttcttcttgagtaattaacagcaccttctttcactctcagaagtatcctggtttgataataaattatatggtcccattcctaacacaacctctgcttttggctcacagtctgcatctagcctgtttcaggacattgctcattcttcctacttgactgccagaggtgccattgcaggtgaggtttagttctcctttgggttctaaggcagtggaggtaagacagtagcttggaagtcaacttttctgatttaggaaagcagtctctttcctaaggctatagaggatttatttcatgtaggtcccagttggtaggttaaaaaagaatttgtaaagtgtttctaactcatttatgctggaggttgcaaatttttttggtgaaaaataagaccttggcaatgaccttgagcagtaggatattaaattttaactcccacaagcttagcattccaataatggaacactacgcataaatgggttaatggtttttagtctggctgggcgcggtggatcacttgaggtcaggagttccagacccgcctgaccaacatggtgaaaccccgtctctactaaaaatacagaattagccgagcgtggtggcgcatgcctgtggtcctggctactcgggaggctgaggcaggagaatcacttgagccggggaggtggaggttgcagtgagccgggatcacgccattgcgccccagcctgggcaacaagagcaaaactctgtctcataaataaataaataattgtttttagtctttatcttggtaaaccaagcccctaaaaattctaattattcccttgatacatttttataatggaaaaaataaaatgattataaatttcagattttattttttaaggttacacatatctgcttgtatatgtgtgacacagtcctgggaaaatataaaagaaactgttaatggataccattaggtagtagaactgagatggaggtagatgacttttatggtctgttttatacttttttgtatttgaattttcgtaccaggtacatgcattacttttacagtttaagaataaaaatgttggccaggcacagtggctcacgcctgtggtcccagcactttgggaggctgaggtgggtggatcagttgagatcaggagttcgagaccagcttggctgacacggcaaaaccccgtctctactaaaaatataaaaattagctgggcgtggcatcgcacacctgtggtcccagctactcgggaggctgaggcgggacaattgcttgggcccgggaggcgggggttgcagtgggccgagatcgtgccgctgcgctccagcctgggtgacggagtgagactctgtctc

SEQ ID NO: 261 - DNA, 2297 bp, Homo sapiens
accgaggcatcctgggcattcagtaggaagcaatgagaggaaagatccttggccctttcagagatggggcgaagggtcagctgtcccctctgcaaggtggcagattcagaagagttggaattcctccggagtcggccctgccaacatgcgcacgtgtcctgcggggtcaatgatctgtgcagacgacttggaaatccgctgcgtgccgcccaggcgcgtgcatctttgcttaccctttcctagatcggtctcagccccgcaagcagattggcagcttctggggtgctgggacggcgccccctcctgccttcccgctagcatctggcagggactggagtgcttcctggagacccgtaggccggggacaggtcaccaggtgaagcagcgcgcctccggagctgatgctgggtggccgactgcgtccgccacttctcctgcccgcctgcccgtgctgtgtgcgtcctcataggtcttgacagatggtggcggctttgacagttcgtcagccccgcgtggacactcgtccccagtcactgctctcggatcgccagctctgcttgagagacgtggcgcagctggggtgggaatttggaggcagcggtgaaatgggacgggaactgtgctgtaggaacaacaaagacaggtgctcatgtcaccacgcaggcatggcttgtgctgaacgccggagaaaggctcaggggagcaggaggctgcagcaccgagagcatgggacgtgaatatacgagacctgggttccaggcctggctccgtggctctgggccaattactgccctctctcaacccagtttctgtataataaccctggttggacatgatgttttcgaaagatctttttccagatccagtattttctttaatatacatacatattttctaaatggctgttggcttgttaagtggactggggataattgctaccgctttcaacgagagaaactcgagaatctgaaactcagtatttctacgaatttgcgcaacatgggaggtcatcgcctggacaccactgcccccttgcggcaactcatctaaatttgtaggtggtgacaaggaattcaagggcttgagggttcaggccttataaacttgggtttataaagcggttggataatgtccccaaagctttatttatccctggaaggaactgtaactagatcagaggctttatctgcttgatgccataatgcctttcccctgccctcaagacagttatttacaggcaccctctaagtggatctagagccagattacccaaatccacttgcgaattaactcagattaaaatttgcaagcttcttgggagcggagtgaggcggttaaaaaaaaaagaataaaatttgcaagcttctgagacctagtatgctcctactccagagcggattcattgatagaggagatgacactaagtccatatggtatttctggttattaaacaccccatttgtatggacataatcttttctcttttgtttttattgaagtaaagtttacataacacaaaattaaccgttttaagtgaataattcagtggcatttagtacattgactatgttacgtaaaccatcacctctatctaggtccaaaatatagatatatgtatcttttgagaaagagtttcgctcttgttgcccaggctggagtgcagtggcatgatctcagctctccacaacctctgcctcccaggttcaagcaattctcctgcctcagcctcccgagtagctgggattataggcgcatgccaccacgcccggctaatttttttgtatttctattagagacggggtttcttcatgttggtcaggctggtctcgaaatctcaacctcaggtgatccgcctgtttctgtctcccaaagtgctgggattacagacgtgagccaccatgcccggccaaatattttttgtcactccagaataaaaccctgtacccaggatgcaggtagaccccattcccaatacttcatgcacctggcagacaccaatttgctttctgtctgtatgggtttacctattttgggtatgtaatagaaatacatatactttctgtccatttgtgtttgtttctttcacttaacataaggcttttgaggttcatacacatcgtgacatgtaacaatacttcattcctttttatggttgaataatattctgttacgtgtatattccacattttgtttttccattcgtccactgatagacatttgggttgtttctactttttggcaattgtgaacaatactgctatgaacattcatatacaagtatttgagttcctgttctc

SEQ ID NO: 262 - DNA, 2560 bp, Homo sapiens
ctgtccttaaacactcactcctgaccttacaaccctggctgttacctggttaacaagccccaggtgttggctacaggtgtcatcactgagagcccttgtgtgcagatctgccccagctctcccacctgtgactgaggctagcaagtcccccgtgggctgtagagcctagcgctggtgtcagaatcgcttgttgcaggttcatcttcagtgtctttcccacagccacatgctggggaaagacggcaaaggcgctagaggagcaggagaacaaagcaagctgccccagaccacccggctttcgcagaacccagatgatgctcctgtctccccctaagtataacgtgttatttagtcagtatgatcccattcagtgcagaagtatcgcctaggaatttcctgccccacccaccctgttttgttcttaatgaagttcaagaacaaaatgagatgatagtcaagttatggagcaggctgcagtggatacaagggcagaaacacagtctttggagttagacctgggatctgcattgattggttgtgtgactgcagacaagttatttagcctcattaaggatgaatttcttcgcaaaaattggaataatacctgccccatacgactgttgtgagaattaaacactgcaacttttgatgttcaaattctatttcttctccttctagcaacacatactgttagtgccaggaaccataaaaattataaggctgtatctagaggcctgaaaggaagctaaaatatacagtttctactctgtctcttttctcttggttatggtatcagaggaaatacacatattttcttagcttcaaaccaccaaaaaagatgatgcagtaaggagatgggaaatctaatttggaatacagtgtgcaaatcttattttcaagcagactttgaaaataaaactcaattcttacgttagaggattatctgcttaatacaattatagggtaccagtttttgaagtcacatcggggttaaataagattgcaggttcatggggtcatatttgaatgttctgatacttacatatggggtgggaaggaggaatgcatgcttttctcaagttaagacacataaaagagttgtcctggcccaggtgagactcgcctttgtgtagcagctggagcttcattgcacaggcagatagggtgcttgtgtcctgatgaagtaagagaatatatctggaaacactttgtgtactgtgaaatactatacaaatgcagggcagtacaaatgtaaatattaatgtattttagtaataattttagcttttatttcatcatatataataatttgtagtgactggtgtgaagttaaatagaattaacctagaattaatgagttttgtattgctctcatctatttgaagcatcagctgtgcctttcatgttgccttgtgcagccctgtgtaacctcctctgtgcctttcccatggagcactgtgtcatatcacaagtagaactacaggaagatatttctcctcagggcagaggctgggtcttccgattgaatctcccttctttcttcattgagatcctcttcttctggaagctggtttcacatggtggcttagatttttccatctttgtatctagcaccatttgaaatcagtgttttaggagtaagaattgcagcacagccaagggtggactgcagaggaactgctgctcatggaactggctcctctcctcttgccacttgagtctgttcgagaagtccagggaagaaacttgaagagcaaaatacactcttgagtttgttgggttttgggagaggtgacagtagagaagggggttgtgtttaaaataaacacagtggcttgagcaggggcagaggttgtgatgctatttctgttgactcctagcagccatcaccagcatgaatgtgttcgtagggcctttgagtgtggcgattgtcatattctgttggataacaatgtattgggtgtcgattgtcatggggcaggggagagggcagtacacctggaggaccattttgtccacatcgacaccatcagtctgctcttagaggatgccctggagtattcggcgttgattgcggggcacccgaaatcagacttgccacctggactgtcgaggtgcagaccctgggagcaccactggcccatctcttacacaggctgaccgatttctcctggtgttcagagtctgtttttgtctagcaccatttgaaatcggttatgatgtagggggaaaagcagcagcctcgaagcctcatgccaactctgggcagcagcagcctgtggtttcctggaagatggatgggcagagaatagggaaggaagatcatgcttttccctactaacttctgtaactgcatgtatgatacattattgcagaggtaagagatagtttaatggatttttaaaaacaaattactataatttatctgatgttctctagttgcattttgctgaaatgtagtgctgttctaaattctgtaaattgattgctgttgaattatctttctgttgagaagagtctattcatgcatcctgaccttaataaatactatgttcagttt

SEQ ID NO: 263 - DNA, 2912 bp, Homo sapiens
ttttgtagagatgggatcttgctatgttgcccagggtcatcttgcactcctggcctcaggtgatcctcttgcctaggcctcccaaatgctgggatgacagtgatgctgggatgacaggctatgactgattaaaaaaaaacatttaaactgagatcattgctaatggttaatgagtcaaggcgtactcagatgcgagcctttctagggcattgcctgctgtattcccaggtttccttgtgtgataggcacatgctcctcaggtgggtcggttagtgaagtgctctggagcaatgcgtgatcttaccgtgctgggtttggaggtgtcagccttagcactgctggagagtgtgtgcatctcagactcagttttcaatttcctgatccctttggaccatttcccatattgctcccggacctgcagaggcaaagtgtgtactgggtcagctcacagagagcagtgaggacaggaagagtcctgggtgggagctgggcagtggtacctgctggctgaggaggcagtacaccaggaagatgaagacaccctgcaggctgttgatgatggtgaagaggtaggccatgacccgggcagccggacccacctgcaagatgcccagacaccacgtgcagcccaggatgaacagctgagctgtcgctttaaatgccagcatcctggattgagtaagaaaggaggctggtgatgcacccagagaaagagaatcaaggctatttcatctgtgcccatggagccaccatgcccggccttctttgtgcttttgttataggactgctgacaaaagtccaaagaagtttttaaccttttagtttattgattcgtaatgtttgtacatctttgtggggacatatgtgatattttgttaacatgcatagagtgtgtcatgattaagtcagagtatttggggtatccgtcacttcgcgtgtctaccatttgtatgtgttgggaacacttcaaattctcccctctagctattttgaaatatacaacatattgtgaactagagtcaccctactctgccatccaatattataacttattccttctatctgactgtatgttgtacccattaaccaacctctcttcatcgccttgcccactcacataccctttccagactctggaatctatcattctactttatttttatttttagtttttgaggcagagtctcactctattgcccaggctggagtgcagtggtgtgatctcggctcaccgcaacctccgcctcctgggttcaagcggttctcctgcctcagcctcccgagtagctgggactacaggtgcctgccaccatgcccggctaacttttatcattctactttctgcctccacaagatcagcttcttcggctcctctctatgtaagtgacaacctgtggtatttgtctttttgtgcctggcttatttcacttaagagagtgacctccagtttcatccatgttgctgcaaatgacatggtttcattctgttttgtgatcgaatcgtatcctattttgtatatataccatttaccagtcaatgaagattcttcctgttgctctgggattcacaaactgagattagacatggacaaaacatgttgcatggggtctcaacaggataccactgaatctgtgatggctgccatagaaggatggctgcgtctgttttttctgggtcccttcaaaagaccctgagaagggacctcagtggctgctgaggcacatggcttggctcttgggaaccatacatgtctgtgtggttatcacccccttctccatcttaccttgtgttccggagggtggacacttcactattgagggaggagagtctgtttttcaaaatccagagagtcaccagaaagagaactaaattcaccttcagaaaaccacagaagatttgttgaatagattttgaaacctgttatctctttttttttttttttcagcctgggtgacagagtgtttctaaataaataaataatgactgaatggtctcttaacgttcctttttatggctgaataacatttcattgtggatatattacgttttgtttattcattcatcagtgataggcattgtttccaatttttgactattctaaatactgcttctatgagcattcatgtacaacatttttctaaacgtttattttaggttcagaggtacattttgtaggtttgttatgtaggtaaaatgcatgttgcggcggtttggtgtacagattatttcgtcaccctggtcatcagcacagtactctataggtcgtttatttatcctcgccctcctcccactctccaccctcaagcaggcttcggtgtctgaagtttccttgtttgtgtccatgggtacccaatgtttagctcctacttataagtgagaacatgcggtatttgattttctgttcctgcattaattcacttaggataatggcctccagctccatccatattgctgcaaaggacatgatcttgttattttatttttttgagatggagtctcgctctgtggccaggctggggtgcagtggagccatcttggctcactgcaaactccacctcccaggttcaagcgattcttgtgcctcagcctcccaagtagctgggattacaggcacccacgaccacgcccagctaacttttgtatttttagtagagacggggtttcgccatgttggccaggatggtctcaatctcttgaccttgtgatctgctcgcctcggcctcccaaagtgctgggattccaggtgtgagccaccgcacccggccgatctccttattctttatggctgcatcatgtacaagtttttttgtggacatcgttttcatttgttttgggtatatacctgggtcatatggtagctctatggttaacttttggaggattagtgttaatagttcacaaaaccaaaaacg

SEQ ID NO: 264 - DNA, 3027 bp, Homo sapiens
ccatcgcaaggaaacgcttgcttccagtggtaccaaataggatttggaaccagtttgtgcccaagctcaaatctcgttagcatctgcctgtttccctggtgtgcatgtgtcctgcctcgatgcatttggcagcaggtgggatgcgctgggcctgctgcctggttgctgcctttgcgtgtttatttagccccaatggcgtctcccatctcccccgcatgggaaaggccggtgctgccctctgggagcctggcaggaggaacactgggttggggaggggggcatgtgtggtcccaagtctggaagaagctccttcctcttctcccgctgggagctgcgtggccgatgggagcccatctccaccgcggcacctgcatggtctcagccttccggttcggtgccgctgtgccgggggctactctcttgccagtggggaccacagccctcggtatcccataggtcaagggcgtcaggccctctcagtgagcttcagtcattcactttagaaactgcttcccggctcggtctgctaggtgttgaacatgaccgtggcactcactgaaaacacctgcctgggagggcatctgcggcaggaaggctgcttccctcctggctgaggggcactgccctgcctgacaagggcgtggcttcccagggcctggggatcgaggtctcccacagggtggcccagcaattggaagcagatggtctcaaaccctgaaacgtgccaggcattctggaagtttgcaggggtgtcctgctcagctctttatgaacctgggaagatgacaggctctgttgggggcccacggcacacatttcagggggtctgtgggacttagctgaccccacctcagacagatgcagacagcggctcatcaccggggggtccctcacgggtgtctgtctctcttaggttggagcaaaacgtcccactcactggaggcacctgaggacgacgggggctggtcaagtgcagaggagcagattaactcgtccgacgcagaggaggacggcgggttgggccccaagaagctggttccaggtaaatacacggtcgtggcggaccacgagaagggaggccccgatgcgctgcgcgtgaggagcggggacgtggtggagctggtgcaggagggcgacgagggcctctggtacgtcagggacccgaccactggcaaggagggctgggtgccggccagcagcctgtccgtccggctcggcccgtccggctcggcccagtgcctgagcagctcagagtcgagcccggggtcggccgtgctgagcaactcgtccagctgcagcgagggcggccaggcccccttctccgacctgcaggggtagcgcggcctcggcgccggagacccgcgcgctgtctggggctgcggtggcgtggggagggcgcggcccccggacgccccgaggaaggggcacctcaccgccccgacccagagcgcctggccgtgcgggctgcagaggacccctccggggcagaggcaggttccacggaaaaccccggcccgctggggcttccccggagactccagagcccacagaggaggggccgcagggaacagccccgggcggcaggcgccgggcagcggcatctcgtcctggctccaccgtgctgcttctgcctccggacggtgctttcaggggacgcgcggaccgtggtggagctgcttccggagaagtggaggatcctctggccaacggcctgaggagagcggggcacggggtctctttagcttttacaagttttaggattttttcaagcagggatcaatcccgtggccattttttgtggtactttggcctcaattcttcaccaggaatcactgtgtttacatgaaatgacaatttgatactgtatttgatagaaaactatttttttgttaccggggtttacatagaagcacgttgtttataccactaagtgactttggcggggctctcccatggaaacggatggcactccctgaagctccctggtcacaggtggatgaaaacgtgtccgtgggtgacatcaggtggtgtctccaccaccaaaagcagttagaagccaaggagattcctttatctacctagggttcattttcaaaagaaaatttaaactataatttaaacaattaacgttcttttctacaaaaaaaatgcagggacttgatttttttaaagagcttcactgaattaggatatttttattgcttttaaagaaaatacaaagatgcagtttctgcagggtgtggcgtggaccagtgctgccgaccatagctcagagagccctgcccctgcctcactgcactgcagcctcctcggaggccgcacctccactccactccccacgcgccccctgcctcccacccaggtccacctgccacctggtgaccaccttgagtacagaagtgaaagtggggagagtattttattcaagtcacagcagaactggaaaaaaactcttctgttttaccaacttcttgtgtttcagaaacatattctgttcaaaacttttgaagccctttcggtgtctagtctgcagatgtttttgtatgtgtgcacctctgaccatgtgtgtacatatgtgtcttgctggaaaggacatattcgctgtccccgtgctgctgggagggccgcctcacagcctcacggttcccagccccagcacagtggaggcaggcgtggctgcattcccctcacgctaccctcccagcggcttgtagccgtcactggccagacctccagggtgcggaatcaaataggaagcatgcagagactcggcagcttttcctctgatgtgtaagttatttggaacgcgtgctgtgtcccgcgatgtccctgatgtactgtgcaggcgcggtgcctccgtctcgtcgcacagctgcgcgcccttgtgtgaccctccccataaaggcactttacagcttcatgtttcatccactgtcacttttttttaactgctgatgtaaatggaattttaaaagcagagttctttattgtatggatgacgtttgaataaatatcagcaactcctgc

SEQ ID NO: 265 - DNA, 2338 bp, Homo sapiens
atccatcccatgactgaccatgttcccatttttttcagttgagttggatagacacgaatatgttcacgcagacaggagcgttagaattgagaaccagagtgttctcagctggcagatgtgcccagataaaaccaccaaggggaaatctgcacggcgttcgatgtaaagtcacacctttcaactcacggtatcaactgcatccgtctgtgagagggaaagaagttcgttactcaggattcaatcccagacccgcccaaccacagcatgcccagtccaggggatacttgggtacagggaggcacctcacaccctctctcacacagcctggttttggaagcagccagcctgcctcacatccactgtgtggctactaattagggtctgttccaagctgagctcctccctctctcctttgtgggtggcggagctgctttgccaaagggaccccagggatgggtggaagtcgcctggggcgagatggaaatttctggagaaatctggaggtttctagattatacaatggtgggcagtgatggctacagtttagggagagggctttctgaagccaaaatttgcccattcgtgcccagctctacgtgttcccagtgggccatttcttgaccccacttggaaaatgattctccactgctcttcctgctggggacttccaaggtgcttctgccaaaggctttcattggtctggaatgcccaccttttatggagggctgcccactggtgtctgactgctcctgcccagatacgttctcttaaatgtgttattcaataattcagcttactcaccgcctccaggcaatgagggaaagggcttggccaggtgtaggggcaggagagcaggcaccctgagggctgggattgatgagcattttcaggagtcacagaggcgtagccgccctaaatggacgtcgtgcctgagctggaaactcttgacccctaaccaaggtcacaaaaccaggtgcagagattggacttggcagcaggcaggccttcagggagtagggtgatgggagcagacagtgcccaggaggacacagcaagtccccagaaagcagggccatcgctccaagggccacagtggctgactggatggtcccaacagtaaggcccctcctttagacaaaagctcaaaatcccttctccccttctctgtccctcacttcctatgaagtctggctctctcagccacacctgtgatattaagaatcctaaaacaaaataatgatagggtgagaatgtccaggcagcatggagactttcaccagggccagcaaacccaggtatttacaatctctcaaccgagctaccaggaccacagctggagggcgctggtctcactggtgttgggggaggaagttgtccctggagagttgcctgcctgagatgctttcattggaggggtctttgaggactccatctcaagtcagccgaaacctcaagctgagacgaatgtgatgctgggtgatagtggagagtcttaccttccacaccagatccaggagactgttaggtcacatggagctctgtactgagaggatttggtgcacacctgggctcagcagggagggcgtccatgtgagggtgagaagcaatgacagcccaagctctctgggtctggccccccctacgccacgtggggctggatgcagtgcagacgctgtgcctcgccctccctacacaaacccattaacggccatttctcttggttccaggtgttctcctacatagccactctgctctacgtggtccatgcggtgttctctttaatcagatggaagtcttcataaagccgcagtagaacttgagctgaaaacccagatggtgttaactggccgccccactttccggcataactttttagaaaacagaaatgcccttgatggtggaaaaaaagaaaacaaccacccccccactgcccaaaaaaaaaagccctgccctgttgctcgtgggtgctgtgtttactctcccgtgtgccttcgcgtccgggttgggagcttgctgtgtctaacctccaactgctgtgctgtctgctagggtcacctcctgtttgtgaaaggggaccttcttgttcgggggtgggaagtggcgaccgtgacctgagaaggaaagaaagatcctctgctgacccctggagcagctctcgagaactacctgttggtattgtccacaagctctcccgagcgccccatcttgtgccatgttttaagtcttcatggatgttctgcatgtcatggggactaaaactcacccaacagatctttccagaggtccatggtggaagacgataaccctgtgaaatactttataaaatgtcttaatgttc

SEQ ID NO: 266 - DNA, 2186 bp, Homo sapiens
agcgccccgcaagtgttcgagaggaaggccgcgggggtatctgccatcaggaaagacaaaatggagccacgcaggggaaagcagcatggggtgggggaaggtggcacgtttccggcgcagggagaggaagaacaggtgctcctccaaggaagactgccgctgctccccgggccctggcagcctgccccgccgcagagctgcgcgcacgccggcctcctggcagcggagcccgcggcggaaccaccacagcgaagcattctgtcccctcgcagctgctctcccaaaaactacaggtcctccaggaggccgagataaacctacgcgcagccttgtcttccgggagaggagagtgcctgtttccctacgcgaaatgatgtttaagatccctgcccgagcccccagtcccgcagttaagcatcaactggccgcctaacgggattgttcttccgcttggcatttgcaagggatggatttttctccgttctctcctctgccaagtttgcctcctctgaggctctctgggagggtatttgtaactctgcagttcagtttgaggaaggaaaaaaaaataagacaattttccaaagcaatcgtgtggtctttaaaatattgttatgtaaatgaatctaatgtgtctctaaattcattaagtgggttggagggttactagccctggagggccccagcgaaattggcagagacattttcactgtctaggttgtggttgttgaccttttcttctgtcttgcttacactttcctagggaggaggcaggaactcgaggggcttatcggagtggcagaaggaaagcccccactgaaaatgcctgttatgcgccttctgggaaccgtcctcctctttcacttcctcccagccccagctggaattcccaaatgtagcctaaaccagtaccatacctgctagacaaattgtataaattagacatccctaagagggaggagaattttggatggggagcaaataaaggaaaaggaagctgccaaaacagtgagtcttggtcagaatttcacagtcatttctcaggtctgggttggaggatgtaaacacaggggaagtcaagacagattgttgccatcctagctactttttgtaattgggaagcatgtaaagattgactcctttttcttgcgtccttcaaagagcacgaaaagtggggcagtaagtattcaaaagcatctgtttcctgcctgaacccctctgagtaccagagggggccagcagaagaacctgccatggtccgtaaacatgcagggaaggctgtgacataggaagccaggcccacagctgagcctcccaaggatgaagataggcattcatcgaaaaactgtttttgtgtttcttccagtactgctactttttaagtataatttacatacaataaaatgcagatttttaagtatactgatctatggattttgacaagtatgtacacccatggaacccaccacccatcaagaaacagaacttaggccgggcatggtggctcacgcctgtaatcccagcactttgggaggacgaggcaggcggatcacctgaggtcaggagttcaagaccagcctgaccaatatatagtgaaaccccatctctactaaaaaaaaatacaaaaattagctcggtatggtggcacatgcctgtaagtcccagctacttgggaagctgaagcaggagaatcggttgaacatgggagacggaggttgcagtgagccgtgagccgtgattgcaccactgcactccagcctgggtgacagaataagactctgtctctaaaaaaaaaaaaaaaaaaaaaaagaacttgttcatcactgcagcagattccctcgtgccctttgtttcaatcttcctctcatcaaaggacacctctgatggatctgccttctgtcattacagattagtttgcattttctaatgtcatattaatgaaactacacagtatgtagtcattttctggctttgtttgcttagaatgatgtttttgaagatcacccatgtaggaacatatatcgagagcatctatatgtagtttgtttcattttattggtgagtaacattccatgatatggttataccgccatttgtttatgcattcatctgttgatagacatttgggctgtatattggtttgtggctcttatgagtaaagttgcaatgaatattcttttagattt

SEQ ID NO: 267 - DNA, 2904 bp, Homo sapiens
tttaacctatttttacacgtcgatgcagtccacttctctttacacagatgtaccgcaactcgtgaccagggctggctgggagggcaacgcagggactggacgccctacagggccgagcccaggctgtgctggagggtggggctggggtgcatggggaggggagcagaacccagaacccaggagccccgcgtgggccacacccaactcagagccggcctgagcgttcacggccaggcagcctcgcttccttgcagccaagggctgggggccagggctgctgttctgcactctggggtgggtgagggggaccctgggctgtttgctgtcccaagccccttctggaagttagaagcagcaaagggcccggggaagccgggcatgtgagaggggtgcgtccccaggtcccccagagggccctgtcgccgaggacctttctgaaggaagcagaagacgccatttcctctacttcacactgaactgtcccagccactgcatctagggggcattgggcggaagatggtgcatttccatggaccattttacacttaccttttaaagcaaagcctcattttctaaacccctgacttgtgaagcacaattcagcctccgggctgggccacgtggagagagaggatcttctcagcaaggcgagatcccgggcggcggctgacatcaggagcgccaccctgcgtcctttgctgctggttccttactggtttgtacggtcagcgctggaaacttctattaaatggatgcattctggaggcatgaagttacaagtcaagtcgccctgctcgtgtttccaaggctctcacccctcccagccaccccactttaagggttacaaacacctgctggggtccccaccccaaccccataggcaagcccccattccccagccaggccaggacagtccttccaaaactcgggaaccaaattgtatttggctactggtgactggatcctggtagccaggaaacctgcctggtggtgggggtcccagagtccaggagggctgtctggtgagctgcccatcagcctcacccctgcagccaggcatgtccctggggtgggcacagagaccccaggctctgcccgcagtggcacagaactcatctgaggccagtggctgctggggatcccctacactgggggtcagggctgccccaggtggggatgtgtgtgcacctcaccacgttcacttcagggtaccccaagaggctgaaggggaaggaccaaaaggccgaggtgcagcccctccccggtgtcagggcagacaacacagcagctgctggaggggccggccctggccacacagactagctagtcccttactcccggcctgtctggaaccctcctgctcagaaggtgcccactagccctctgtgggggacagagccagacatgggtggtcagggagaggctgtgtggattcaggggaccagaaagtaagtcccaggaccttgatggagcggcagggattgatgttgggctagggtggccagagcctgtcccagcagggctggggtctatcacgttcctgggatccaagcagcgagcacgccctgccccgcagtcaccccgccccgcagtcgccctgcagctggaaggcccaagtctgcctcacctgggtggcctctcatgtcccccacaccctggcccccaggcgaggggggctgcacagcacctgcagggaggagaagggagagaaaagccggtctggctgctgggatgggagggccacagttccagcagtggcaggggaagctgtagcccctggagccccacactggaagagctggcctgcaggaggcaccatgggggagtcgcatgacttattcgggattgacttgcgatgtggatggtgttcccggagtcccctgtggccactccaccaccatgaggccgggaggcatcttagcctttgagcctctctccaggggtgagcggagccccccaaagagggctgaaggcttgctgcccaagaggggctgggtgagcacttggggcctctgagaacatcagtggtccgttccctcctgcacactggtggcaagtggcagcattttttcataatctccagtaatgaggccacttcgggtccagccctggacatccgaggaggaggcgggcagtccctgccccttcactaaccgcagaggatgccagctctaggccccctgctccgcctggagctcatgcgggcagccgtggacacaggtggcacccagcgcccagcggcctgtgaatcctcccgtgggcaaagctgggagccaggggctggaaccaggcaggtcagtgactgtgagatgccagctgccagcccaagaaaagctgcctgcagcatctggaaacttctgtgctctccttggcctctgtgttcttcatctccaggtttagggagcacccgggtgcctctctgcttgtcccgagcccactcaccaacagccccagcttgcacagtcatgacatcaggaaggtgggtccctgctcccagccgtcctcgtccaccatcacttctcccagcctcgtgtcctgctgacccataaaaggtccccctgcaaagtacaccaagtgaagtaggatctgagcaaaggttgagggactgaattccctaagaagtcatcactgcctagaataagcgaaaagaattttttttaatgttttacggtagaattatttgaaacatacaaaatgagtgagacacctgctattttccttattcctgttttttgtttgtttttattttccttatacctaattcatctaacagaaaactgggcagggcgcagtgtctcacacctgtaatcccagcactttgggaggccaaggcaggtggactgcttgagcccaggagttgagtttaagatcagcgtgggcaacatgatgaaccctgactgtatc

SEQ ID NO: 268 - DNA, 2882 bp, Homo sapiens
tggcagctcctcctctcctctcctgacagagtagtgagtcagtcaccctggacctgctgacctacacagacctggagtccctgcggaaccgcaagatggggggccgcccaggctccttggcccccaggtcggcccagctcaactccaagcgctacctgatcctcatctactccgtggagtttgacaggtggggagaagggtctggctccagggccaggctggtgggcggggtgggagaggatgtgggtaggccttaggaacccctggcacccaggcaaggtgatattggttaagccttgccttgggaatcttccctgttggggtttgtatcatttagtattgtgtttggctacaagtagcagaataaccatcaccagtgccctaaacaaacaatacatcaaacaaataatacgtcacgtaacaagatgtctaggtaggtgtctgccgcctgtttaacagttccactagggactcaagctctttcttttttatttttttccttttactgtcgttaatgtgttggcttttttttttgagatggagtcccactgtctcatccaggctggagtgcagtggtgtgatcttggctcaccgcaacctctccctcccaggttcaagcaattcttgtgcctcagcctccagagtagctgggactacaggcacccacaaccacgcctggctaatttttgtatttttagtagagacggggttttgtcatgttgcccaggctggtcttgaactcctggcctcaagtgatcctcctgcctcagcctctcaaaagtactgggattacaggcatgagccaccacgcccggcttggccttttgacttcatctttatctcttcatggccacaaaatagctgctggatcctccagacattgcatctatatcaaggcaggaagaagagggacagggctgagtttgttaattgcctttgccgtttttatcaggaaaaaaaaagtgttcccagaagactcccaacagatttcctgtaatatgtggccagaggtggtcacatgcaagggatgctgggaaaatgaatatctggctttctagcctttatagggggagggtagcaagagagttggaaatggcagttgtgtagctaggtgaccgtgtctgtcccatgtgttagtagccactggatttcttagtggaaagttaccaatcctctgtgaatagcatctcatggggccgttaatcacaatggctcacctttccccagcactttgggaggccgaggcgggcagatcacctgagctcaggagttcgataccagcctggccaacatggtgaaacccagtctctactaaaatacaaaaaattagctaggcatggtggcacgcgcctatagtcccagctacttgggaggctgaggcaggagaattgcttaaacctgggagacggaagttgcagtaagccaagatcgcaccattgcactccagcttgggcaacaaagcaagactgtctcaaaaaaaaaaaaaatgtagcttccagggcctcagtgtccagtcaggagaaccgacaccaccaccaccacacacatatgcagagccacagtcccacaaacaggcttttgtcttggacgcacatccccacacacagccctgcaaatacacaacgccaggtagaatcaggataggccaaggtggaggttttcgagtcaggtgagctatgggtttagatccccgtgctgctgtgttaccctcagtcctttgctcctctgagccttcaggtccccatctgtaacatggggattttttaaattgttatttctacatcatatggcttatgcttggatcgatacactattcacttttttaaaaatgattactgaagacctatgatgcataaggcactgttctaggtgctgaagataaagcaatgaacaaaacagacccaggtatctctggctttttggagcatacagtctactggaattgggaaattcttcttaacacaaaacctgacacgtgggactcaaatgaattcagaggttgcaaaccatcggccaacaggcaggtgcggtacccataatttcatttgacccaaacagtgttttgtggaattgttgccagcatttaaacattgggagacttttgaaaacatgggtttcaagaccctcttgagaaatgccatgtgatagctttgattgcaattgccacctgcccataatgggctggcctggggcagccactgccactcacccagggcagagagccttagccccttcctgaccggcactgctcatttatctcacatgcctaggctctggacgtttgcaacccctgagcaaatatttaaaaattactagcctggctgggtgtggtggctcacacctgtaatcccagcaatttgggaggctgaggcaggcggatcacttgaggtcaggagttcgagaccagccaacatggtgaaaccgtttctttactaaaaatacaaaaattagctggacatggtggcaggtggctgtaatcccagctactcagaacactgaggcaggagaatcactggaacccaggaagcggaggctgcagtgagccaagatcgcaccactgcactccagcttgggcaacagagcgagactccgtctcaaaaaaaaaaaaaaaaaaaattgcctgactggatgtggtggctcacacctgtaatcccagcactttgggaagccatggcaggagaatcgcttgagcccaggagtttgagactctgtctcacaaaaaacttcaaaattagccaggtgtgttggtacatgcctatagtcccagctactcgggaggctgaggcaggaggatcgcttgagcctgagaggtcgaggctgcagtgagctgtgattgcaccactgcactccagcctgggcaacagagcaagaccctgtctcat

SEQ ID NO: 269 - DNA, 1986 bp, Homo sapiens
agccgccccgctgtccgccctgagtgcgccgcggctgcccgagcgccccgcagacgggcgggtggccgtggacgcccagccagcagcccgcagcatggattcggattccggggagcagagcgagggcgagcccgtgaccgccgcaggtcctgatgtttttagttcaaagagtcttgcgcttcaagcccagaagaagattctgagcaaaatagccagcaaaactgtggccaacatgttgattgatgacaccagcagcgagatctttgatgagctctacaaagtcaccaaagagcacacacacaacaagaaggaagcccacaagatcatgaaagacttaatcaaggtggcgatcaaaatcgggatcctctaccggaacaaccagtttagccaagaggagctggttattgtggagaagttccggaagaagctgaaccagaccgccatgaccattgtcagcttctatgaggtggaatacaccttcgataggaacgtgctctccaatctcctgcatgagtgcaaggacctggtgcatgaactggtgcagcggcacctgacgcccaggacccacgggcgcatcaaccacgtctttaaccactttgccgatgtggagttcctctccaccctctatagtctggatggagactgtaggcccaacctcaagaggatttgtgaaggaatcaataagttgctagatgagaaagtcctttaaatgccttccctcctactggactttgctgctttaaagttacagcactcaaccatgatctgggtgagaatcaagaacataagcagaaacccttgtcaaagatgtccatgttctttcctgttcatccctctgatgctgattctgatgctgaactgagctcaggtgtgtttttcttccaagctttctagcaaggtttctacttaaaatcacctgtgtgcaagcccaaaggacatttcatctattctaagcagaaaggctgttttgttcattacagtgagtgctgttcatctcatggagtgggaggagcactaaaccaggagacagaggacatggatttggtttccagcttaaccagttaggactctgtcctctgcattctggaaccatgatgcctgcctgcctgcctcacagggctgttgtgaggaccagatgagatgatgtatgttcatacttttggaatctctaatttaaagtcttaatattttgtcttctgagtgtgaggggataaacctggatgtagactattaagcagcataggagaaaagaacaatagaatctaatggactgggtttgcaatctctctctaaatgcactgcttcagacaaagtgaaatccaaaggtgtgaaaaagtatagctgcaaattggaaaaatgtgtttcaagagtcgtctttttggccaggcatggtggctcacacctgtaatcccagcactttgggaggccgaggtgggcagattgcctgaggtccggagttcaagatcagcctggccaacatgatgaaaccctatctctactaaaattacaaaaattagccaggcgtggtggtacacgcctgtaatcccagctactcaggaggctgaggcaggagaattgtttgaacctgggagatggaggctgcagtgagctgagatcacgccactgtactccagcctgggcaacagagcaagactctgtctctaaaaaataataataataataataatttttttaaaaagaggtgtttttgaggtcttagatgttcaggttgatgatcctgcagagggaaactttccatgggggggtggggagagagagttttccatccacaatatagaaacagagaagcactgtgctccctctgcaggaccagccttcccttatctaaggggcatggagctcagggaggctttattccatatgcacgggagaatcaggcagaatgaacccctacccatctttcttggcttttcagtcattttgtgctgttttctctggttcattaataaattgaaactgccctcc

SEQ ID NO: 270 - DNA, 3159 bp, Homo sapiens
ctacagtaggccttcttctgtatctggctttattcagacagcaggatgtttatagtattcatcgctgacgttctgagtatcaatatcaatagctcgttccttcttgcagggtaatagtccattgtgtgcatatggaacatgctcatccttcccctgccccaagtgggcactgggttcactctgcttaactgtttgaaaaaccgtcagactgttttctgaagtggcggcagcagcttccacgccacccgcagtctcaggcttcatttcttcacatcctcacccaaactggttctcacctgtttttactgacaccgtccccgcgggagtgaagtggcgtcttgtggtttggatctgtggctccctcatggctgatggtgctgagcactctgtcgtgtgcccggtgcccgctgacgcctccctgggagcagcgcctgtgcaggcccctgcccactgttccgctcactttcagggccggtagcgacgtggttgggtgcaagccaacggttgtccttcttcccctcatctgttatttgttctgttcttcctttcttgccctcttttgtattgaatatttttatgttcaatttaatcttctttactgtttttaagcattatatttttgttttatttttcagtggttgctctaagaattgcaatatgcaaccttaaccgatcaccctcctccttaactaactatgatactgcttcatggatagggtaagaagcttacaacagtatcaagtgtggtactcccaataatacattctttaagatttttgcttaagcagtcaatgatctttcaagaaagttaagaaaaattaagaaactgcccatatatttacgttttctggtgagcctcatttcttcttaaagacccagggttctagcttgcattttttcccagtagacctcacctgtgcattcctcaggcgccaggtggcacgtggtgatcccccccatcaccacgctggaaagagcagtgaggccggctctggtgctggcgtcttatgttgccaatgacactgcctggccccatcctagctccttccttccacaggcacaggtaacagcatcatggtcatgaaaatgaatggatccctccatcaagaattgaagattgaggagaacttcaaagacaccagtacctccttcctggccttccagctccttcctgaggtatcccagcaggggctgtgggcccagcatgtgcgtggcccggggcccatagcccacaccgtgccctgcgtttcaggaggagcagctgtgggcggcctgtgcaggacgcagcgaggtttacatctggagcctgaaggacctggcccagcccccgcagagggtgcccctcgaggactgctctgagatcaactgcatgatccgggtgaagaagcaggtctgggtgggcagccgagggctggggcagggaacacccaaggggaaaatctacgtgattgacgccgagaggaagaccgtggagaaggagctggtggcgcacatggacaccgtgaggacgctgtgctcggctgaggacagatacgtgctgagtgggtcgggcagggaggaggggaaagtcgccatttggaaaggcgaataaacgtggctgagtctgccaagtggaactgtgccctatgtgtggggactggctgccccctagagcctgccaggagcagaagcctggaggggtggcagggcagagcagcccaggctcagcatggagcccacttaccgtgtggccagccgcgagacccatggccacgcaccttctctcaggccttcgggccccctggttaaactgcaccaagggtgtttcctgttggggtgtgtctcaggcaggcagctgcgtcttgttggtgataacctctgctgggaggttactttgttgcctagaaagttctggaatccacaaccaggggctggcactggagccagcagcttggccgagtcacaggtgacccgtggccctcacgtctctggttttacctttccttacttcattcattcactcacccagtccttacgaatcaccgaggaacactgggctgagcacatgacagggagcctggagccccggggcctccagcgaggcctgagaagggtggttcgggtaaccactgtgggctctctcccatcacagaaggtggacagggcctacccaggtggaggggaccaccctgcgatcaggtgtttgcgacaggggttgggccagctgaggcaagctgtcttttttttcccttttctttttaatagatgcaacatttttataataatcctagagaccttttttctaccaaagatcacagaccagaaaaagttccatctaaaatatcatgcccaggaaagcacatgggatcaaaagtaaaatagcatcatgtgtgatctcgtcttccagcgtgccgctcagttccccgaatccgtgtgcacacgtgtgatctcgtcttcagtgtgccgctcagttccctgaatccgtgtgcacactgcgtatgtgtacgcgcagcatgctatactgaactcaacaagatcttggctgtacataaatatttgtaaaagagaccctttgcacctttttactgtaatgttgagacttcattacttaaatgttctacggaaggttctggtgtggttgttggagccggagggagcgtgtcagcacgtgctgagggcatggggcctgccccctgggcacccatccacaagctgggccacggagctccagcttctcaggacaaagccccggggctggcgcatcctgagggtctctgggggtgtttgccaggctcctgggatgggccgctttcagaagccctgcagtgcctccagatggaaaggcgggcccggcctccggttgggtctgcattttggagagtccacaccacggaccaggttttcccccaaggcttggctttgtgtagctactaacttcttggggcattctgagagtgtgggcagagagaattatgtggcctcatcctcccccaaggctgtgcttgcagcccgggcaccttcccactttctagctctggagaggttggattttgcttttgtaaacacatgaatccttatgataaaagtctgtcagtcaaaaatacatttataaattatttaatgccagtcctcatgtaacctcaggtatcttcagcttgtggagaataaatctggtttaat

SEQ ID NO: 271 - DNA, 2359 bp, Homo sapiens
atttctgatgatgttttttgttcaccaactgtaattcaagatggtggcttatttgaggctgcacatgtactttcccctactcttccacaatatcatccaactcagctgttagaattgatggatttagggaaagtgcgaagggctaaagccattctctctcatttagtaaaatgtattgcaggtgaagtagcaatagttagagatcctgatgctggagaaggaactaagcgacatctctctcgaactattagtgtaagtggcagtacagcaaaggaaacagtcaccgtaggaaaagatggtactcgagattatactgagatagattctatccctccactaccactatatgcattacttgctgcagatcaagatacatcctacagaatttcagaagaaagtacaaagataccacagagctatgaagatcagacagtaagtcaaccagaggatcagtattcagagctgtttcaaatccaggatataccaacggatgatattgatttagagcctgaaaagagagaaaacaaatcaaaagtaataaatctttctcaatatggaccagcttactttggccaagaacatgcaagggtactttcaagtcatcttatgcactcaagtctaccaggccttacccgtttggagcagatgttccttgtagctttggctgatacagtggctactactagtactgagcttgatgaaagcagagataagagttgctcaggaagagatacattagatgagtgtggtttgagatacttgttagctatgcgcctacacacatgccttttgacatcgctgcctcctttataccgagtgcagctacttcatcaaggtgtctctacatgccattttgcctgggcttttcattctgaggctgaagaagaactgattaatatgattccagcaattcagagaggggacccccagtggtctgaattaagagctatgggcatagggtggtgggtgaggaacattaacacgcttcgaagatgcattgaaaaggttgccaaagcttcttttcaaaggaacaatgatgccttagatgctgcactattctacctttcaatgaagaagaaagcagtagtgtggggtctgtttaggtcacagcatgatgaaaaaatgacaacatttttcagccacaactttaatgaagatagatggcgaaaagctgctttgaaaaatgctttttccttacttggaaaacaacgctttgaacaatcggctgcttttttcttgctagctggttcattgaaagatgccatagaggtatgtcttgaaaaaatggaagatattcagctagccatggttattgcccgtttatatgaatctgaatttgagacttcatccacttatatatccatcctaaatcagaagattttgggttgccaaaaggatggctcaggattcagttgcaaaagattacatcctgatcctttcctgcgtagtcttgcctattgggtaatgaaagattacacccgagccttggccacattactggaacaaacaccaaaggaggatgatgaacatcaagttatcatcaagtcttgtaacccggtggcatttagtttttataactaccttcgaactcatcctttgctcattcgaagaaatcttgcctcccctgaaggaactttggcaaccttaggtctcaaaactgagaagaactttgttgataaaattaacctcatagaaagaaaattattctttaccactgcaaatgctcattttaaagttggatgccctgttttagccttggaggtactctccaaaattccaaaagtaaccaaaacatctgccttatctgcaaaaaaagatcagcctgacttcatttctcacaggatggatgatgtaccttcacattcaaaagctctgagtgatggcaatggaagttctggcattgaatggtcaaatgtaacttcatcacagtatgactggagtcagccaatagtaaaagttgatgaggaacctcttaatcttgattggggtgaagatcacgacagtgccttagatgaagaggaagacgatgctgttggtttagtgatgaaaagtacagatgccagggaaaaagataaacaatcagatcagaaggcctcagaccctaacatgttattaacacctcaggaagaggatgatcctgaaggtgatactgaagttgatgtgattgctgaacaactaaaattcagagcttgtttaaagatccttatgactgaattaagaacattggctacaggttatgaagtagatggaggaaaactcatacacctcctatgaaaaaacttcctaccactcaccctagcattacttatatgacatgtctccatacccattacaatctccagcattccccctcaaacct

SEQ ID NO: 272 - DNA, 2815 bp, Homo sapiens
taaaaagagatgcaatttttaagagaaaaacaacaatgataattggttggttcagatggtttctgtcagctaattaaaaagtgaggccttttatcattctgtttgagccttgttctactataagcagggttcagcagaaaagcaccatgttttggagttagttgagcctggatttgcatcccagccttaaccacttatgagttaggtgatgctggacaattttcttaactcttcagggctacttcataggattgttatgaagattatataagattatgccaataaaactcatgcctgaggaagtggttgctccctttctatgggtcagtattggtgcaagaactggaaaccagcccttggagaatagttatacattggccatgattttccacagccctggaaatgcacaattctatcctcctaccaggatgattgttaagttttagctaacatttgattataaaaggccgtaagtatgagtatctctgagataatttgtgtattggaaagaggtgtgtaatagcacttttttaaaaaaacctaggtgtgaaggaattacaagtccagaaggctcaaaatctatagtggaaggaatcatagaggaagaagaagaagatgaggaaggaagtgagtctataagcaagaggaaaaaggaagatgacatggagaccaagaaagaccatccatacacctggagaattgaactggcaaaaacagaaaaatactgggacggctggttccgaggcttatccaatctctttcttagttgtcccattcctaaattgctgctcttggctggtgttgatagattggataaagatctgaccattggccagatgcaagggaagttccagatgcaggtcctaccccagtgtggccatgcagtccatgaggatgcccctgacaaggtgagtctggtgctcagtgactgtaaaaggacaactgtgagaataaccctggatgtcacagaagacaagtctctgagtctcagcctgcattgcctgcagcagctgctgtggagcctatgcagatgcagttccaccagctctccgacttctccctggcagctgcttatggtattggttttgtgtatatgtgctgaggagctactgacactctgctatttcatcccagggccctgtggttaagatcttaagctctacttctccaatacccccaaaagccagagatggaagagggatgattggggtagaaactgctccctaaaccacaggcacagttaggaattaatatgggctcctcctgtgagaaaacaccattctgtaactctgagggcacacataagcccttcacgtcattcctcttgagctctatggagctatccctggcaaggatagtggggaggagtcttctagctctgctagggagggcctaggtccttttaatttcaagccactcagacctgtgggtgggatgagggcaccgtagagcctaaccatctaacagtagctcacagcccaaggctaagccccatcactaacctttatatggcctggaatatctctcccatttccaggtagctgaagctgttgccactttcctgatccggcacaggtttgcagaacccatcggtggattccagtgtgtgtttcctggctgttagtgacctgctgtccacccctcctcaacatcgagctctgttgtaaatacgtcgcaccagaggccactgtgatgccactgtctcctctccatcccgcccagccatgtgacactggctcccggtagacgggcaccccgagatgtaccaaccttttcatgtattctgccaaaagcattgttttccagggcccttgaccaacatcggcttccccagtccagggctcccctgctcctttcccttccctgtactggggtagctcctgcctgctctccctgcgttgcctagggtaaagcctccagatttgccatactgggcccctcttcctagcatcaggcgatacatctgagttcaaatgtcttcccaggctcagggacctccattccttgagattgtcttggcatggcccagccctgcctcatgggatggacaatgcatggggtggtctttatttttccctttcaaataaaacactagtcaggtaccgttttatcccagtcgtactcttccaggtttggaagacccagagaggccaagatcccatccttagccatagcgagcggtggtggtggatagcatcacaagaaacgagcctgaaaatcaggtccagccggtccaagcacatggcctcccatctgggagagcccactgtcccactcccacatgtctgggcacctgccctgggctgaggccaggctgctccaggggcctcctgcgccctcacctgccacagagcaacccaggttaaatacagcccatgcacaaagccacaggccaaagcctatggaattgtttttaatcatcaaatttaaccattttcataactggttcctggaggtgtgcagtgcccccttgcctcttcaaacctacagcttctctttgccatttgtggatttcacatcactccacacagaaacattacagcctggcatccccagtctttgccttcttccagctgcctcgacacagcactgtggcctgtccctattgcccaggcacgccatttccaagggcaggaaggggcagtgtcctgaagcccatcttttctgtgactgtcttaggtgatgtgtagccccctccacctttccactcaacaacctcccacccctgtcctgctgcatggtccggagtctgggacctactttgttttttgttatttatgaccttgtttaaagaaaataaatatctcccaacctt

SEQ ID NO: 273 - DNA, 2810 bp, Homo sapiens
acgatggagatgagcggcacccgcgggcggtcgctgaagacctcggcctgctgcaccagcgcctcgcgcacgctgtggaagtcgctgaggaccaccaccaggtagtggccgataaagaagctgaagatgctgccgtacacgcgggctagagcccccagctatcaatacattacagcaggatgagaaagacccaggcctttgacatcccaggctttgacaggcccaggcttgacagtgtcttggcacaatgttgtgggaagaataagcacaatgaagaggtgcctcaggaaggtattttcaacaacaaaccttcaacaccatgaactgctacttctaacggaggtccgaagcactaacacagccatttcctgtctctctttagcagccttgcctaatccacttacagcatcttgccaaatcatcatccaaattcccttcaactttactcttccatatgtgctcctagtcttatgttcatgtgggaaagaagcttgtgattttgaaactccatttcacagtggatgtacagatggtctttataaggtagctactcggttctagaacacagaatgtggaacagaagaaaatccaattagtaaccttttttcctttttttttccaagaggacacactcagccacccacctcatgggactgctatgagaatgactgaaataattaattgtgaagagctttgtgcccctgggagtaagaacactatgacacaactggagaaactggttattttaccaaggcttaggctggaatggtgtgctttcctttaaagaatcaaacttgacttatggagccaataaaagcctcttgggaaaactggcctcatacatgtctacacagtccctgtatagggttcctgacctgtgatatattataaaacaagaaatttagttccaatgtatccaagctgtcccttcggaaggtgatcagaagagagaaatgagtttgggaaagaaaaggaatagctgaacaagagcaagtgatttcagaaatctaaaccctgagaaaacatgggtaacagagaagaacttttgctgtgatatctacttctgcagggagtagagaaacagaagtagaaggtaaatctgagatgagcacagagatatcaagtgaattgcccaaggtcaccaactagtaagcagtgaagccagcatttggtactttggtagctctgactcggcaggctgttctacccctctttgggaaaagcatcgcaaatgagcacacagcttcagggtgaattcttacagcaaagaaaaggaaatgggatagcacagccctgctatgtcagaagaaccaacatcagacatcagtggattctcatagcaacatctccccactgcttcctcttgacacacaggaaaaatgttccagaatcaactgggaagactggcatttcatttataaatgtaattcccaggctgggtcggtaactcctccaatctttccaattacgttcatttcagatataggggacagaaatgctccagaaaagaactagaccatatttggaggaggagagaaggagtacacccttcatctgtgttgtgaactatgtggaggagagtagtatgttacagtacagagagtcttggggaggccatgtgcatgtgtcttcaggcctccatctcctttcaacttgaggagctctgcttttccttctattttagaggggttacccaaaatctcatctgaaatctgggttccatggctaaagaagtttaaaaactgatagtgccatgacaaagccctggatcagaagtcacgaaacaagaatccaagaatctctctctcagtttggccacaaacaagtcatgattaatcctgggccaactacttccttgggaaacaccaccatctctcagtcagcaaagacagaaccagagagagagactctgcaagttcaggaagaaaggttccaactacttttactctccgttgcatctcctaatgtcaccactttctcagagcagggtttagtcactactacaaaacattgctcaggaactgcagagccactagcctggcatgtggtgacacattcccaacacaattctctaacattctgatttcccttgcaaagataaattcaagcgaaattagaactcttaaagatcagattgagattgaatgccattggctttctccccatacctatgctcctacacatctcttcagcccagcacagggttttaaaagctcactgcttaacacagggctatctcctctgctggttatgagctgcaaggatagagtccatgtcctgtttgtgttggtgttcctggccactagccaagaacctgcagcccagccctagaatagcagttgaatgaatgtggcagcccacacactcaaagacaccagaattatcttaccctttcccagagagcttcaggtacctttcttttcctaaatgagtcactaatgtgtctgtataaatatggtttccatatatgtcacagagcccaaacatttcatctgacttactgtggtttactttttgtgactgcatttttattatatcttatataaaaagggggatataacagaaggaaaaaacagtaaagcaaaaacccatatctagcttcagagcattacatatccactggaagccctaaagcaatgctccatgatcgcatggcctttccgctgcataaccctgaggtcattttttgatacataattctcaaagtatgcagtgctgaaagaccttgaagagctttcttaaatgatgttatggttaaaatttctatgattgcagtccttgaaatcataaaagaataaatacatccttgg

SEQ ID NO: 274 - DNA, 2716 bp, Homo sapiens
ttttgcattagctgctctagcaaactgcgtgcgcgcgcacacacacggatgcttgtttggcagaagctttctgtttattcagcacagagttctcctaggctcccagatatagaaagctctaagagttgctacaggagatagaattgaaactatacataggctgaggtgggcactgcggaggattggctatgcgagggtattaatgtggtgcggctgtacctgcctgttttgtgaaagtcacttctctgagactgtgaaggtgagaagcccagggatccactagaagcttcactgcggctctttggtgggggaaagcattcccagtggtagctgtcctcatttgcagcgttattctcggaaaccaagtatgtgcagcagtgacagactatgccacagctcctctgcagtttggaagctggaacaaatggaaagagcttatagccaagagaggctgtgatttttttttttttaccatccaagctttctctggcagtgcacaaatgaaggatgagctttgtggcaagcaaaatcagcagactgcctgacagggggttttgatcgaacggttggaagtaagcagccttgcccaaacatccagtgcagtggcctccagtaccgatggcagcatccacacagactctgtggatggaacaccagaccctcagcgcacaaaggctgccattgctcacctgcagcagaagatcctgaagctcacagaacaaatcaagattgcacaaacagcccgggacgacaacgttgctgaatacttgaagcttgccaacagtgcagacaaacagcaggctgcccgcatcaagcaagtctttgagaagaagaaccagaaatctgcccaaactatcctccagctgcaaaagaaacttgagcactaccacaggaagctcagagaggtagagcagaatgggatcccccggcagccaaaggatgtcttcagggacatgcaccagggtctgaaggatgtaggagcaaaggtgactggcttcagtgaaggtgtggtggatagtgtcaaaggtgggttttccagcttctcccaggccacccattcagcagcaggcgctgtagtctcaaagcccagagagattgcctcactcattcggaacaaatttggcagtgcagacaacatccccaacctgaaggactctttagaggaagggcaagtggatgatgcggggaaggctttgggagtgatttcaaactttcagtctagcccaaaatatggtagtgaagaagattgttctagtgccacttcaggctcagtgggagccaacagcaccacagggggcatcgctgtaggagcatccagctccaaaacaaacaccctggacatgcagagctcaggatttgatgcactactacatgagatccaggagatccgggaaacccaggccagactagaggaatcctttgagactctcaaggaacattatcagagggactattccttaataatgcagaccttacaggaggagcgatatagatgtgaacgattggaagaacagctaaatgacctaacagagctccaccagaatgaaatcttgaacttgaagcaggaactggcaagcatggaagaaaaaatcgcgtatcagtcctatgaacgggcccgggacatccaggaggccctggaggcatgccagacgcgcatctccaagatggagctgcagcagcagcagcagcaggtggtgcagctagaagggctggagaatgccactgcccggaaccttctgggcaaactcatcaacatcctcctggctgtcatggcagtccttttggtctttgtctccactgtagccaactgtgtggtccccctcatgaagactcgcaacaggacgttcagcactttattccttgtggtttttattgcctttctctggaagcactgggacgccctcttcagctatgtggaacggttcttttcatcccctagatgatgctggcacagaaggcattgttccctaccctctggcgagtgcatgcagcagagagttagacagcaacttacctactctgaagttttctacaacaaaaaaagagttgagtgaatctgtttacatttagaataatgtttttttcttcaagagacgcaattgcaatagtattttttagattttatccaagaagttttttgggcgaaaatcttggatcatttttatgtagcatgattttccttgggatgcaaatcttaaaacagtcctttaatatgaaccaacaatctggagcacaccgaagggcaatctaaattgtggcttgaaggactgcactaaaacccactaaaaagatgcgaaaacctgatgagggcaaaccagttaaacctaacaccctgccttgtctgggctcatcacctctccctatcccagactaactttactgtgaaatcctaccacattccatgtctgaatttttggattcggggtggattttcgttgtccgtggaagaacacatggatctctctggctttctcacccaagttggccacttacgctaatcctggaagtatgatcacttttgaacctgccccttaaccttgacgaggatacaaaagtgagagcatcatcccccaaaggatcactgcacagtcctactacagtatttttaagtagccctctaaatacttaattttaagcaaaatcccttggccgcacttttaaggtttttttatatgtgtatagttaccaacctaaaaataaaaaatccgaacagcat

SEQ ID NO: 275 - DNA, 2344 bp, Homo sapiens
aatctgtatgacaaacctgtacatgtacccctaaagttgaaacagaagttaaaaacaaaacacaaaaaacatgatcctgagttctttcaatggcaacaatccagtttaattggtcaagttctaatggtaagtaccacatcgtttattgcttgtttcttaatctggccacctgctcggctcgtgatggagggtgtgcattctccaggcagtgtaatagtacccatcctttatgaagcatgtctttggtcgggccctctaactgtgtttattttattggatccgtacagcccaataagacaggtcttacctctaaggatcaagaacaaggtgtcagaggaagaggtaggaaaatataccatagtgggaatctgtgccaagaggagtcatgagaagaggtttctgcaccagcctaggaaagttgagatgagtgcccttaggtgatcccgtgcaagggaggcaccgccttgggttgtcagtcattggaagccgccctagccacagaaatattttgtcagatttccaacagggctatggcaactgagggcatagtctgtaggcaatggacatggtattcgactcagtattcttgtttcgtttatgatacaagggcacgttttccagtaagttctattctgagagagtgagcgagaaaggacggatctcccggttgactggcttcggagcagatgggacacagcagcttctgaaagcctcctggttctcctgcaaataaatttctcagatgcatatatttagggaaacaattcatcaatgaagatgacaaaaccatctggctctagagacttaaaaaaaattttagaggttgtaaacatttacattctgatgaagagtgtgtgtctaggttttatttcaaggatttgatgagtttggtttgtggcttgtttttagggattttttaacctggccctgctaatcgaggaaggtacgataatcccacaccatatcttggatttcttggaaattgactcaactctccattctaataacatctccattctccaggaactgtacgaaaggtgctggagccacagtaacgaggagtccttcagcccctgctccttggcctggctttacctgcacttgcggcttctctggggtgctatcctgcactcagccctgatctactttctgggaacctttctgctatccatattgatcgcctggactgtgcagtatttccagtctgtctcagcaagcgatccccctccaagaccatcccaggcctccccagactctgccacgtccactgcaagtccagctgtgactccagctgcagatgcctctgaccaagaccagcccacagtaactaataacccggagccacgtgggtgaactgtgcactccagttctctccagatgagagagaatcttttcaacagctggtattgggaagctggggccagggcatgatcctgataaacaccttaaatgtcttgtcaactggatgcaaattttgcaattggtgtcattttttttaaagtcaaattacaaggaagtacccagatcaggcagtggtaataccaaaggtcatcaaacacatacaaggaacatcttgatcatagggcatgtggggaagtttactgggccatcacagacttttgttctagtgattgtatgtattaggagtcatagcatgccctacggcagatctggattcttatacactaagatgtgtcttaagaatcacagtgcgtgcttcatccctttattgaagaacagaaaattatgactactctacaaggtggataatattttggtacctgtgcttgccacagccctgttcctcaaagctgaattgatagatttctctttgacttccaagacctagcagttataaggcaccttgaaataaattgtttgtgcctggaaatgcagggagggcaatagctttgtaaattggtttacatttttctccttgaatttttctagggtcctagtgcttccgaatcatttaatggcattgtcggatatcttttacatttcaattgcaatccatgaaattacatttagaagattcttagtacttaactgtagtcttctccatgaattacacgttagaatagactggcagcaactgaatatgcagcaagtaagcctctagcttatagtttcatccctacccctcatgcctgcgtgagtctgtacagggatatgtgtgtgtgtgtgtgtgtgtgtgtgttagagaggaagaggaagagcagaatgtctgtatactacatgctgctaaggtagtgaataaatcagtaatgcaatattgtgggtccaaactactctttgcactactttatttacagtagtaaataaaattatttttatacaattg

SEQ ID NO: 276 - DNA, 2154 bp, Homo sapiens
attcaggtcctctgatacaccagccacatttcaagagtgtaagagtcccacgtggctagtgactgtcatagaactttccaccattgcagaaagttctgatggacagtgctctaggatgtagctgtggcaccccagggtcttggggctcgctgtgacagttactcctcttctgtcccccactctcagctgcacctgcagatgctgctgctgccgccctcctgcgaggccgtggcgccacgtggctggaggaggagctgcagctgccccgagtgctgccgcgtgtgcagctctccagtgcggctgcagcgccaccgcgcgttgctttcgacgccggagtccttcgcatgcgcagccagcgcccgggcctcaagtgccccaggacctggcgcagcccgcgagcccgcatcaggcttccagtgggccccgtgggcagtgccagcctttcccacctccgcatctggcaaagcctggccttcgctgcgcttcggtgtcgccacatgccttctgggaatatcacacctccccacctgcgcatgcagccgtctggccctctgtgggcctcggttcccgcatgtgccccgtggaaagaacataccttccccaactatctggcagcgtctggccttctccgggcctcggcctccccatttgctgggtggagaatcacggcccggccacatcggagccaatggctggtctctggacctcggtctccacatttgctcagccggcaggaacatcccttctcccgccctctacctcggtgggtggccacggccgagcaggcagcgacggcccagtggaaagaggacaaacccttgtgggccttagggcgaagacgtaactttgcttagtctcggtttattggccgatctcttgtcaagcggcggaatcgttccgttcgggaggtgggaggggagcggggccgccgggggcgggcgtcttcagtggaccccacgcctccggtcccctccccgcagggcgctccgcagaggcgaggggtgggagcgccggctccaggcggcggaacctccgcactgggctcgcgcgcttccggccggcgccttttcccagggactccgccaacccctcgcacccccgcgcccccagtccccgcgtccccggcgccgccggcccggagctgcccggaagtctcggttccgccgccggcgctcgccaggggaagcccggggccgcccgggacctcggcccgttcctccggacccgagaggccgccgcacggggtacgggggccgggatggagggaggagcctggccctgggacgacgccggggccaggcaggctgggggagtgcgctggagccacccgggatgggggtgggggtcgggagcggcaggatcgggcggagggacgggaggggaagtcgaggcgccagggctccttggggaagtgaaggcaataggaggggccccagggccaggggacaggcggtgtgtagcgggatgggggcgaaaacgcccgggcgctggggttcccataaacaaggggagcagagcaaaagaacgggcgggggaccacgctgtgtgtaacagggagagggatggggctcctggaagaggtgaacacgaggagaaagagagatgccagacgtacacagaaaggaggggaaagtgggcttgggagaggtgctgtgggaagcggagtcccggagcctggtgtgcataacggggtttgggagagggcccctgatgggtacagaaagaagtaacgatgtcaccgccatatatggggggcgagagaaaagggggcctttggggagaatgtagcaggtagccaggttgggggggcggggtatacagaaggaaggcatttgagccattttggggtgtatagatgtagtaagacgatgggttccgtagtggggagaggtgactagacttcgaggtgctaagtgtaggaacaggatggaaaagccctagtgaaatgtggggaattgggttagtggggctctggggaggtacctagagaggaagtgagggaggccacggaatatgaagatggggaggccctgcggcatgtagtggggacggagggccaggaggccgatacgggggccggtgggggggtagggggcggcaaagggaggggaagtaaactgaactggggctgggcaacaggaaaaaaaaaaaacc

SEQ ID NO: 277 - DNA, 2431 bp, Homo sapiens
ataggaccttgcccatcaatgttcagtgttccttgttggctaacgttcaccagggtgcaaatgttggttgatatataatgtttatcatatgaatgacagcttccaccaatgaccaatatccacaaagggaaaatgtctgttggaggcagtgtctgctgtatatcagtgcccagtgttcactggtagctaattgcaattatacttgctctgtgcatcaatacccaatgtcagtccatagctcggcttctaacgacagcaaatgtctatccagttaagtcacatgccctgtgtttattcttctctttatttatttaagtactagtggttctgtctacagggattattgtgtttgttgagcttggagggaaattccccctgtgtttattctttagttcccaaacctatttattattttcttttgcatatccattagatagtcaaagtgttctgaactggaggtacaaacacattcatgtttctttttgtctcccttccctccctccctccctccctttctttctttctttctatctctctctctctctctttctctctctctctctctctttcttttttcagggtcttattctgtcacccaggctggagtgcagtggcgtgatcatagctcactgtagccaatctcccatgcacaagcaagcctcttgcctcagcctcctgagtagctgggactacaggcatacgtcaccatgctcagctaattttttaatttttagtagaaaaggtctggtcttgaactcctgagctcaagaaatcctcccacctcagcctcccaaagcgttgagattacatgtgcaagccactgtgccctgccatgtttcttaatatatgcacatatgtatatgtaacacataaataattacatacataatacaggaagacacagaaataattacatacatgatacaggaagacacagaaaaagagaaactggtctgataccagaagtatcaactcaggaacaattttctactagctgagcctcagaagcagcaacttttccaaagtgaagtgatgaatggaggcgccagccctcctcctcaggttaagaaaggcaaagagccctgcttttggctgtaaaaagccaggttccctaatcaggtgaaggcctgaggcagggactccttagggcagtgtaactagtagccaaggcacaggctccaaagggaggttgcctgggctctagcccggctctgccactcacagctgggtgtcccggggtgagcctctcagcccctcgttcagcctcagttccacatgtgtaaatggaggtctagtagctacctcacagggcagttgttgaaaataagctaatgctcctaaaaccctgagaacagtgctctgtgtatgataagtgttcatagacgtcacattatttatttattttgaaaattcttcttttagtcaaacttataagttttctgtggctcaaaatattctcaaccagggtttctttagtggccatcagctcccagggggtgatatcatggaagctgttatgcttaggaatttgtttaaaaagacgtcctgccctgtgccccagtacatttcaacaccacccagccacacagccgccttctggcccaacactcttaaagacacagtgcttaggaaatgtcctcatgcccctttcctgaggcaggtttgccactgtttccccaggcctggcagtcacagatggcagtcactgacctgctgtgatttgagagatggagagaaaaccttccactcttcttattctccctaatagcctcagtctctgccttcagttccacatttccctttggcgtaagctatgattgtcgtccaaggcccctcctagataggcaaggactcatgataccaagagtgtgatcaggggatagagatgagatgtctgggttggatgcgggagtggggtattttctaactaatggggtgcaaggggtacctgagcatgctctcaaaatgtgttataccctaaaaaatgtttttaaggtagtgtgttgatataacagttgttaagaccatgatgctagaggcaagatcgtgagatccatagagaaggtagttgaagggtagggccttttattcacatatatgctgccttctccaccaactgatgtgatatccttttatattcgtgactccagtgaacccacgcctctgaggatttacacccttgtatttgtactcctcttgagtctgggctggcctgtgactttaatcagtgcaatgcagaagtggttcagtgccagttctaagactacaaagagaaagaaaagttcaaccttccaatatcccagcagacatcaggccccagctgtgtcaccagcttcacgcccacgagtgaccacaacaaacccagcagaaccaaccagcgcatcccagccctggttgcagaatcatgagtaaataaaatggttgctgttct

SEQ ID NO: 278 - DNA, 2696 bp, Homo sapiens
catggcggcgtcggcggctctgtctgcggcggcggcggcggcagccctgtctggcttggcggttcggctgtcgcgctcggcggcggcccgaggctcatacggcgccttctgcaaggggctcacgcgcacgctgctcaccttcttcgacctggcctggcggctgcgcatgaacttcccctacttctacatcgtggcctcggtgatgctcaacgtccgcctgcaagtgcggatcgagtgagcgccggcggcggcggcgaccgcggaggcccggctggaggggcgacagtgtccccgcccgcccccggccgggtcgcgggcatgaaggacagctggatcgcggcggggggcggaggtggggcggcccgggcccctggactctagacctacgccgcccgggcacgaaggcccagccctggccctggccgcggtctcagcccgggaccccggatcgcgcagaaatgcactgaacaggcccctacaattgggctccagaaactacctgagctcggactacctgttgcctcacattggcaaaagagggggaaaccagaaggaggggattctgctgcggcgacttgactttccccgccccgagcagaaaggcattgacgtttgtaggcggtgacccgccccttctctggccttgccaagagtctcatccctaccctggggcacctctgaccctggacctgcttgggcagaggcagcgtgaagggcctgaacaagaggagaagaagggccttcctagtagaggcacagcatggacaaaggctcacaggggtgggggtgcccagtgatcgagtcctggctggggagggaaggtctgagttccctgggaactgaaatcggctagcagcactgtgagagaggtgtatttccccctcctaatgacagaggaaaccgaggcttcggggagggggggatttgcccttgacatgcagataggatgaggaggaactgcgtgtgcccctgggcctgcaggctcccacacccctccccagtcttctccaagacctggcatgatgggaggagggaggggaaagtgaagagggaagcatagggctcctagggcaccaagggagaggggcccaagggtagggaatctggggatctcgctttctttggagcagtacagaagatcacaggaaagattaggacagacagctgagatggcagacaggagagatgggccccaggatccctggggagccaagctttcccccacagcctagcctccccaccccacctggagcttcaccaagggcttttcagcagtgaagtggcacaaacctcccagtttggtgggcaagtggggctgatggtggtgtcatggctcctggagacacgacataaccaggagggtgaagggataaacctggggtgggctggggctgagacccatggcatgaccccaattctctctcctcaagctcgacccccccgccatccccaggatcacacaggagaatctcatcctcacggcttggattggtcctgggggcccccggttgtgctgctaactggtgtacaatgctcaagagcagcccagaggggagccaggaagggaccctcgccctcacctgctatccccatttccgcatctcttgcactggtaccctgagggccacattctcagttcctgggattgaaaactgcagcagtctggccagctccagggacagagtgatccaaccacctaccacgtaccctcctcagcaggccactggacccaggacctgaatgaagctgtccgcctgcctcaccccagaagaggctggacagtggctgcctcgtgccccctgcagtctcccacagccagggcccgatggggtgcctccttgtcccaagtctcctgagaacccctgaccttgctggcctctctcatccgccccaaccctgtccactcttgaccacctctgggggcctgtcagcctgctggtccccccaacagatctctgggggcagcctctgtgggacaagagtgatacagagctggaggagaagaggagtgaggggcctccttgtgtctgatgcacagatgtggccctttcaaaccctggtgtcaccctctgggtgactggatccctagctccagcctcttcctgggccagccaggaagggtggaggaaagttctttgctgattgcatgtgtgatacagtggggggtgcctgagccctccccatgcaaggggctcatcctgggactctggaagctgcttccctactgggagaaatgtgtgtcggagctgcaggggtccctaccctcagagacccccgactgcagggaacccaccccataagagggtcacggatgtccatgtccgcccaccccccgtggcttctgctgtggctatatcggcctagaggggctggctggggaggagcagggctaagccctcagcatttgctcctgtccctgccttttcacccctgctgcctgaagtggtagccccgcctgctgcttctctacctcccctccccacctcttctctcccctacagggcccttgctgcgtgatggggtctccatgcactttatttatttgcagtctgttttctaggcggtggagcttctagacaccgaccggaatgacatacgtttctgtgtgtgattcactgtgtactggtcagcacaggctggccagagagatgttcttgtttctggtgttgtcacgtcttcttgttttctctaagttt

SEQ ID NO: 279 - DNA, 2511 bp, Homo sapiens
ttttattctgcactcatccctattattgaaatcagtggtcctcagccctgaatgtcctttattttaatgtttttattttattgtaaattgacaatttataattgaatatggatgtactgtagaatcacctgagaagcttttgaaaattctgatgcctgagccccttttctgaatattctcatttatttggttttatgttgttgagaatctctggactagatctcatttttggaatctcttaaccactttcttctctcttttcttcactatatgaccaaagtctcatcttctttacaaagccatccttttcagctaggaggaccaaggttacactgcaattccaactcccaaatctcagtggatgtaaaagaacaaatagcaatgcatgtgcatcccacaggagtggaggggttctactccctgacaccttcactccatatgtcactgttacatttgcttaaggtatttgggtcagaactggccacctggccacacccaacttcaaggagagagaatatgccagcctatcatgttcccagaaggacaaaccaaaacatctgtgagctaccacatttgatgacaccttgccacactttgctctcctcttctgaattcctgctgcactcatctataccatatcaagatcgatcacttcattgtgtgcgattttgaactttagatctattttgaattttccaaggacaagaccttggaaatcatgtggtctaacttcctagctgactttggtccttaaaacaaagaaggattccaatttcttatttttaaacaaaatcattaaaacaacaaatgttgtcaactcattttttttttctcagtgaaagacaaaacaaactcaaagttagaatggagagctactgggaagaaatgcatttctgcatctagctgcttcagagtgcattccttatttagatggggcctcatgtgtcacagtacatttctgaaatggttacctgtttccatttggtcttgtgcctactcgtactttagtgacattaatggctactaaggaagtaagacttttggagaaaatgatattctagtcattccaaagttgtattgaatacatttttttttgccatgaaatagccttaggagatctgctggctaataaaccagacttgataatcgcttcatgtgtatggcagaaattatgcttattccccagtgaaataagatttctcaagtcctggtagaggcagatgaatttatcattctgaaacagcagggtgggtcatagcctgggtggcaagctttgtaaatattaatggagattccaaattccactgtgtctgcagtaatttagaagcagtgttagcagcgaagggtcaagggcaaaacaacaacaacaaaaaatgatgtgggtgggacttggatctctttactgtaagaaaaattcttcttttttggaaaattctttttgtctcttcagtgtctgtggccatctgaaaacgtccacatgatgccagaccatgctttactctgaaaatccaccgataaggtacgttgaagatggagaacaactgatgtcaagacacattttggttgtaagggacagaagtccaactccaacgagcttgccaaggatggaacctgctggcaaacataaccaaactttgggaagggcagggtatggttaacctcaggtttctggaagcagagtgtacagtgctgtgccgtccctcttctctctgcttctctctgcatattggccctatcctctcagtggggcaccctccctgagcagcgaacagcagccacaggaagctccagtgtcaatgcctcccacagctttccagagaagcagcagcctctttgttagctccgtatcaaagacatccacaggcagggctttgtgtgacccagtttgggtcacgtctttatttggggcccggaggaaatggatacaatgactacagcccatcatagaacctcatgtttagaggaccaaatttcctctctccaaaagtgaaatgttgtcactgtccattcaactgatgaaaatcttccttttcaacagaaaaactatcatgatgttgtctgttgggcttcagtttcttacagcagtcatcttaagaattaaactggtatggataatctgactatgaactccttgagggcagggaccatattatataatacttctgtgtcctctgctatttcttagcagaattttgaaaatgtgccaagtgttgacttggttcgatcacttgtgagaatggagggacccataatgttaataatcaatgaaggttgttggagttacttacccaaaaccttatgaacttagccttccctagcagattgagtttcctaatttgtccggtataagcaaacactaaagagggattggggaaagttgtgagttgagtagttgggaaaaaggtagtttgcagttttatttacgtctcacagcttgacattttttgtttgccttggagggggtacttttaaaaattcctcttttgaaaacaataaaatcttagattttgg

SEQ ID NO: 280 - DNA, 2146 bp, Homo sapiens
ttttttatagaagaataaaaaaccaaaagtgaaatttcctctcacgtcgcttttccctaattcctaagcccagaggaagctatcatgaatggtttagtgtttattcagtaaggccttccgatgcatttataaatatgcagcacactctcactgtctcctgtgtgcacacaaaaggtgctcatatacatgtcattctatgccttgcttgttcccctaaccacgtgaataaccacgtgtcaggtcatccttccctacctcctcctttttatttttccgagacagagtctggctctgttgccaggctggagtgcagtggtgcaaccttggctcactgcaacttccacctcctgggttcaagcgattctcctgcctcagcctcctgaatagctggaactacaggcgcgcaccaccatgcccagctaatttttgtatttttagtagagacggggtttcaccatgttggccaggatggtcttgatctcttgaccttgtgatccgcctgcctcagcctcccaaagtgctaggattacaggcatgagccaccatgcctggcccctacctcctccttctataggtgtccagtacccttggtatcgaagcagcataactattaatacctaaagctttcctccaataataatttagtctgtgtccctgtttttctctaaaatgaatgttgccatgaacatcactgtgcacatatatctttgggaacttatatctacatgtgtctgtaggacagagttctagaggtgggatttctgggcaaattatatacatgttttaatttttgacaggtactgccaaattaccttctaaaaatgccttacacactagagttttttcccccatcttctccccatactctcaccaacactgagatagtcagtcactttaaatgtttgccaatggagatgcaatcattgattgttgcgacgtccccacacatttttaaagctcgcatggcacacttagtctgtggtgtagctttctggccccctagtggcaaggagcgagggtcacagtgggcaggcattcagtcgtgatgggcagctgctttggggaccacagaagatggtgtgtgggaagggaggcctgagaagcatggaggtcatgacacaggagtgaggccaggagggaccttacactggacagttgtctgttcagagtcccggctgggggttggccacaccatgggcacttggaccaggagtgcaagctgcagggttgggagaggactgttttgcagcctgagctgcagtgagggaggggcctgtcttgcagagagctacacagatcagcaacatgccctttatggacgagtcctctgggtctgacgatgactgcagctctcaggcgagtttccgaatctcggtcccctcctctgagtccaggaagaccagcggactaggcagcccccgggccatcaagagaggcgtctccatgtcctcactgagctccgagggtgactacgccatccccccggacgcctgctcactggacagtgactactcagagcctgagcacaaactgcagcgcacctcatcctactccaccgacgggctgggcctgggcggggagtcactggagaagtcgggctacctgctgaaaatggggagccaggtgaagacgtggaagaggcgctggtttgtcctgagacagggacagattatgtactacaagtccccgagtgatgtcatccggaaacctcaaggccaagtggatctgaactcccgctgccaaattgttcgaggggagggttcacagacgtttcagctcatctctgagaagaaaacctactacctgacggccgattcacccagcctgctggaggagtggatccgagtactccagagcctgctgaaggtgcaggccaccgggcctccagctctgcttcggggtggcaccaagcccaccgtgaagggctggctgaccaaggtaaagcatggccactccaaggtggtctggtgcgctcttgttgggaaaatcttctactactatcggagccatgaggacaaggtacttctcagcctcctcacaatacccactctcctgcttcccccgaagcacatgactgccactctatgtcctgatgaaagtccctaccccacgtaaccccacaataaatacaaaatcagttggctgg

SEQ ID NO: 281 - DNA, 2106 bp, Homo sapiens
tgacctcatgatccgcccaccttggcctcccaaagtgctgggattacaggcatgagccaccactcctggcctcaacttctatctaattctattcagagggaaaatttctagaagcgacattcctgttgcagagaagagatattcacttgagaaccttgatatatatttgccaaatttctgtccaagtatcatttttaaaaagttaagaatatgactttcatagaaacacatacagagcatatgtcaaagatgtatttctctaatgcaatgagacagccagcaagacagtgaggctgcagcagcatggggacagagtgcagaaagaggtcgcagaagccttggaagaaggtcattcagtcatacaaggacaccctgatgcttgcgctgcggtcctttccaagtccacggggcattgttcctttgtgtcaacaccagataagattcatgggcattgctgtcagtgttgtgtgtgttataataccagggaccctcacatggctgtgttagattctaaccaatagacaataataagtcaaagcaaagaccgttactgattccttccattgtttctttagagactttggtttagcgctctgaactttctgattatcagatcttatgtgtttgctaatatataaaataacaaattagacataatgccctataattttctcagtttgattaattgcctgaaatttgatgtgtcagtcagtgtttgattagaatagagaaatcacatgtaatttgaacaaggaaagattaatacgaagaattgctagctataacagggttttggagcaataaggattggctagtaaaaagtaaagagaactctaaggaatataagaataacagataaaaggagcatcaacccctggggttgagatacaacgtccaggacctctgggattaagatccagactctgtttgagggggcatggctgtcgctcactgaatgaagagaagttgctgtggtagaaatctgtctcatcagaatcactctgctataatactgccttgtggaggtactggtggaagatactcggtgctgctgactgctgtgcacttcaggggcctgacaatggagcaaactgcatgggttctggatctggacactggagaagctgtgttgcagtacagaagcctgccaagaggagcacacaagactcttggaaagaagaggaaaatctcctcttacaatgtcaatctaacatcatgccagctagcaaaggaaaaatgtttaaagggtccaagttcatttctgcagagcagacatgaaaggttgaattcggagctgagagacaataagtggacaactggcacatttggtcaaacttgtaattttatatcttagatggacaaattaaacacaagtccataggtgttttccttacaagcttacatttaaatttgggatcctggtcagaattttgctgaggacttcaatttttcccagtgtttcgggaaggataccgtggggccagagccacttttctttattgtaaggtcctgggctgtggccccttttgcttttctgggctcctttctcatgggcatctgttttgggagcttcatttcctcatctgctttgacactttaatcttggacattgtagtgaaatgcttcacattgtcacacattctaatctcagagaccactccaaatctttttgaattttcttggccattggaattagtactctggaatcagtacattaagaatggttttttaaaaactatcagctagaatttcaatattttagaagaaatggtcagtataaatttggagaagcggtttctagctagtagtagctgtgcagaaaaacagttttattgataagtatctgatttggatttaggaaccagctaggatgaaaaattcaattgaggtctggccagatagacataaattttatttttcctttatattctgtgtccaaaagacaaattgtcatgagttatttattttcttttctgaagtatccatttgtttctcagctttgtaattagaggtgtagaaaataaacgggactcaacagcctaagattttgtttaaaaagatgttcttatttatttatattaaaaaaatttataaaattttttttgc

SEQ ID NO: 282 - DNA, 2157 bp, Homo sapiens
tttggtgttaacatacacccaagcccacccggcccgtcgtgacctctgatctgtgcccactcctccggttccagaacgcacctctctcctctgtcttcacagtggggtgtggggcccgtgggatgggcctcaggccaccaggcaataaccacagggcctgcagcagtgcccctgccagccccgaatcccacccccgggaccagccacatccacagcacaactgccccgctggagaggcaccatgggcgtggaggggcttcccggacaccgcccacccgggacccgcctcttccaccaagacagagacgttagcaacgcatggcgggtggggacctggggtgctcaggagggggtacccggggccccggccagagatacatcaattacacccccgtggggggacagccgatgggagccagcaccagcaggatccgagggcgccccggacagaggtctgccccacccacttcctccccaccacctgtgccccagagagcagggcctgcccgggaaggtggcgtcctggagtcgagtgtacctgcagccatgaggttctgggtgttttttgagagagtctgagtgacaccacactcgtgtgaccccacagggttgtgtccaacatacacggaagtggctatggaatggtgtatttgtgcaacctggggtgcgcggatgggtgacttgtatctaagtgcatctgcgtgtatacctgtgtgtgtctgtctgggatgatatgtttttgtggcagtctgtgtgtgtaatagtggtgtagggtatacagagaggtgggtagttgtagatacctgtgtgtggttgtcagcaagactggatatgtgtgaggtgtctgtgtgaatctttgtgcctgtatgagcatgactatattttggggagtgggtgatatggtttatctgagagcatttatctgtaaatatgtttgtcctgattgagggacacgatctgtgttccactctatagcaacatgactgtagcaacgtgactttcggttccaaatctgtatcagtcagctactgctgtgtaacaaatgaccacaaatgtagcaaccagaaacaacacatgcttattatctcatagattctgtgggtcaagagcctgggtgcaggttggctgggtcctctacttgggatctcaggaggctgcaatcaaagcattggccaggcagaggtctcatctgaaggcctgatcggggaaggatttgcttcttagaagctcatgtggttgttgcagcattcagttccttgctgttgcaagactgaaggcctcagttcctcgctggctgttggctggaagctgccctttgttctgtaccatgtgggtctctccacagcggggctcggagcatggcagctaagttagtgagggaaggtgagatggaggttttggtcttattgggtgtgaggaagcaacgtgtgtgtgtgcgcgcgcccttttgtgcagtgagagagagagagagattgcacacatgtgtctctgtagtcatgtggccaggtgggactatgtaggtaacagattgctcgtgtctgatttggtacaagcatgtttgttttcctctgtgttcgtgtgagtgtttactcaacaaatgtttattggacacactcagagagagggagtgtgcacacgtgcgtgtgtgttgctatccagcacgtggaccgggctcccagaagagctggcattgtgtctgagcagagctgggtccccccaaaacttgggctggcccagggcccaccagcagctgatgttgcctcctctcctgtcctggcagtagcttctgggttctgaaggtgccggagagagtgaggctgggcaggggtctgcggccctttctcagggacacaccctgatagcacaatctccttggggccctgcccacctccaggcctctcccacctcaggccctgcccgaccctggggagagagggcatctgcaataggagggggcccgagcctgtcctggctgctggcccatcctgcctgggcatccctggtgccggggactgtgccaggccatgcttgctgtgactccgcccctgccccctctcccctcgcatgtgggtgcccccactcccccatcgtggggtctgtgtagccttcgctctagacatagtcttcctgcaataaaaaagtggatcctgcattccc

SEQ ID NO: 283 - DNA, 2328 bp, Homo sapiens
ccgaaaggttggtggttcgggcccacccagggacgccaaattttaacaaataaaagactagcaggtatcaggagcaaccgttatggctaagactgagatagagctccaatatagagctttccccctactagggctgaaatccagatgtctttggaaagggcacacctttgattcactggatagtggagaagtcactaaggtgcctcgtaagtgggagcataagtgggagttgctagaagtttctggggtgccaggggggccatccacagaaagtggagtcttaaatcatcagagtgaactccctgagtgtcagagggagctggtggtggctgggcactgctggaaccgaaatctggagaagcagccctctaggagcccagcatgcctgcaggacggccctgggattctaggactgaaaagatgtggggagcagtgacttggtttggtgtgcaggcccataccatctgggaaatcccggataatctccagctgaacacttgagaaaattgcagcctgcagcatgggagaaaccacacagggaataagcatgcaggggagggtggagtgtgccctacaacagcctagagagtgaatcataccagaaccaggaaaggaaaatcccttcctcctccagcgtcctccagaaccctctactgacaaggtttaacactcggctagctagcaaaggagaaatatttccaaaatccatcttcatttattacaaagtaggccaaaatatggtgaatttggagctaagaggaaatacatcaataaacagcatagtctgcccctttgagtactcactgtccatatataccttctacgcacacttgaatgccatacaataataactctacatttcacctaacaggatactcatcatctccaaaatgaggagatgcaacaatcattgcgtacagtgctgtggctatattaattgccctttagaatcatcacagttccactggatagtctgttgcccaaagactaattgtgaatttaacctctagcaacttgcatataaaatttttgttaatagaagggagcaagaagaggaaaatgtgagcatatatacataagtacatacacatgaaaagcaaaaaaggaaatattcaaaatgactacagcccttttttctgcagttggtcacaaggccctaatttttacttatggcttccttcttctactgttcattgatttcgcccacctccagccagaacctggtagagtaattcaaactctcattcctgaaagttccaagtcctcaattatcctgccttttattttggtttctgtacttttctactacacttttctattgcatatggagtactaatatacaccccaaactgtctcctgggttacagacatagtcttccttgcccctaatgtataaaggcaacccagtttcctcttggcaatagggatcagtcactccacctagtagagcaatccacctttctgcctgttgattcagtagcatgaggagtccagaatagccaaatgcaaatctttctccaattcagtggaaccattgtgtctcatggtggaaaccatgttccctttaagaactcagatctctgaaatggcagagctcaaagatgccagaagcagcagcaaatattctgcaagtgtgttattaggtgttgctacggtctgaatgttggtgacctcccaaaatttatatgttgaaatctaatcacaaacgtaatagtattaagaaatggggcctttaggaagtgattaagtcatgagagtgcaaccctcataaatgagattagtgccttggtaaaagaggtgcaagggaactgttcaccccttcctccaggtgaagagccacaagaagatgccatattggaagcagaaagcaagccctcgccaggcactgaatctgcttgatctgggacttcccagcatctagaactagaaacagaaccaatgggatgtacataaagagatttattgtaagaaatcggcacatgtgattatggaggctgacaaatcccaagatctgcagggggaggtggcaagctggagactcaggggagcatgtcttgaaccagagccaatgtgggtttccacagaccactgggcaagacacgttgactttacctccactcatatctgctgtacagaaaacccaacatgattaatctagcctacaatttgacagagacagaattgaatataagcagttattcctcaggtgcccccagtgattacctgctcttccaacagaacagaaaaggtcttaacgaccacgggataaagacaccattctgtgtttcaaggctggagttatccaggaataaagctatatcttcaagc

SEQ ID NO: 284 - DNA, 3239 bp, Homo sapiens
gattgaggttccattgggaacaccacaatggggacgttggcactttctcagtgccgtagtgtcctgttaggacatgaattatgccagtttgtctcattatttgtgacattaactttgatcatgtgtttaagattatatttgctatgttctactgtgaagttactgttgactgtaattagcaggtaatttgcagggtaatactttgaggttaggtaaatatcctgtttctcttcaaactttcatgtactagttttatcttcccttgatgaattttatctattctattatttctattatggctgaaaaatagtgattttttgactatctatagatattagttggcattctactgtaaggaaaactttcttttctcctgtacttattcatcgtcccccaggaatcagtcatttttccaaggagacctagttcctttttgtgaggagttgttttgagttcattttgaagttcatttgaagttttgagttcattttactataatctgcctaggtgtgattttctttttatttattctgcttaggatttgcagagatttttttgaacctgtggcttgatgtccatcacttttggaaatttctcagccagcatagtatctgcagactgtgtgtctgttccattttctctcttttctccttgtaggacctcattcacaaggatgttagaactttttaccatggcctcatattatttccacaattttatgtgtttttcatccttttttctctctggttttctatctagtcactttctggtgacctgtcttacagtttgtcttctcttctgctttgtctaaatccctctattggattcttcatttcattcatcgtatgtttcagttctaggatttctatttgatttccgatttaggttctctggtaaaattgtctgccttttcatccgttttcttaaacgtatgaattagagttattaatctcccctgacagatgacctcaatacctgtgggttgatttctactgtctgctttttctattggtttttgtcatttggtcctgactgaatgccaagcttgtgtattaagaaaaagctgtagttgttctgggtgatgttcttttcctcaggagggtttattttttttctgactggcagctggagggtgggcagatcatcttaaactggccaagggtggtgtttttctgggttgctcttactcccaggcaatggttccaccaggtccttctgagaactctggacttccgaagggccccccatcttcatgagcctctacttgccctcaccccaacatagacatgcacacacctgcttacacacacacacacacacacagacacgatcttaccatctttttcagattggctggtttccttcaacgtacgtagaagaggagggcatccagtgacggcaggaacgtggacaagactcgcagattttcttgggagagtcactccagccctgaagtctgtctctagctcctctgtgactcagaggggaaataccaacctcccagtcttccactgcccacagggatagggagggtgttgagaatcctaaactcgaaccgtttcactgtcagcctgccctcggcgacccatcactgggtatgctattgtacatagaggaaacctgggctagccccacccagagcgtagaggagggggcaccgacagtgctgcgagccaggctctgggtagtggctgaggccagaggcccatcgcctgcccctgtccaactgagatggccttcaggagcctaggtttgaacagcagatgctgtcccaggaagggctagggacatcggaggggacctgcccccacaccctctgctcagcccctggactcagccttgcctgtcttttcctgctgctcccagggggaggtgtcagacctcgggaggcagacgggaccagagccaggctgttcactgtgggcccacttgccccactgtgctagggcgcgggaggagagagcactgtggtcgccctctgcagccactctggctcccaagacttccctgactcccccactcccctccttgccaggggcacacccggaccccacacggcaggcccctctcttgggaggggcctttggaatgatgaaattccaaccctgctgcccggtcagcggtaccgtttcctgccctctctctgagaggccctttctggagtcctgggaaggtgtctgcctggccgcgctgccagatcagtacatcttttgtaaaaaccctgaaatgggcagggaagaaaacagggatttcccctctctagatccctgccaggtccctctccaggaggcccctctgctctcctgaagggtggtccctgagggtctgcccagccttggcacgagaggttggttccagcccctggcagggcttccttccaagggcccctgcagcctacaaactgggcctcgggcgactcaaaataagtgctcttgggggtggctctaccccattacctcccccagccacaactcctggccttcgacttctggctgggttggccagaccctggtttctctaccctgatgttgcatgagacctggtaacagtgtctccctcccagctccttgccaaagcctctgttgagacctgggcttcttgtagccccttctccctctggccagctgcacagcctgtgggaggtgcccggcccaggctgggtgtgggggaagctggtccctgctgtgggtggcgctggggacctaggggctccttctgaggttggccttgtggcctctgggctgtatgcctctggggtgtagggaagaggcgggaggagtcatggggatggggagcggcagggggagagaggggccctcgacaaaggcttgggaaatgaggggaggtggaggcagggcaggggaagcgaagagtcagccttggagagagcaccctggggcctccgtgtcggggtacacccagcactttgcgacctgcggcccagcaggcgcggaggatggcggggaggaagccagcagcccctgtgtttactgtcgtcagaaaggtcttgtgttttggttttggggtttttgttttgtttgtgttttgtttggcttgtttgttttttaaggggaaaaaagtttgtaattatttcatccaaatctcccgttatatatctgtgaataataagagattttataatagcaagaaaatgatgtatattttagtttgttgacaaataagtcatcatgatcacgaaggacactgagaaaaaataatttagaaccctggtttttgtg

SEQ ID NO: 285 - DNA, 2689 bp, Homo sapiens
gtttttatttcttccctctagcacaatcattttctgttcctgatggaacaatgagaagggtgggggatgaaaatttctggccaccgtgctctggcctcctgttcaagcatctaaaaataagcagatcattcacgctgggccaaatgacctccgctggcatactcctgtgcccttgttgtgctaaaagagaatctatctcttcctttgactttcattacaaaaagcctctttctctaacctttgttttatgtaggtgccattattattactgggagcagtgttgtgtgataaatacaggtgctttggaaacagcaactttggattggattccgactctgcctcttacttgtgtggcttagggaattttttattttttggagacggggtcacactctgtcgcccaggctggagtgcagtggcatgatcatagcttaagtgatccttctgcctcggcctcctgagtagctgggacccgcaggcacgtgccaccaggcccagctaattttttttaagtgttttgtagagatgagatcttgctgtattgcccaggctggtcttgagctcctgggtgtaaatgatcctcctgcctcagcctcccgaagtgctgggattacagagatgagtcaccatgcctggccttagttaagagtttttaattcaaatcagtattgaatccccagtatttcctgtaaaccagaagttagatctagagtctttattcatattaaaatttttggcaagaatacatcatagttttcttgaacctaagttcctacacagatttaactctagcaacaggctgctttgcttctccatcttccctctgctcacctccacggactgagtcatccttcaggccttcctttggacgtcactttctcagggaagctgccctgaccgcccatgtttagcatgtaggttcattcctgccatggcatcaccacaggggattgtaattgcctgcctgccatttggagaacttcttgtagctcacctcccttgccctgccttccactaatccttccctctcaccacacacatccccctgcttttctatgagaggtatgctgcccatccttcagtcctcacctcacatggcacacccctaggtcaggtttcccatgatactgagccatactctcctgtgcttttttttttttttcccatggcatttatcacaagttatttctggattttctttgttacgaatatttgccttgtactttagactgtaaacttgttggtctttgcttaatgctgtatccccagcacctagcatggtgcctggctcctcatggcagttactacatatttattggatgataaagggtgctattgcattcttttatctcctttaggacagaaactaccttattgatgtttgtggccttggtgtctagctggtacaccaggcccaccacaagatatggttgcccaggtacacaagtccttcattgtatgagagagaaatgtagaaatgtagaaaaataggccagtagggaggccagtaagaaggaaaaataagtctctatcagctgtgaactattcttgccaaaagcatttaaccagaatctaatcaagcctttagacctaatttctagtttacaggaaatgcagggatagaagaacatatttggtaacaccatgaagaagtgatcaaccacatccagaatgtcagacattctgcagtacgatgtgtttgaacaaaggtcataacaagaaaaaagaagctagccaggtatggtggctcacacctgtaatcccagcacttcgggaggccaaggcaggaggatcacttgaggctaggagtttgagaccagcctgggtaagatagcaagaccttgtcgctacaaaaaaattaaaagtaaataaataactttaaaaattaaaagattcaaagatggccgggtgcggtggcttacgcctgtaatcccggcactttgagaggcagatcacctgcggtcaagagttcgagaccagcctggccaacatagcgaaacaccatctctactaaaaatacaagctgggcattgtggcagccgcctgtagtcccagctactcaggaggctgaggcaggagaatcgcttgaacctggaaggaggaggttgcagtgagccgagatggagccactgcactccagcctgggtaacagaggaagattccatctccaaaataaataaataaataaaagatgcaaagattattctagattaagagattgtagagacacaccatccaaatacataatattatccttgactggatatagttagaaaaagacaattacaaaagacattttgaatacactggagaagttgaaatatggaccgtaaattagatgatataataattagagttattgttacttttcttggatatgtagaaaattgaccttattcttagaagatgtataatgaggggctggatgcggtggctcgtgcctgtaatcccagcactttgggaggctgaggcgggtagatcccctgagatcgggagtttgagaccagcctgaccaacatggagaaaacccgtctctactaaaaatacaaaattggcggggtgtggtggcgcgtgcgtgtaatcccagctgaggcaggagaatcacttgaactcaggaggcggatgttgtggtgagctgagattgcgccattgcactccagcctgggcaacaagagcaaaactccgtctc

SEQ ID NO: 286 - DNA, 3203 bp, Homo sapiens
ttcagtaacagtccatcaatattctgcttcattacatagtgtaaagatgtgggtggctcttttaaatgagaccagctcaaccattttttcttaaatgaaatctgatagaaagtgagattttcctcctccagattttaattagtcagtctttacaatgctgccatttcttcagctgtagtaactggaaatcctatttaatcagaccttgcatccttgaaaccccccacagagctacctcattaatgaaactggaaccttgctgctctcataccagaatccagagttaactaaacacacgcacacaggttacagaagaaaatgggcccacccttagcagtagaatttcgattgaagctgccaaagttacatgagttctctcttctcatgaagggtagtgatttgatctccaggagcaaaatatggcacccagaaagtagcccccaaagagaaggctacccccatgatagtctgccgtgcttggctttcgattacttttctctactgccgccccagtgtaaaggtatgtaagatcttgacaactgtgtaaaggatttcagtgtgtaaactctgctgtacaggtgggtgaggtgtaggtgtgttcccatgctattcagcctgcttagcattgatgtggagcccaaagcagtcctgcagagccttacccccattcaagctcaacagcctctcctctaggccttgctccttctccccctgtgattctcacactttcttctgatcttgggcttatatactgaattccctttcagcttcctagagcccatcctgttcattctgagtatctgtataggcatcaagccatgctatgtggggagccctctagaggtttctcaccatcccatctccatcagcacatcccagatctggcatctcacagctgtgctctttctgcttccttcctgttcctcgtccccttacccctagaacaggtgaattatagaaataccagaagggacagtagaaaccccctaagcttacgtttttatttacagatgattggtgctctatttttagggacttcctcaagttctcatagccaattagttactctagagcttcctgttggcagagcccagggctgcagagccctgggtggtcacctaccacacagcctgcctacacaccagtgacacacaaatattgtccttctcaatgtaccccatgacatgtgaatggttgggaagcacaggagaacagagcttgggggaggtgctgacttcccatagagctctgtcctcatcctctccaatgtaggtcaatgcttgctcatctgtttcctcactagtctctcttcaaagttgttttgctttgttttttattcccagtttcctcttgatcaacctggtccagaccctggccctatccccagcatggttctcctgttctcctctttggggagctctgtaccaccccggttagcaagataaaggcagccactgatttctcaagggtataccacactgccttacaacatataggcatgttctaggcctcatatgataccgtgtctagaaacatcccatctggggccttctgtacatccatggtcacttctgtaaggtgtgaatatttgagtcatacggagctgagagattctgagtaaagtggtaggcccactttagcttctctcactgctcagtggccctggagcaggatagattgggctggcctactccatgcatccccaaggagtgctctgaggttgtgcagcgctcagttacctattaatcttattcaacaaattcttactaactgctaccaatgaggaaggcctttggtgagctgagcatacattgatgaaatacagcagccatagagatctatctggggcattaaggagatgctttaacttcttttatttattcagcaaatattgattaatttctaactcttaaacctttgtactagtggctaaggatgcaatggtgataggatgaatacagtctctgctttcatggatcttacattctagaagggaatatagatttaaaacaagtgaatacacaagtaaatcatgacagatgctaaaagttctgtgaaagtaacaaaatactaaattgggaagtaaggagatgagtgggaaacccattttagatagagtgatcagggaaggcttcattgagaaggtcctgtttaagctgagatgtgaggatgacagggagatcatcagataaagaataaagagagaatattctaaacataggaaatagcatgtgcaaaggtcctgaggcaggaaagtttagtgtcacagtgagaaccatccctatgggaacattccttgattctctcctttccacttgtgccacagaggctaccttttagaaagggaacaggcatttcagtttttctgtatgtgacaaatattttttctcatttctctcttccagaaatggtttaagcagcgcctggcaaagtggcggcgctcagaaggcctgccctcagagtgcagatccgtcacagactaaggagatggcaggcattgacagcttcactccatgaaggccatctctgtttctctcctccgcttaaccaagctgttgtggtttttcagcatagtgttgtatgttccattgctagctgtcctgctgtttaacacagtgttgtattttttttctaaatgtacataattagaaaagaaaataacaataggaagctatgtgtatcttctgtgtaaagcagtggcttcactggaaaaatggtgtggctagcatttccctttgagtcatgatgacagatggtgtgaaaaccatctaagtttgcttttgaccatcacctcccagtagcaatttgctttcataatccatctagcaatccaggcctctgttgaaaagataatatgagggagaagggaacacatttccttctgaacttacttccctaagtcactttccttatgtatcatctaatacaatgatggttgagtgaaaatacagaaggggtgtttgagtattcagatttcataaaacacttccttggaatatagctgcattaacttggaaagaagcctgttgggccagaagacagaaactccaactggcaaaaaagcaagcatctaagaaaaaaaaccaccaaagttcttgaatttactatatttaaatgcattggttaagtttattttgctaaataaagtgaactgctttttgtctctaaaatgatattctaaataaaaccttaactttttgttg

SEQ ID NO: 287 - DNA, 2171 bp, Homo sapiens
acctctctcctggagcgctgggccttcgctggccgcaccggcagccatgagctcggagatggagccgctgctcctggcctggagctattttaggcgcaggaagttccagctctgcgccgatctatgcacgcagatgctggagaagtccccttatgaccaggaaccagatcctgaattgccagtgcatcaggcagcttggatcttaaaagcaagagcgctaacagaaatggtatacatagatgaaattgatgtagatcaggaaggaattgcagaaatgatgctggatgaaaatgctatagctcaagttccacgccctggaacgtctttgaaactccctggaactaatcagacaggagggcctagccaggccgttaggccaatcacacaagctggaagacccattacaggtttcctcaggcccagcacgcagagtggaaggccaggcactatggaacaggctatcagaacacccagaaccgcctacacagcccgccctatcaccagctcctccggaagatttgtcaggctgggaacggcttccatgcttacaagtcctgatggaccatttataaatatatctaggctgaatttaacaaagtattcccagaaacctaagttggcaaaggctttgtttgagtatatctttcatcatgaaaatgatgttaagactgctttggatctggctgccctctccacagaacattctcagtacaaggactggtggtggaaagtacagattggaaaatgttactacaggttgggaatgtatcgtgaagcagaaaaacagtttaaatcagccctgaagcagcaggaaatggtagatacatttctgtacttggcaaaagtttatgtctcattggatcaacctgtgactgctttaaatcttttcaaacaaggcttagataagtttccaggagaagtaaccctgctctgtggaattgcaagaatctatgaggaaatgaacaatatgtcatcagcagcagaatattacaaagaagttttgaaacaagacaatactcatgtggaagccatcgcatgcattggaagcaaccacttctattctgatcagccagaaatagctctccggttttacaggcggctgctgcagatgggcatttataacggccagctttttaacaatctggggctgtgttgcttctatgcccagcagtatgatatgactctgacctcatttgaacgtgccctttctttggctgaaaatgaagaagaggcagctgatgtctggtacaacttgggacatgtagctgtgggaataggagatacaaatttggcccatcagtgcttcaggctggctctggtcaacaacaacaaccacgccgaggcctacaacaacctggctgtgctggagatgcggaagggccacgttgaacaggcaagggcactattacaaactgcatcatcattagcaccccatatgtatgaaccgcattttaattttgcaacaatctctgataagattggagatctgcagagaagctatgttgctgcgcagaagtctgaagcagcatttccagaccatgtggacacacaacatttaattaaacaattaaggcagcattttgctatgctctgattgttccttagaccacatatgttcttatgaagcagcattatgcaaggggaaaaaagcactatgtctgtgtatgtatgtatatagtgtaatacgtatattttaacaaacctgtccttgatattagttaaggtgacacataagggtgacacagaatgtgtaatgcaaatttcatagtaatagtaactttataaaataatattataaaatacaggatttaaacctttctaaatagatcctaaaactgtctctcacattatatagtagatgtttgtttataatgtttacaaaacattttggtgaatttcctcaatgttttataaatgtacattttttaagtccttaagctgactcttagccatcatgtagcttaaggagtctgaaatctgccattaaaactgcacctttaagccaggtgtggtagcatgtgcctatagccccagctacttgggaggtggaggtgggaggattataaatagagactttccttaagactttaaaaatgtatttaaaactattttttattaaatactttgtgatttcctattaagctttaaaataaatcattgtgtaaaacacc

SEQ ID NO: 288 - DNA, 2510 bp, Homo sapiens
ttgatgtgaggaaattctcctgcgtggctgctcctgcactgcatggctctgagcatctgctctatgtctatttctgtcctccattctctccttgagacccacccacactgacatggttcattttcattgctgcgtgatctcctgtctccattctctccctgagacccacccacactgacatggtccattttcattgctgcatggtctctcgttgtctgaggggagcatgggaaatgtcttcatcttcccgtggatgagtgtttggccaggttggggccctgaggactgcgttttgctgggaacattcttgggcatttcttttgtccacaagtgcaggttgcttctggtcagtagctttcaagttttaaaatttcatcccaggtaaaaaatgtaattttcctcataacccacaacacacatcctttcatatacaagcataacaaaaatatacttcacaaccattcttagcagtgcctggtgttcctgcttctctccattctccccaacagctgcatggattgggtggtgggatttttgcccatctggtgggtgtcacgtgatatctccccgttaggctgagcccctcttcatgttttcattagtcattcctccacatttcctcttttgtggagggccggttcagctcttttgcccagtttctgttaagttgtttgaatttttgcacttttcttttattattcctattgttatgtgtttgagacacagtctcactctgttgcccaggctggagtacagtggcacaatctcagctcactgcagcctccaccttctgggttcaagtgattttcctgccttagcctcctgagtagctgggattacaggcgcccaccaccacgcctagctaatttttatatttttactagagatggggtttcaccatgttgtccaggctggtctcaaactcctgacctcaggtgatcctcccatctcagcctcccaaagtgctgggattacaggcatgagccaccatgcccggcctgcatttttctttttcaagaggactctttatagattatgcgtgctcattctggtgactatgtgtgtggcaaagatgggtttgaatccaccaggatgaacgtgcaggatatcctctctggtgggagaagagacagagaggtgtagacgggtacagagaatcagacccgagaggaggccgagtcaggcgggggttgcaggctgctgtgaggacttggctccttctctgaggcgggtgggattagcaggggatttaaacggaggaactgtgggatctcccttatgcatttctgccatggttggctcagctgaacgcacctcttgaacaagacttggccttggacacccagaggcccttggttgagggtttacctcctgacatggccactgacacatccacgtttggctcccacagggctgggcggccccaagacctgctctgcctgggcctttcattggtggcatttctcaagtttgtcccctctcaagtctgctccctctggaaaaccaaacacctctctctcccacatggaaacccccatcagcacctcccccaactcacaaggcatcccgtcaacatcacagtcccgaccttcccacacggacaagctcacgggaccccccgatggaccaggacagcgtgagcactaagacatgccctgagactcacaggaagagcggaccaagaagacgggaacagcacggggccctgggagctgcaaatgcccacgataccgtgagagatggagaaaggtatgacaggaggagcagaccaagaagacgggaacagcacggggcactgggagctgcaaatgcccacgatactgtgagagacggagaaaggtatgacaggaggagcagaccaagaagacgggagcagcacggggcactgggagctgcaaatgcccacgataccgtgagagacggagaaaggtatgacaggaggagcagaccaagaagacaggagcagcacggggcactgggagctgcaaacgcccatgatactgtgagagacggagaaaggtatggccatggcggacacaaaatgttactcaacatttatcacaggcctaaatggagaacataacgctatcaaacccttagacaaaaacacaggggaaaattcgtacggcctggggttaggcgaaaagttcttagacatgacaccaaaagcatgattcataaaagattgacaaattaaacttaatcatacatttaaaattataattctataaagcaatataaaaatccaaagagaatgaaacacaaactatggtctagaaataaacatttgtgaatcacacgtctcacagcctactggcacgcaggatatgtgaagaaccatcaaaacttaaccataagaaagtaaaagccccagtattaaagagagggccaatattggaacggaggcctcatcaaagaaggtataaggagggcatattgcccgagaaagaggctcaacgtcatagagatgctggagaaatgccaatcaacagaacctctgcaaatctatt

SEQ ID NO: 289 - DNA, 2383 bp, Homo sapiens
ataaatagttatttattaacatcattggtcatttttaaaaaaaagaaaataagaaaaaaccgcagaagaaatgcattcacacagtcgcagagatgcaggccttgccagtggtgtgccgggcgcgggtcctgtctggcggcggcctgtcgtctccaggtgctaactcctgccaccgcgcggtgctcacccacgtctgttcgcgcgctcgcccctgggtttgttgggttttttggtttttttctttgtggtttttttttttttttttttttgtatgaaacttggaggcttacaggtatagacagctttcagctacagcacattctaattttttattttgtttagttcttttgtattcacttctggtctctttaagactgttttaaaagaaatcaatttagggaaccccagttatataatataaactttgtaatctgagagaaaaaatgtatagtaaatctaagtcttgatttttaactttctattgtaaaaaataataatatacagagtttaatagaaggtgatgttttggttttgttttcccagaggctgccatatggtctttgagtacggggatgtcccaaactggcccaccaatgagcatggcggctccggccaggaatgccagagttagcctcccaggcttgcgggtggacatgcctgctccctgccagcctccagtggcctggccaggccctcccgagcctgtctgccctccccaggggtggaggagtctctgggccccaggaggattccctcccggagactcgcacggtgctccctgctcacgcgttgtcacagttagtccggaaatgactgaaaccaggcattctcccggacctcagcgtgggggagcctccaggcagacgctgggtatggagctgtggtgtggtctgtcctgtatggtggccagtgctttctgccagcatttctggatggatatagggactatcattagtatcctaatacacggtgattttaaaacaaccataaaattgattcagagtccactgacccttacagatgtaggtatacccttactggagagggaactctgatgaggagatgctggtaaattatcattttttaaattgctggtgagtctgacacttggtgagttttcagccagtttgttaaacttttaattaagttttgtttataataaaaatataaatggatttgaaagtttccattttttaaagttaccctcgttttcaaaggtattttctaaacagatctttaatggactatttaaaccgaatttaaggaattcacacacgacagttgacaggtcttcacgcaggctggttggtaacgtgctgccagcacagggctgggtgatacgtacaccctaagccgggggtgcctggggctggggggcgctccttgcaatgcccctccagccacagggcagtgaggtgctgcctgtgtgagccgtcgggggagcggccggctgtgggggcagcgcagcaggagcatcgtggggcctttccttctcggctggttctctgtgacggtggcgtcggctcgcctctgctcctttcatctagaaagaagccactgaccctgacagcccacggcgggtacactgagcagctgcattggtgctgtcacttttttaaggctttctgtccagacttcaacactggtttcttttcagagtttcgaaggattaatgacttcctcagcgcccttgctggcgggctgagggtgacagtcacgtccgtttcttctgtattagaaggctgcggtgattcaattagattgtcccactgctgagacctgtagggcagcttctaacatgcttttttcaaggggagaggagtagtgacaagtcgtgtgtcggaattggatttgagaacactctgaatgacccctggaggccgagggggcaggcttcgggcgtgaactgaactccagacccctctttgtgttgggcagtgtcatcttgcttacaaactgtaagacacatttttttgtgtgtttgtttttgttgttgttcttttgcagcactcacgcctctgacagtcttttgggaaagagtaacacccacatacagaatttgtcacatccagagtagcactgttccttaatactggcataatgcttccaggaagtttttcttttttatatttaaaatgttacttttctgtatgatgtgcatgcaagtttaccgtaacttttcttaaactttttagtgccgtttctagtatattcctgtaaatgtcagttactgaaaatgagtccaatgtaagtagtttagcttgtttattgcaatgctggcctcaacacaacagaataaaaatggtagaaagtactctttgatgtttctggtaatcatggacccttctcctggggcatttgttttgttttcataataaaaagc

SEQ ID NO: 290 - DNA, 1919 bp, Homo sapiens
cctgaaggagacagggcctgagcggagacatgtgctgggggaagcactggcccaggccggaggggaggaatctggcttgctctaaaggatcacctggctggaggactgcagggcaggggagcggttcctatggtgcagctacactggggaaggggacagagcagaggggagttggggcactccggagggggttgctttctttcacttgtttttgcctgagcaactggaccagtggggctggcttttctgagatggggaggagcagatttgaggaaggaaggttgggctacagttcggatgtgctgagtgcgaggcccacgatgagccccacggagatgctgaggagcagagccctgaacctgggggcagccactgtcctcaggaggcacagggcacctcagggcacctcttcctatcaggaaggaagaagggcccatgaagcaaccagtgctgagtcagatgatgacaacggggtccaggtgctagcctcgctagctgtgagctgcgcccaacactcaagacacaaggaccctgtaggcacacagctgcagcaagcctgcgcccaggtgcccacctccagagcgcccctgtggccctgcccttcacacagattgatgcacagcacagatgggcctctggacccagaacccctgtctactctcctcccggcagcatagcccgaggaagctcccaaagccacatcctggatctgtacccccttcagtggctctcccacttcctaagagtcaaaccagggtaccttgttgtggcccagaaggacctgttgagggggtaaggagagaataggtgggccaagttttggcattggcagagcctgcctgacaagcatacttctttcccatgcagaacagacacctccatctgctcagaactgtggcccgagccacttcctgacgcacatctctgagtaacagtgactaggactcattccggaaggaagccacaccggaaacagcagctctggacttctcaatgtcaaacttcattaaggccaagtacgagagatacaacttaacttgagagacagaaaggtgttccaagcagtcagctcctacaactagacacagcagggaacagagacttggtctcagctccatcacacacacgctggctggccatgggccaggggagaggtctgtcaatcaaccacaggaccaaggacacaagatggacacagaagcttcagtgggccaagagaggatgccactgccccttcttccacagtgtttatcaaagatgtccatgcagcttaaattatctaccctctgtgccacatgctagatagagactctcaaattctaaacagtcaacccaaacttttttctttgagaacagggtctcactatgttgcccaggctggactcaaaacacctgggctcaagtgatgcttgagctgagcctcagttttcccatccctacttcacagacaatgctatgtgaagaaaaatggaaagaactgtgggagaaaagttgcagaatagcatagtaccatttacatggtttaaaaaaaaaaaaaaggtgtatatagggaaaaaactgaaagtaacttcactaaaatcaaaactgaaaggaactggaccgaaatcagtggtagtaatctctgaagagtagattattaagaaactttcacttactatagtaaacatttctgtattgcttgaattctttaacagtgactatgaatcagtcctgtattcaaagaaagcaaggattaaaaaagaaaaccagataaaacaacagccccacctgctaaggatgagaatcaaaagcacaagtgtgaagccaggcacagtggcacatgcctgtagtcccagctactcaggagaccaaggcaggagcatcacttgagcccaggtgtatgagtccaggctgggcaacatagtgaggccatgtttctt

SEQ ID NO: 291 - DNA, 3003 bp, Homo sapiens
cgtcgaaaggtgagaaagacccaacgggacacccagtatcgcagccaccatgcccaggacaagtctctgctgagccagggccgaaggcacctgtggcgagcccgagaaatgccctggaggacagaggctgcccggcaaatgtgggacaccaatgaggaggaggaggaagaagaggaggagggcctgctgaagaggaagaaacgaagacggcagaagagccgaaaatatcagactggggagtacctgacagagcaagaagacgagcagcggcggaaagggagagcagatttaaaggcccgtaagcagaagacttcctcctcccaaagtttggagcaccgcctcaggaacaggaaccttctcttgcccaacaaagtccaggggatctcggattcaccaaacggtttcctcccaaataacctggaagagccagcctgccttgaaaattcagaaaagccatcaggaaaacgaaagtgcaagaccaagcacatggcaaccgtctcagaagaggcaaagggcaaaggtcgttggagccagcagaagacacgatctcccaaatctcccaccccagtgaaacccacagaaccatgtacaccctctaagtcccgaagtgccagctcagaggaggcctcagagtcacctacagcccggcagatccccccagaggcacgtcggctcatagtgaacaaaaatgctggtgagaccctcctgcagagggcggcgcgtcttggctataaggatgttgttctctactgcctccagaaagacagtgaagatgtgaatcaccgtgacaatgctggctacacagccctgcatgaggcttgttcccggggctggaccgacatcctgaacatcctgctggagcacggggccaacgtgaactgcagtgcgcaggacggcacgaggccagttcatgatgcggtggtcaatgacaacctggagaccatctggctcctgctgtcctatggggccgatcccacactggctacctactcgggtcagacagccatgaagctggccagcagcgacaccatgaagcgctttctcagtgatcacctctcggatcttcagggccgggcagagggtgatcccggtgtatcctgggatttttacagcagttctgcgttggaggaaaaagacgggtttgcctgtgacctcctacataatcctcctgggagctcagatcaagaaggagacgatccgatggaggaggatgatttcatgtttgaactctcagacaagcctcttctcccttgctacaacctccaagtgtcagtgtcccgcgggccctgcaactggttcctcttttccgatgtcttgaagaggctgaagctttcctcgaggatctttcaggcccggttcccgcactttgaaatcaccaccatgcccaaggccgagttctacaggcaggtggcctccagtcagctgctgacccctgccgagaggcctggaggcttggacgacagatcccccccaggctcctctgagactgtggagctggtgcggtacgagccagacctacttcggctcctagggtccgaggtggaattccagtcttgcaacagttgaccgggaaaacagcccctcctcttctttctccttccgagttcgcccttcccccacctccttgtctttccccgaccgagcaccagactgcagaatgaggcaataatacggaccaacaagaagccgccttatcaatgccagcattagcgactggactgtttttgtttttttggttacaattagttctcatctccctgtcgtcgtcattgttatcgtggttgctgatgggggtggaaagttgaactccatgtctgaggacaagaggtcccgggggtggtgggaggtggcgccggggtcccttggactggcctccttgttcatgaccaagaccaaacctgggccctggatggccttggcctgtcccgaggagaaatgagaaaatcccagatctctgagcgccccccaactccattcccctgtgttcttctgtctcctgtagtatttattttattagtatttaatttgtattgtttcattggtttctgataagtctgtatcactgtgacgatttgagacaacttgttgtattgagggactttctgtacctccttttctttttctttgttgatgagctctgacaaagctattccctggtgtttttttcccccactggggagggggtgaggtggaatggggtgggggaacatggacttgtgactaacgaagctggttgctgctggcccagggctgggggcttgggggtaaatcctgaggctttggtgctcccccacccacccattcccgccctttgcagcagccccgctatcttgagattagtgttgacagggaggggaggattgtgaggtgaggggttaataagttactctaataaaggagcgtggagaagggatctgaggggtgagggtggcccccctcctcacgccttcttcactgcccccctcagagtgcacaatacgagtttgttcctgcctccactctcccaccccgttctggcctccctgtctcaagatactgagcctctcacctcccagccctcagccacccccatccctgccccttctgagactcacagcacccctttccttcctctcctcccacctcctccctcagcccctcattctccttgggaatctgcagagggctctgggactcactgccggatgtgaaatccaggcgtcagctgtttcctaggcaagggcaggaaagtggtctccagcccttgctccagcgctgggtttgtcgagtgagagagagagaggagcttgggttgcttccctgtccccgccccctctgtggcattgtccctcccactcttatttttctaccaattgctatttttccgaacaatccttgtagagtatgtaccatccaaaggcaggagggcctcgccgtggccggctctggttggagatggtacagttttattgtacaggtgctaaaacaacaacaacaaaaaagaaaatggaaaaaaaaaagatt

SEQ ID NO: 292 - DNA, 2172 bp, Homo sapiens
aagggtgatgaacggggatttcctggggacctcccttctctttattcgagagctcaggagatactgggaaccaaaggctactgagggccgttttgcagacacgtcaggcaggatccggtgtcctgggagcgcgctgtgccatatcccacatcgggtctcctgtaaatgagccgccgagccgacatgcgtggctgagggcttagctctggacactgtgcctgagagtttcgtgttgagaaggagcccacatgcagagcagtgtgcagtcacgggtgtgtgggcttcgcatccggaaggtgagcctcgtgcccccttcgactgagcacgctcccgagggcaccgtgggtcaggacgtaactcacgtggcatacgcggcgccccgcgcccagctgctttcgctctagcaagcctgtttgggaaacatcttgttgccatgatggtcttagtgctctgtgtgcacatgctcctgtgtaagagttgacgggcgccgacctgaaggactgcgtcagcaacaacagcctgagcagcaatgccagcctccccagcgtgcagagctgccggcgcctgcgtgagaggagggtcgccagctgggccgtgtcctttgagcgcctgctgcaggaccccgtcggtgtccgctacttctctgattttctaaggaaagaattcagtgaagaaaacattttattctggcaggcctgtgaatattttaatcatgttcctgcacatgacaaaaaggagctttcctacagggcccgggagattttcagtaagtttctctgcagcaaagccaccaccccggtcaacatcgacagccaggcccagctagcagacgacgtcctccgcgcacctcacccagacatgttcaaggagcagcagctgcagatcttcaatctcatgaagtttgatagctacactcgctttctgaagtccccgctgtaccaggaatgcatcctggcggaagtggagggccgtgcactcccggactcgcagcaggtccccagcagcccggcttccaagcacagcctcggttcagaccactccagtgtgtccacgccaaaaaagttaagtggaaaatcaaaatccggccgatccctgaatgaagagctgggggatgaggacagcgagaagaagcggaaaggcgcgtttttctcgtggtcgcggaccaggagcaccgggaggtcccagaaaaagagggagcacggggaccacgcagacgacgccctgcatgccaatggaggcctgtgtcgccgagagtcgcagggctctgtgtcctctgcggggagcctggacctgtcggaggcctgcaggactttggcacccgagaaggacaaggccaccaagcactgctgcattcatctcccggatgggacatcctgcgtggtggctgtcaaggcgggcttctccatcaaagacatcctgtccggactctgtgagcggcatggcatcaacggggcggccgcggacctcttcctggtgggcggggacaagcctctggtgctgcaccaagacagtagcatcttggagtcaagggacctgcgcctagaaaagcgcaccttgtttcggctggatcttgttccgattaaccggtcagtgggactcaaggccaagcccaccaagcccgtcacggaggtgctgcggcccgtggtggccagatacggcctggacctcagtggcctgctggtgaggctgagtggagagaaggagcccctggaccttggcgcccctatatcgagtctggacggacagcgggttgtcttggaggagaaggatccttccagaggaaaggcatccgcagataaacagaaaggtgtgccagtgaaacagaacacagctgtaaattccagctccagaaaccactcggctacggtaattccccaccctggcccaccctgtgccctgctcctcccgctgtggcccccgcctgccctgcgcagtgccctggtgcttccttaccgcctgcttatcactgtgtgtctcccccacgctccttggcggggtctctctcgtccctgccgatgcccagctccctcttacctgtgaaggactggctttcttttcttctgaggtgggagtggttgtgccttaaatgctattcttgtttgtaatccttatcattgcaatggtttttctgcaatgcatgtaaattctgtatcaatgcaatctatttcatag

SEQ ID NO: 293 - DNA, 2958 bp, Homo sapiens
cttcctgagaaattagtgttttatagtaatcaatttaaggaaattcatttttgtttttactagacagttatgctacagaaaacagtcttaattaatcacacagtaaaggtggtctcaggtatttaggtcagtacaagcttctgggttttcttttttttttttttttcccttcttttgtcctgaggataattagtgtgttgatatttgacaaggcaagctgtgactattgcttgcaactgtcagctgagatcttctagctatgacactgaaaataagattcagagtcaagaaacatcttttgaaagttttcctccttgtacccaaaccaagcgtattgttgaagacaacactgggataatgggaaacttcctggaagatttgggcattattgaggccatgtgttcatcaaatgaggacatacggtgactcagttctcatcaccagattttccaggaggccctgaatttcataaaattctattcttatttacctttttgtattttagttaataaattcagtatggtttaatatagaaataagtttcaaacaaaaatgaggcttcaagtcaaagtttgtcagagaatcccaatttttaatccagaaaagaagactaggcttgttgtatagtgtacagtaccctgtgtaagatctataaccatgtatgtacctgtaacgtactacttgtattattcaaagtttaaatacaaactctcagtatgttaatatgacttctccgttcctccaaaattgtatatgaatccctgcttaagagttcttgaagagctcttgacatttctctgtcttgagtgaacacttctatttagaatctaaaaacagtaagcaaaataagccatcagtaaatgctacacaaaagttactctgtgcccaatagaaactgatgcaaaactaccaagatttagtgaataaagaatatatcacatcattgcaacagtatgacttggtattgaggactagaacctaaaccaaaggcacactctgggatcctggtgtctttgtttccagcatgaggacatgaaatctgctgtgctcattggctggtcttcagtgcctagccctgtggctgcaatacagtagatacatatttactgcctgagtgagtgagtgaaggtgagtcctgaaatcactgtaccaagtagaaaaataatttctacatttagggaaaacaaatgtagagtgtgtatgtgtcagacacctgacaggtttaagtgagctttacatcttaatggaaatagttctgcaaatgaccatttataacttacagttaacactatacaagtcaatctgtagtcttttgattgtgtgaatcagcactaaagaagacactctgacctaatctgcattcaacctcaactaatgtcagtgacccaggacagaccttttccaagcaaaggccagttattattaaaaggtctgtgagaagagcacacaacgaaatataccacagtgtgagtgaaccctttaagttaagggttgattgattagaaagcataacaaccactgataaatttattaatagagtataaagagggaagctggagacatctcagagaagagaacgcaattgatttgagaatcactgggaaccacagattttggtggccaaagccttagagtcagaggaatccaaagttgtctgtgtgtgttcttcagagctgtatcacctcactctgactttgcacctcaagtgaaaagttctaattctatttctacctttgcaaacagggttattactgcaactgacactttctaatttttctttcaggccctgctgcaaaaaagaagtatgtcagttataataacctggttatctaacctgttccattccatggaaccatggaggaggaagaccctcagttattttgtcacccaacctggcataggactctttggtcctacccgcttcccatcaccggaggagcttccccggccgggagaccagtgttagaggatccaagcgacctaaacagctgctttatgaaatatccttactttatctgggcttaataagtcactgacatcagcactgccaactcggctgcaattgtggaccttccctaccaaagggagtgttgaaactcaagtcccgccctggctctttagaatggaccactgagagccacaggaccgttttggggctgacctgtcttattacgtatgtacttctaggttgcaaggttttgaaattttctgtacagtttgtgaggacctttgcactttgccatctgatgtcgtacctcggttcactgtttgttttcgaatgccttgttttcatagagccctattctctcagacggtggaatatttggaaaaattttaaaacaattaaaattttaaagcaatcttggcagactaaaacaagtacatctgtacatgactgtataattacgattatagtaccactgcacatcatgtttttttttttaagacaaaaaagatgtttaaagaccaaaaactgtgctgagaaagtatgccccacctatctttggtatatgataggttacataaaaggaaggtattggctgaactgaatagaggtcttgatctttggaatgcatgccagtaatgtattttacagtacatgtttattatgttcaatatttgtatttgtgttctcttttgttatttttaattagggtatatgaatattttgcaataattttaataattattaagctgtttgaaggaaagaatatggatttttcatgtcttgaggttttgttcatgccccctttgactgatcagtgtgataaggactttaggaaaaaaagcatgtatgttttttactgtttgtaataagtactttcgttaatcttgctgcttatgtgccaatttagtggaaaaaaacaacccttgctgaaaaattccctctttccattctctttcaattctgtgatattgtccaagaatgtatcaataaaatactttggttaacttttt

SEQ ID NO: 294 - DNA, 2029 bp, Homo sapiens
tgtaatcccagctactcaggaggctgaagcacaaaaatcgcttgaacccgggaggtggagcttgcagtgagctgagattgcaccactgcactccagcctgggtgacagagtgaggccctgtctcaaaaaaaaaaaatgtactttacacaaaaaactacacacaaagtatataatttgataactttttgacatacatatatagccatgaaatcatagctacagtcaagataacaaatgtatccaccaccccaaaaatatcctcacacctcttattcctgggcctgcttgccctactccatattcaggacgcagtcctaaggcaatccgctttctgccattaaagactagtttgcatttctgaaattggactcagcatttactcttccatcatctggcttcctactcaacgtaagtattttgagattcatccatgttgctgcatgtctcattggttcattcctcttcattgctaagtagtattccatcgcatggatgtaccacagtgggtttatccatttatctgctgacggacatttgggttcttttcagtttgtgattataacacataaacgtgctatggagttcatgttttaatctttgtatgaacacatgatttcatttctcctgggtatatacccagctgtcaaatgcctaggtcatatgataggtgcatgtttaactatttaagaaactgccagactgttttccaaagtgattgtaacattttacgttgttaccaccagcagctatgagagttccaggtgtgctgcgtcatcctggatgcttgccatggtcaatcgttttgagtttagatattccaacaggtgtgcggtgggatctcactatggtttcaatttgcatttccctaacaaatgatcctgagcctcttctatgtgctgctttgccatctggatatcttatttggtgacacatctagtaaaatcttttgctcattttgggcagttgttaccttagtattgagttttgacagtcctttttatattctagatacgtcctttattagatatccattttgcaaagcctgtaacttgtctttttatttttttaacagtatctttcaaaaacagaagttctcaatgttgatgaagctcagtttatcaagtttttcctttatgtattgtgtttttggtattgtgtctaagacatctttgcctgagatgagaagttgtatggtttaaggttttacacttaggcctgtggtccattttgagtttgtttttgtacacagtgtaaagtatgaattaaagtttggtttattttttgcatatagatattcaattattccagcaccatttgttgacaggctattggtatggtctaaaagtttgtaccctctgcagatttgtatgtagagatcctaatccccgaggtgattgtattaggaggtggggtgtttggggatcttattaagtcatgagggcagagccttcatgaatgccattagtgcccttataaaagagcctcagagacctgccttgtccgttccacattgggaggacacagtgagaagactgtgagtctatgaggaagcagagccctggccagacaccgaatctgctgccaccttgatcctggacttctcagcctccagaactgtgagaaatacatttatgttgtttagaagcgtacagattatggtatttgatcatagcagcctgagtggactcagacaaccatactttctcaactgaatcgatgttgcacatttgttgaaaatcaatcgtccatatatgtgtagatctatttctggactgtgtattctgtttcattgatctagtctacctttgtgccaatgctatacagttttgattactaaagattataagttttagaatcagctagtgtaaacagtgaaaatcactgagagttcagaagttaaagttgtactgcggtttcaaataaggtacttaatggtcctttttcatcattcagcatgaatatcccctacgtatctctgaaggttgattttgttctttattttaagaataaaataacgttgtgaacagct

SEQ ID NO: 295 - DNA, 3691 bp, Homo sapiens
catcaacagatcagctcttgtggtcttcatattctctgtttggggctttagtcttccagaagaggaaactggggcctagactagttaaggtcatggagctaaggagggtggaaccaagctggaccccaggtcagcccttagccaccttcatatccagcaaagccacttgttccctggggaggttgcagaggctacaagctcagccttccagggtgccttgttcctgtctgccccccaggtacaacagtggagggaaggagcagggtgagctgtgtggagacacggaccccaccaccctcacccccagctccaggcagcagtggtctagctccagcactgtgcctttaagagaccaatcccttggctggggatacctgttgccatggagatggtggcctgaatcccacagtggagggctgctgttgccagccccccatccctggctgtgaggggcctcagaagcccatccagaccctacccttgacagcccaccactgttcctgggccccttcccttaggcggccctccaaccccacctcaataccatcagaaacagtccagggcaacatttctgggacacctaagcagataggtagaaagacactaagaggccgggcaatgaagaaagaaaagaatgcttggtcctggtctaatgggccacacctttcagtgggtgggatctgtttccaagcccgttccagctcaggcaggcagtgcccactccctccacacgtggccctcctggctccctcgtttctatcagcccccgtgcctaggagatgcgtggggctcaggcctgggcctacctcttagctggcagccctcctccctggggagcctgggggcagacagggccaggttcctgcaggactgtgggcaccagtggccagaggaggtgataccacacagtgacagcactacacagaccctgcctgtcaccctcatgctgactcccattctagaggagtggagctcagagaggtgatgtaacttgttgaggcctcacagccgggaactggcacagtccagattgaacccagcctggctgactccgaagctggggctctttacatgatgtcctcctccaccgcccactggcaccagtggtctgtcattgtctccaacagaggggcctggcagggaaaagctttcctcccacccagcatgccagtgtctgagggcctgaatatccaggatagcagcccagggtggggcccagagccctggtactggactttaacccgcacccctatgtgccaatcaaccagccaccatgcccacacacaggggcttggcctcagcaagtgcccagctgcgcctgaggtcagcagcccagacctcggcagtggaagtgcagctgacaagtccccggcttcccgcccagcctggacaaagccagagttgttcaggagcctcaaacgtctattacacagccctacccccaggacagatcaaaggggaaggggctgtagatggagagaacggagggtggaatcgggtgcaaggggttggaagaggctctgcaggctctgttgtccctgcaggtggtcctggttcaccctgtccccagcattcccacctccagaaacagcccatcactgtcagattgaatccaaaaacccaactcccaacaaggatgaagcaactcttgcctttactccgaggttcttcaggtttctagggctgtaaacaactgcttcccctaatgcatttaacgtttgatttgatttataagaaattgacttgaccacaacagttccaggcagagtctagggaagctgcacttactccctagctcatttcagggaagttggcagctgaggaccctgcgaggggagcgggtggaattcccagggagctggctgggtgcttcccagctccccctccactgggacaccagacacctgggtgaccaaccaggaatgggccatgaatagcaaggcccaggtctcaggggccaaggcagagggaaagatgaaggcctgagataggagtccccccaaggctcactcaaacctgcataagaccttccagtggctccccaccgccctccagagaaaacccaggttcctcaatggcttccgaggccccgcaggagctggcctacctttcagcctcacctcaccccacctcctcctctttcaacacattccttccttccgatacacccacacaccaaacctccaggcctcggcacgtgccgttccctccgcctgagacactccacgcacacacatcctttatgaggctaactcaagcatcctccaagtttcagctcacatgtcactttcccaaaaagcctttcctgagccctccatctgggtcggatgccacctctgtgagcccgtgcttccatcgcctcaggcttagtctccctgcctcctgctcctggcctagggctcctcactagactgcaggctctgggagggcagaggccctgtgtcactcatcatggtctccccagtgctacacagaagttggttggtaaagatgtgttgagtgaatgaatgggagagtgcagccctgcctagagagaggcttccaccacctgctctcaatttcctgtacgtgggtgtgcatcggtgcacatatgtctggggatggggagggtgaagccacaccaaatattcttccccaaactaaaaaacggctgacaaaagcatcaggggataattcataaatgacttccttttgctttgggactaattgtgcttggcatcactgaatgctagctcaagaggtgtccccaaaagattcggccagcagggaagcactttatgtgtgccaggcactatgctgagcaatttctatgcctatctagttctagaaggcagggactgtttccattatcctcgtcgcacagatgaggaaacaagttcacagagtttaagctacctgctctcggtcccacgaagtcaggaagcgggggagctgggatttgaacctcccagagcttgaggctgaaccaccaggcagccccacctcccctccactggtgtaccctgaggccaaggggataaggtaaggcaggaggtagagaatggccttatctgttcttggacatcagagtgggagagcctgataagaggccccttggccccactcctgcaggttagagatgctcagacatcccctgaggtcacacagcctgggtgggtgacagagcttttccagcagaaaggagccaggaggtggctgcctcccccaggccgggaggaccaagtcgcagcaaaagtggctgggatgtccagaggactagcaccaggtgcttgggcctcaagtccttctgcttcttccctctggggagctctccgcagctgctccccagaacacacaaatgcccttcctggcctttcctggggcccaaaccccctcagacctgggtccagcagatacagacccacctctccccaggaccctggttcctgcccagtcctgccccagctctgcaggtgcagctgtgaaagggccctggcgctaacactgggctgcacgcccgctccctgccccacatttttccccttaaacaaacatgcaagactttctttttctatccctttgaaagcctgctcagggtggacaagactgggtgggacaatggcctggcacccgaacaggagggagtgcaaggtgaagcctgcctcttgctgtgccctctctagccagttctagcccagcaaacccaggaatt

SEQ ID NO: 296 - DNA, 3686 bp, Homo sapiens
atcagggagcacaccacagggctcccgggggcaatgaccacctctgcggcacccctgaggacagataccatatggctgccatgctgaacccagtccaggccccatcatggtctgacccagatgaccaggggaaatcaagctggcaggagggtgcgcatagtgaagctggaataatgccccaaacacaggctggctctcagcagggccagccttcccagccacgaccccgctcctcaccatccctgcccagcggccctaggcacctaccttctcccaaccctgcctgggctctcaaccaaaatgtaatgaggcaggtacgattgttcccatttgcatttgacaagaagggactcacagaggggcccaaggccacgtgagtgccacagggaaacaggatttgaatccagcaggctgcctccctctagtgcaaccccaagactgacctggctctgatctcaaggcagttcaactccaagttcaaaaggaagggggacgagggctcagctgtgcaattggcctgagagcctcagaggtcagtggtccaaggctggagacttgcagagtagaggacaaagggcggtggagcaggggctgctccaggccttggtcatcacaacagctgccaggaggccacagatgtagcagaaagagcagaagcttcagaatcagaatcagacatacctgcttgactactcataagccatgtgactccgaacagatcagtcaacctcttggaccatcaatttctttacctgtaaaatggggatgagagtaatactaagaggacctacctttcagggctgagcatgggttctctgtgaaaacgctgctggagaagtacacagcggagcccatcgatgactcatcggaggagtttgtcaattttgcagccattttagagcagatcctcagccaccgcttcaaaggtccagtgagctggttcagctcagacgggcagcggggcttttgggactatatccggctggcctgcagcaaagtgcccaacaactgtgtgagcagcatcgagaacatggagaacatcagcacagcccgggccaagggccgggcatggatccgggtggcactgatggagaagcgcatgtcagaatacatcaccacggctctgcgtgacacccggaccaccaggtcagacttcccaggcaactcagaccacaggtctcagagtgcacctgcattgcccaaacacagctgatccttaagttcctgcagcatccttcagttcctggactacaagtcccagcaccagcacacatggctgatttccctcttccagcctggcctgcagtcccaggacgaactcttttttttttttttttttttgagaaggagtttcgctcttgttgcccaggctggagtgcgatggcgcgatctcggctcactgcaacctccgcctcctgggttcaagcgattctcctgcctcagcctcctgagtagctgggattacaggcatacgccaccatgcccagctaattttgtatttttagtttctccatgttggtcaggctggtctcaaactcccaacctcaggtgatcctcccgccttggcctcccaaagtgctgggattacaggcatgagccaccgctcctggccccaggacaaacttttaccaccaccaccaccaccacttgcaagtcaaatctaatgcccattatttgccatcaatgcccagcacgctccacccttgcacacctctggatgagcctcagccatgcaccatctcaagtgttggcttgctccatgatctacaacacagcccttctgtctctccaaacaacgaaagcagttctgtacttgctattcacggacacagagtccttatatggggagttcaatccctgcactgtgggttcacagggaggttgggtgcctgaggcaaggggttacaaggaggagtgtgcctgtgtgggcaggtgcatctgaagctgtctgggtgtggcggggggcatatacctccccatcccaattggccatacccagcctgatgtttttactgaattccattcctcagtctacacgtttcaagttaacacgttttttgcgcacctactgtataccaagcactaatgattaagacttgcttcctgatatgaaggatctgggtaacccagtacttgatgaggaaggggtagctcagagggaggagtcggctcagggaacacccattctaggtgatggggccacaggtgcgagccccaggctgaagggggagagaggctccaggcctgcgtgcagatcaggaaggagaattggccttccttcaggatggggtggcagtaagccaacaatagcagctctggggggggggggggcgctccaggggcctgctgcaccctctggccctctgcctccccacagacggttctatgactctggagccatcatgctgcgggatgaagccaccatcctcaccggaatgctgatcggactgagcgccatcgacttcagcttctgtctaaagggggaagtcctggacgggaagacccccgtggtcatcgattacacgccctacctaaagttcacgcagagctacgactacctgacggacgaggaggagcggcacagcgccgagagcagcacgagcgaggacaactcgcccgagcacccgtacctcccgctcgtcaccgacgaggacagctggtacagcaagtggcacaagatggagcagaagttccgcatcgtctacgcgcagaagggctacctggaggagctggtgcgtctgcgcgagtcgcagctgaaggacctggaggcggagaaccggcggcttcagctgcagctggaggaggcggcggcgcagaaccagcgcgagaaacgggagctggaaggcgtgatcctggagctgcaggagcagctgtctgatccccagtgaccacgcccctctggcccagggttccaaggagctcactacacccctggtcaatcaatggccctcactgggaacgcttaatggggccgagggcgccagcaactccaagctctaccggagacacagcttcatgagcacggagccgctgtcagctgaagccagtctgagctcggactcccagcgcctgggagagggcacgcgggacgaggagccctggggtcccatcgggaaggaccccacgccctccatgctgggcctctgcggctccctggcctccattcccagctgcaagtccctggcgagcttcaaatccaacgagtgcctggtgagcgacagtcccgagggcagcccagcactgagccccagctgaggaacagcatgggcagtgccagccccacctgccaggggccatggacacctgccacctttcttcaacaagagtcccccaatccaggctacccttccagagaacgctacccacccagccagggttctctcggggaagatctcgtctgctcaccttagctttctgccttggcagcacgggctgcggaagaaagcacgctgggccaggaggcaggggtgcccaagccacagggagcccctggggaagcctgctccattcttctggtgaccttggcgctccttcactcatctcccctgccccctcaggaactggtggcccagcttccacacccccacctcccagtctctagcctctccatctgtctgtgtatggcctggagtcactccttcctcagcccccagggcaagagagctcaaataaaaaccagaggactg

SEQ ID NO: 297 - DNA, 3898 bp, Homo sapiens
gattcagtagatctttacaagaccatatctgcagggcaaggtaccagaggacagaggcggggacagggacacttccattccagacctagcagcccagcactcagcaccatgcatgggagcaaatggctggactcctgggtggggtgggggtctcagagcaggctcccagagggcttggaggtgactccaccaggtggggacggcagctcccaggtagggtgtcatcagagtagacagcattgcttgctagggacccctggggaggctgacagggtcagtgggtttcagttggggggctcccctgctgagaacccagtaaagccggccttccattcgtctcccgtgtgcccagagccaggtctgagggccgccctgtgcatgccggcccttccaacgtggcagagctcagggggaagaacacccaggctctcaggagactctcaggccaatgtctccatccctgggtcagccctttcctgccatgaattcaggaaggcagaggcagctcagcagatggggactagaggccgcactgctatccacagcctctcttctcacccccaggcatgtcgggccccaggcctgtggtgctgagcgggccttcgggagctgggaagagcaccctgctgaagaggctgctccaggagcacagcggcatctttggcttcagcgtgtcccgtgagtccagggctctcgtggaggggtgcgtagacctcaaggctgctgagtagtcctagcaccgtgagcaggccaggagcccaaacccaacaggcacacccaccctgcagactgtccgaactcttgcacactcccccccacacagaacctgaggttatcacactcctgctgtcctgcgtgcctgtgtctcccttccctgggtctgttgagtactgataactgggccacagtgtttctttctgggagaaccctcgccttgtaggctcctgcgccttcccagtggtgtgcttcactggctgcctgcatcctggggctcaagtgctgtcgggactgcaagggaaacgctgggtggggcattgggctccgagcagcccccgatgggtgacaggtctctctgctagataccacgaggaacccgaggcccggcggggagaacggcaaaggtgagtggggtggggccctatggctggagcacccccagtgtgggcagggctgctgggccctgcagctgtgttggctgtgctgcccgtctcctgcccccatcaatccctaatctgtgagatgggtccttgcctccaagggccggtgaactcaatcagggtgtcagcgccacagcgtggtgtcgccttccttgggtacagtgtgagaggccggccaaggcctggggctgtcttcctcccaccttggaggcggccacagtgctgctgtccccagccctgtcctggactcggcacttatcagcacttttgagctgtcttctggggtcctggtaaaaagggctactctgcctgcctgattcaagacaagggacccccttcccaacagcacccccgccccttgccgtgcaacccagtggtctccagtcaccccaccacatcgtcccctctgtaacctgacggtctccagttcccccaccaccttcccccagaacctgttggtctccagtccccatcccatcaccaccaactcccaactccccactggaacccagcagtctcgtatctccatcagtgaggacggtgtgagaaatggtgtctggctcaggcacttggcagcacttgaggggtcctcagatgtctcctgcccagcaaggatctgactaaagcagtcgtgggtgtgggaggggcctgcaggcatgcctgggttgggggcagctggccctgggcaccctggtgcaggtccagtctgccctctggatggcccctcctcttccccagattactactttgtaaccagggaggtgatgcagcgtgacatagcagccggcgacttcatcgagcatgccgagttctcggggaacctgtatggcacgaggtgggccatgcgtgggtgtgggtgggctcccagggttgctgttggcaacagggatccaggtagtgcctgctgcctgcccgccatccacaccacccaccccatggttatgaatgtggccaggttgtggcccagggccaggctcccacgtctgtggcccacagtggctcttttcatgaggctgctgggcccggtcctgccaccgtgcattgtcctggcagggtgaagggtgcacaggacacctcatgctcactacaggcaccttggggagtgggtggcctctgttccctgtaggcggggcagggcgtgggggtagcaggtttgagatgctgtcgggtgctgggtccaggccaggcctaggctcagctgtgggaggagaacgctgggcccgggagggcctgggtgtccctgaagctcctgtaggcctcagagagccctggcacccctgctgacctggcacctctccccagaccccccatcgcccagggtcccatgagatgtccccaaccttctagccccggcggtgtcatgtgcatcctcttacagctgttgcctcttctctgggtctgactgcagcccacaagaagagggcatttaatgttctgctgtgtgtgtagaggatagtgtagcccctaaccagagtcctgatgggtgctggtgtccagacccaaggtctgtggcaccagggaccctgtgggtccccagacctcctgacacctggagtccctgtgagggtcctcagacctctcaactacctcccaacacctagagtccccgtgagggtccccagaacccacccccagtcaccaagggtctcattgagggtcctcagatttccctctgttacccagagtctccgtgagggcccccagaccccccatcgcccagggtgtgcggaacatcaaggccaccgatctgcggcccatctacatctctgtgcagccgccttcactgcacgtgctggagcagcggctgcggcagcgcaacactgaaaccgaggagagcctggtgaagcggctggctgctgcccaggccgacatggagagcagtgagtgtgccgtgggatcaccagggaatgccaggaggggagtcagggttctgaggtctgtggcaccagggaccctgtgggtccccagagagagcaggagtggtgcctgaggactgaggcccagggggcggcccttccctaccctgcacaggcccggctgggctggaaagctgtcccacagccgcagtgaggacagccgcaggccagtgggctgctctgggggtcgtgtgggacctggggtggggctgcatgggctcactgtgccctgaccccaggccccacccacaggcaaggagcccggcctgtttgatgtggtcatcattaacgacagcctggaccaggcctacgcagagctgaaggaggcgctctccgaggtgggcccatccttgtgcctacctgggcaaggcccaaggggaggcctgggggccaggcctttgttgtccatgaggccactgaggttagatgggacagtcctacccaagcactggcatgagacaccgaggtccacggtggagggagagcaggaagcccagcccttcctggataccagccctcccaactccctttcttcctcactggcaggaaatcaagaaagctcaaaggaccggcgcctgaggcttgctgtctgttctcggcaccccgggcccatacaggaccagggcagcagcattgagccacccccttggcaggcgatacggcagctctgtgcccttggccagcatgtggagtggaggagatgctgcccctgtggttggaacatcctggggtgacccccgacccagcctcgctgggctgtcccctgtccctatctctcactctggacccagggctgacatcctaataaaataactgttggattag

SEQ ID NO: 298 - DNA, 3467 bp, Homo sapiens
aagcgcccgcgagccgccggccgggagggatccgggtcctgaagagaaatatgaaacgcaatgggagcagaaattgtttgaataggagaagtaggtttggttctcgagaaagagactggctaagagaagatgtaaagagaggctgtgtttacctttatggagcagacactaccactgccactacaaccaccaccacctcctcttcctcttcctcctcctcctcttcctctgacttacatctcgtcctttgcactgtagagacaccagcatcagaaatatgtgctggagagggaagagaaagtctttatttacagcttcatggagacctggtcaggagactggaacctactgaacgacctcttcagatcgtttatgattacttatccaggctgggatttgatgatcctgtgcgcatacaggaggaggctacaaatcctgacctcggctgtatgattcgattttatggtgaaaaaccatgccacatggatcgtttggatcgaatcctattgtctggcatctataatgtacgcaagggaaagacccagctgcataagtgggctgagcgcctagttgtcctctgtggtacctgccttatcgtttcctcagtgaaggattgtcaaactggaaagatgcacattttgcctctggttggtggaaagatagaagaagtgaagcgacggcaatactcccttgctttcagctcagcaggagcccaagctcagacctatcatgtcagcttcgagactttggccgagtaccagcgatggcaacggcaagcatccaaggtggtgtcccagcgaatcagtaccgtggatctctcgtgttacagcctcgaggaggttcctgagcatctcttctatagtcaagatattacctacctcaacttgcgacacaacttcatgcagttagaaagacccggaggcctcgatacactctacaaattttctcaactgaagggcctgaacttgtcccataataaacttgggttgtttcctatattgttatgcgagatctctaccctgactgagctcaacctttcctgtaatggatttcatgacctaccaagtcaaattggcaatctgctaaatcttcaaaccctctgtcttgatggcaactttctgactactttacctgaagaattgggaaatctacaacagctttcctccttgggaatttccttcaacaactttagtcaaattcctgaggtttatgagaaactcactatgttagatagagtggttatggcaggaaattgcctggaagtcctgaacttaggggtgctgaataggatgaaccatatcaagcatgtggatttaaggtaaggttattctttaccacaccttcctttaaattgactctggtggacctttatgtcttctgtttatgaagatttgtttaaaacattagggtttttaaaattttgttgttgttttgagacaaggtctcactttgtcacccaagctggcatacagtggcgcgatctcggcccactgcagtcttgacctcccgttctcaggcgattctcccacctcagcctcccgagtagttgggacttcaggtgcgcaccacgaggcctggctaatttttttctacttttggtggagatgaggtttcaccatgttgtgcaggcaggtctcgaactcctggactcgagcagtccacccacctcggcctcccaaagtgctgggattacagccaccgcacctggcccataactttaggttttttgaatagtgtagaaatatatgttttcaaaggtatagtaagactttatttatcactcagtagcagagagattaaggatcaggtagttgtaccatgtgatagagactatcaaattgcctttgacaaagattgttctcacttaccctcccatcagtgtatattttttattttaaaaattttttatagaggtggggtcttgctgtgttgcccaggctggtcttgaactccctggctcaagtaatcctcctgccttggcctcctaaagtgttgggattgcaggtgtgagccagtgtgcccgacccctccaccattttatgagaattcccattttctcatatctttgtcagtattggattttagcatttctttttatttatcatcagtctagtaggttgaaaaaagtatttcattgttttaatcaacgtttatttacatagcagtgaggttgaacatctttttatatgtatattagtagtttgtagatttccataaatgaccatttttctgttgagtcattgggtttcttcttgatacccattgtattacaattaaaatgttaagggtttcattactaagaactttttatgagagttttattttctagtcataatattttcctaaaggaagctggtaaaaagacacctactggatgttctgttatttacagtaagccattgatgtagcttgtaaagacagtaagagagttttttttttttttaaaccacactggagacttaagagagagattcatagaaatacaggaaagtgagaatagacctgcataaattaaatcatacacctgtgtagaaaaaaacccagaggtcattttctataatttgcctttgaactcttccatatatatatatatatatatgtgcagattatttccttgtctgttaattaattttatgtttgaaccttagctctagagatagagcaggcatagcaacaggaagaagtatggctccatccttatactctggacatggtactgttgtgactgctttgctactcactgactcaaaaggttgtgtttatcttcctgttcctttgtcctacttagtgcccacctgacattattaggtatttggatataagtgtttaactgttcgtagatatggcctcttttttccttctctttattaatttgtatacgtatttgccaatttggattgtctaacttagctgtaccttgagttattcatcaactgtaattatttatatagtaccttgcaaaatgaggcgagtagtgaaattcttaagttgtttaggaaacagagaaagggggccgggcacggtggctcatgcctgtaatcccagcactttgggaggccgaggcaggcagatcatctgaggttaggagttcaagcctggccaacatggtgaaaccccagctctactgaaggtacaaaaaattggcctggcatggtgggggtgattctagtcccggcaacttgggaggctgaagcaggagaatcgctttaacctgggaggcagaggttgcagtgggccgagatcacgccattgcactccagcctgcgcaacacagtgaaactccatctcaaaaaaaaaaagtaaacagagaaagggatcatacctgtcctattttttatttttattctggtaagcacatttaatagactcttatttatgattattttcttgtttctgcgtattaaggatgaaccatttgaaaaccatggttattgaaaatctggagggaaataaacacatcacccacg

SEQ ID NO: 299 - DNA, 3184 bp, Homo sapiens
atcctattctctctttactttgttgatagtgtcttttgaagcacagacttaattttgatgaagtcttatccatcatgccattggtggatcatgtttttggtgtcatgtctaggaaccttaaccccaggtcatgaggaatttttcttttttctttttttgactcacattctcactctgtcacccaggctggggtgcagtggcacaatctccactcactgcaacctctgcctgctgggttcaagtgattcttgtgcttcagtctcccaagtagctgggactacaggtgtgcaccaccactcccagcccattttttttttattttttatttttagtagagttgggatttcaccatataggctaggctggtcttgaactgacctcaacggatctgcccgcctcagcctctgaagtgctgggattacaggcatgagccaccgtgcccggcctatggatttttttcttctaaaaattttataaatttagttctacatttagatccgtgatccattttaggttaatttttgtataagctgtgaaatttaggtaggtttatttttttgcatatggatgttcagttgttttaaaatcgtctgttgaaaaactctccattccccattgagttgtcttttcacctttgtcagaaatcaattgctatttatgtgagtctggttttggactttattccatcgatctatgtgtttatcctttcataaataccagattgccttgattatcacagctttatagtaagtgttaaaactgggcagcatgattccttcaaaatttttttgaaatctttttcaaaattgttttggctaatttagtttctttgccttccatatgaattttagaattagctactctgtatctacaaaaaatcctactggggttttgaatgcaattttgtgtcttccaatccatgaacatgaggtatctatttaggacctctttcatttcagttatcagcattttatgtcatttttcagcatatattccacagtgttcattttggaggaactattgttaagttgtattatttttgaaacatgggtttccaattgcacatcgctagtatgtacaaatgtgtttgatttttgtttgttgaccttgtatcctgtgaccttgctaaacttcattagttttgggagttattttgttgttaactcattaagttttctacataaactacgaatagaaacagttttattttattctttttagtctatgatttttcttgcctgattttgttgttaactcattaagttttctacataaactacgaataggaacagttttattttattctttttagtctatgatttttcttgcctgattgcagtggccagaacaataacatggagaaagtggccatctcagtcttgttctggatcttaggattttgaaagcattgtttttgaccattatgtatgcaagctgtaggcttttcttaaattccctttgtcatgttgagcaagttcccatctattaatttgttgttagcagagtttcatgagtggatgctgaattttctatgctctttctgtatcagtttggtcattctttttgtttagactgttaaaatcatggattttactgattccagaattttgaaacagcttatatttcctcccaaccccaaacttggtcatggtacattattcagcttatgtatctagatttttattttttgaggatttttatgtctgtgttcattttggatattgtgcaattgtttttgtttgttttttccttgtgttatctttatcttggtatggtatcatgttaattctggtcttgtaaaatgaattgcaaagtgattattctttctggaagagatttgtagaatttgttatatctttaaatgttttatgaatttgctagtaaggttttaaacaatggttcaatttttaaaaatagagaatttattgaggtttatttaagtttgggtactgtatgcctttcaaggaattggttcatctaatcctatgtgcatagagttgttcatggtattttctttgtgtcgttctaatgaggatctatactgttatcttttctttgattcctaagattggaatcaaagattggaattccttctctttttttgtcaattttgccagaggtttatcaattttactgctcttttcaaaaattagttttttgattgttttctattaatttgtttacaattgcatttattttctgcctctttttttttttttcttctttctgcttgctttaggtttagtttgggcttcttttttttgtagacaggtctcacttcatcacccagactggagtagtgttatgatcatgcttcactgcagcctcaaactcctgggctcagacagtcttcccacctcaggctcctcagtacctgggactacagatgtatatcactatgcctagctaatttttgattttttgtagagatagggtctccctatgttgagtaggctggtcttgaactcttggcctcaagcaatcctcccaccttggcttcccaaagcattggaattacaggaatgaatgagtctctgtacctggtctcttcatgtatttttaagatctgataataagtgcttacacttttagcactgtcttggtgaattttatcattatataatgtccctaattatccttggcaattttggttgttcctaactctactttgatgaatataaaaatggctttttaatttattttttgagacaagagcctcactctgttgcccaggttggagagcagtggtgtgatcttgtctcactgcctcacaggttcaagcaattctcctgcctcagtctctggagtaactggtactacaggcatgcgccaccacacccagctgatttttgtatttttagtagagatggggtttcaccatgttggccatgctggtctcgaactcctggcctcaagtgatccgtccaccttggcctcccaaagtgctgggattacaggtgtgagccactgcgctcggccttaaaaattggcttatcttttaattcatcttgactcatgtttactgttttttggtttctgaaaaatagatttaataaataataacattttatcaaagttattagtatagagaaataaattgagtgttgttattattctatgatcatgatgacagcacagaagttaatgtggccagcatatagttttgattaaaaattatacaagc

SEQ ID NO: 300 - DNA, 3076 bp, Homo sapiens
gcgcgcgccccccgcctgcctgcaggtgctgcgcgatgcctggcggcgccgggccctgcggccgccgcgcggcttccgcatcagggcggtgggtgatgtctttccagtgcaaatgaatccaataactcaatctcagttcgtacctttgggtgaagttctttgctgtgctatatctgatatgaatacagctcagattgtagtaacgcaggaatcacttttggagcgtttgatgaaacattacccaggcattgcaattccatcggaagatattctttataccactctgggaacgctgattaaagaaaggaagatttatcacactggagaaggatacttcatagttactcctcagacttacttcattacaaatacaaccacccaggaaaataagagaatgctgccatcagatgaaagtcgcctgatgccagcttccatgacatatctggtgagcatggagagctgtgcagagtcagcccaagagaatgctgcccccatatcccactgtcagtcttgccagtgtttccgggacatgcacactcaggatgttcaggaagcaccagttgctgcagaagtgactaggaagagtcacagaggtcttggggaatccgtatcttgggtacagaatggggcagtttcagtgtctgcggagcaccacatttgtgagagcaccaaacctttaccatacacaagagataaagaaaaaggcaagaagtttggttttagtctcttatggcgcagcttatctagaaaggagaagcccaaaacagaacacagcagtttctctgctcagttcccacctgaagaatggcccgtccgagatgaagatgacttggacaatatccctcgagatgttgaacatgagataatcaaacgaattaaccccattttgactgttgacaatttaatcaaacacactgtcctaatgcaaaaatacgaagaacagaaaaaatataatagccagggcacttccactgacatgctgacaatcgggcataagtatccttcaaaagagggggttaagaaaaggcagggtctgtctgcaaaacctcaagggcagggccattctcgaagggatagacacaaagccaggaatcagggaagtgagtttcagccaggaagcattagactggagaaacaccccaagctccctgctacacagcccatccccagaattaaaagcccaaatgaaatggtaggtcagaaaccacttggtgagattacaacagtgctaggttcccatttgatttacaaaaagcgaatcagtaatcctttccagggtttgtctcaccgaggaagcacaatatccaaagggcacaaaattcagaagacgagtgatctgaaacccagccagactggaccaaaggaaaagcctttccaaaagcctaggtccttggattcctcaagaatctttgatggtaaagccaaagagccatatgctgaacaacctaatgataaaatggaagcagaatccatttacataaatgaccctactgtcaaacccatcaatgatgacttcagaggtcacctcttcagtcaccctcaacagagcatgttgcaaaatgatggtaaatgctgtccctttatggaaagcatgttgagatatgacgtgtatggtggagaaaatgaggtaattcctgaagtcttgaggaaaagtcattcccactttgacaaattaggggagaccaaacagactccgcatagtctgccatcacgaggtgcctccttttcagaccgaacaccctctgcttgtagattagtggataacacaatacaccagtttcaaaatcttggccttttggattacccagttggcgtgaaccctttaagacaagctgcaagacaagacaaagactcagaagaattattgagaaaaggatttgtccaggatgcagagactacaagcctagaaaatgaacagctttctaatgatgaccaggccttgtatcagaatgaagtggaagatgatgatggtgcctgtagttcattatatctagaggaggatgacatttctgagaatgacgacttacgtcaaatgctgcctggccacagtcagtattccttcacaggtggaagccagggaaatcatttaggaaaacaaaaagtgattgagagatctctgaccgagtacaacagcacaatggagagggttgagtctcaggtgcttaaaagaaatgaatgctacaaacccactgggctgcatgctaccccaggtgaaagccaagaacctaacctctctgctgaaagttgtggcctaaattcaggggcccagtttggttttaactacgaagaagaacccagtgttgctaaatgtgtacaggcctcagcacctgctgatgaaagaatctttgattactatagcgcaagaaaagccagttttgaagctgaagtcatacaagacactattggtgacacaggaaagaagccagctagctggagtcagagtcctcagaatcaggaaatgagaaaacatttcccacaaaagttccaacttttcaacacttcacatatgccagtgttggctcaggatgtccaatatgaacacagtcacttggaagggacagaaaatcacagcatggcaggagatagtggaatagattctccacggacacagagtctgggatctaataattcagtcattttggatggactaaaaagaagacagaattttctgcaaaatgtcgaaggcacaaagagcagtcaaccactcacatctaattccttactaccgctaactccagtcataaacgtttaattttcttttggaaacctacttttttctttataaaaaggtagagcattattacagaatctttcaatcatgtaagaattgagtatataagaattgtctaaaggcaagcatatctatactattaaccacattacacattttgttctaattactggcttttttttcctcttttggtgtcttaaggctttttgaagcctattttactgtgagtttattgggagtatatagattattttcgattaaaaagtggaattattggtccccttccaattgtaattatcttgaatttttatacattagtttctcaaatatatagaatgccaattt

SEQ ID NO: 301 - DNA, 4225 bp, Homo sapiens
aaacgagcaggtcgatgcctgaggatttaatggagaaatcccaaagtgagccggggcgcgcggtggaggaggggcgcgccgcagccggggccgctgggccctgatgggcgggagcggggtggagcggcctcgcctgccaggcagccctgggcgcggggctcggcggccacactctggagacagccacggtccaggcaggtgggggagggcgctgctcccgtcctgatgtgccaggagccgccagcagccatccaggtgactaagccggcccactagcactgagtcaccgcccgcctcgagctgttcttgcttctcctttgcatctgattattttgggagctggaaacttggagctgcacctgagtcccgccccttctagctctcccctccctaccttgggctccaggaagatgggacttgctgtgagtctgctgccaccccctaaagatatggaagacgctgtgggggccagaagtgcccggggggctgtggcagcaggcagagtgcaatagcagatatggtggtcaggctgcccgtgtgtgtcctctggaggtgttgggacagaagggcagtcttgtccgagctgactggagtcctcccgggctggctctgaactcatctcccacggggatgtttcggtaaaggagtggcttctggggtcggagtggcatttggagagcgaggctggattggcttaggctggcctgggcagggagtgccgcttcctgggctagagacaagcaccagcctgcagtggagaacgcaggaccccgctgcccagaaggagcagccacggcctgcggaggactggcccagcaaggtcccaggtcttccctctcctcagcgcctaagagagaggcccagtgcgggtgaggagtcgcgaggaagaggcggaaggcgccggaaggcaccatgttccgcaagaaaaagaagaaacgccctgagatctcagcgccacagaacttccagcaccgtgtccacacctccttcgaccccaaagaaggcaagtttgtgggcctccccccacaatggcagaacatcctggacacactgcggcgccccaagcccgtggtggacccttcgcgaatcgcacgggtgcagctccagcccatgaagacagtggtgcggggcagcgcgatgcctgtggatggctacatctcggggctgctcaacgacatccagaagttgtcagtcatcagctccaacaccctgcgtggccgcagccccaccagccggcggcgggcacagtccctggggctgctgggggatgagcactgggccaccgacccagacatgtacctccagagcccccagtctgagcgcactgacccccacggcctctacctcagctgcaacgggggcacaccagcaggccacaagcagatgccgtggcccgagccacagagcccacgggtcctgcccaatgggctggctgcaaaggcacagtccctgggccccgccgagtttcagggtgcctcgcagcgctgtctgcagctgggtgcctgcctgcagagctccccaccaggagcctcgccccccacgggcaccaataggcatggaatgaaggctgccaagcatggctctgaggaggcccggccacagtcctgcctggtgggctcagccacaggcaggccaggtggggaaggcagccctagccctaagacccgggagagcagcctgaagcgcaggctattccgaagcatgttcctgtccactgctgccacagcccctccaagcagcagcaagccaggccctccaccacagagcaagcccaactcctctttccgaccgccgcagaaagacaaccccccaagcctggtggccaaggcccagtccttgccctcggaccagccggtggggaccttcagccctctgaccacttcggataccagcagcccccagaagtccctccgcacagccccggccacaggccagcttccaggccggtcttccccagcgggatccccccgcacctggcacgcccagatcagcaccagcaacctgtacctgccccaggaccccacggttgccaagggtgccctggctggtgagggcacaggtgttgtgacacatgagcagttcaaggctgcgctcaggatggtggtggaccagggtgacccccggctgctgctggacagctacgtgaagattggcgagggctccaccggcatcgtctgcttggcccgggagaagcactcgggccgccaggtggccgtcaagatgatggacctcaggaagcagcagcgcagggagctgctcttcaacgaggtggtgatcatgcgggactaccagcacttcaacgtggtggagatgtacaagagctacctggtgggcgaggagctgtgggtgctcatggagttcctgcagggaggagccctcacagacatcgtctcccaagtcaggctgaatgaggagcagattgccactgtgtgtgaggctgtgctgcaggccctggcctacctgcatgctcagggtgtcatccaccgggacatcaagagtgactccatcctgctgaccctcgatggcagggtgaagctctcggacttcggattctgtgctcagatcagcaaagacgtccctaagaggaagtccctggtgggaaccccctactggatggctcctgaagtgatctccaggtctttgtatgccactgaggtctccccagtgctgcgagacttcctggagcggatgctggtgcgggacccccaagagagagccacagcccaggagctcctagaccaccccttcctgctgcagacagggctacctgagtgcctggtgcccctgatccagctctaccgaaagcagacctccacctgctgagcccaccccaagtatgcctgccacctacgcccacaggcagggcacactgggcagccagcctgccggcaggacttgcctgcctcctcctctcagtattctctccaaagattgaaatgtgaagccccagccccaccctctgcccttcagcctactgggccaggccggacctgccccctcagtgtctctccctcccgagtccccagatggagacccctttctacaggatgaccccttgatatttgcacagggatatttctaagaaacgcagaggccagcgttcctggcctctgcagccaacacagtagaaaaggctgctgtggttttttaaaggcagttgtccactagtgtcctaggccactgcagagggcagactgctggtctccacagatacctgctgttctcagctccagcttcaaacctcgagtctcgagagggccacggggtggtttttatgaccggaatcccgcttcctccctcacgtctgatgtcctgaaggtgcagtcccacctgtacagcccctccccgcccagaactgtgaatggcctgctccaggccatggctgggggcagggagtgaggggacaatttctgagtgaaagagaaagaatggggtcggtggtgaaggtgctctcactttacagaatggagagaacatcgtgtgtgtgtgtgtgtgtgtgtgtgtgtgtgtgtgtgtgtgtgtgtgtgtaaggggaggaaagccaccttgacagcccaggtccctccaggtcacccacagccagtttcaggaaggctgcccctctctcccactaagttctggcctgaagggacctgctttcttggcctggcttccacctctccactcctgtgtctacctggccagtggagtggtccatgctaagtctaacactcctgggagctcaggaggcttctgagcttctcctgtactgtgcatcgtgagggccagagacaggaatgtaaggattggcaactgtgttacctttcaagtttatctcaataaccaggtcatcagggacccattgttctcttcagaaccctatctgggagagaaggcgaaccacctccgggtttccatcatgtcaaggtcacaggcatccatgtgtgcaaaccatctgccccagctgcctccacagactgctgtctccttgtcctcctcggccctgccccacttcagggctgctgtgagatggaattccaggaaagaacttcaggtgtctggaccctttctatctagataatatttttagattcttctgctccctagtgacctacctgggggcaaagaaattgcaaggacttttttttaagggtcagagttttcaaaacaaaagcatcttccctagaaatttttgtgaattgtttgcacttgtgcctgttttaaattaaattgagtgttcaaagcc

SEQ ID NO: 302 - DNA, 3877 bp, Homo sapiens
agctgtaaccaggaggcagggaagaaggcaatgcagtcctcattctttagagactcaacctgtgtccccagccctccccacctcctcccacacccccctccaaactcagcttggctgggaaaggaaactccccagtctgctgtgctcctgcaagctgagtgtttgcagggcagctgttggtgtacgtgttttgtttctgatgctgagacccttcctgaaccggatctccatcccttcactgagcagggttcacacatatttatgttggagtgcaaaggcttccgatgcccggacacgtgtcctccaatctgagaagggaaccagggaaggggctggagttgatgcatcttgacttaagggctgaagagttggcaattttggaggccagtgaagagccacgtagaaaatgtcccgctgcctgccatcatcagcagctcctcttgctcccatcctgcagagagggctcccacacagagagcagacacagggacctctttaaaatgaagatgaaatgcacctggttctaccacctagttagaagcagttatgaaggttgaagagctgttatctgagatttatagccccaaatctatgagatagactctcctaattaataagacaaggatgactagaaagttgtgaaaactacctggcagggcttggagcctgctgtcaccaccacgatgatagcactgtctttgctgctgagcctattagaatgtcaggatgtgcattcttctctcctagtgggatggcacggttcacctggctattacagagaagcaagtgcagatcgtgacttaaggctccgggaggagagttaatcagggaagagctggttgacaagactcactcagtgcatgacttgagagcaccaagagggggaaagggagaagaaagaacctcttccaaaggcagcatccacccccttgacaaagggccatttcccccagcccggggtgctttctgacttcctttgttccccgatgagcattttcttccttgtccccagccttcacataagttcaattcaacatcctctctctcttctcccaatgtcctctccttaattttgctgcatcctccagtgtgaatgtttgcctcctggtctgggatctgtcttattccctttatctcacctgaaaaaactctcccctttaatctctgctcattcaagtcctgcccatccttcaaagtatggccaagctcacctcttccagaaagccccaccctgtggtgttatctccatcctgaatcacagcagcacttactgtgagataactatcaggttacatctatcagagttcaatgcactctccccaaatgaagtggacacttgttggcagtaagaagagaagctttttgcaccaagtggtgcattcaatgcaatgcaaggagactgtgacgatactgaaatgagtattacccggccccaggagatgaacaccgtccttgcttgatgccagttcataaagagagctcttgtttattgagagcttatgagtgctgaggaattcacataaatcatctcatctaaattttccaacaatcatgagatggtttctcttatttcctccttttacgcatgaagaaactggggctcaggaggttagatgactttctcagagtcacacagatagtacagggctgacccagaattcaagcccaggtctggcagattccagcacccgccctttgcctccacgaccaagtacaagcagcaggctggcactggcctttccctgctatgactgccgagctgggttacacctgctgctggtccccagcaccaggcacacgacgtaactgtgagtcctccgagtatgtgagggagctggcactcaccttctgcctgaagcaaaggagctgtgctcttccgtttcagtgtgaaaaagcttcagaagatgcccagcttagaaggacacaagagacagtctgtggacaacatctccacttcctggcgtcctcagcactgttgctagtgaagctactctgcccaaggtctccagagagcttctgaaagaagtcaggactcatgcatgcagatgaatacgcctcgtgggtattcaccaggtcctcttgggaagccagctctgtgtcccaggcacaccgtctgtgtgcaagagaaggggagcacctgagtttgggaactgctttcgtaccagcttataggccaccccaagaaccggcctcctggcttcctagtcacagaccgcctgcagggttgacttatgcatccttttgcaggagacaggctcacttctctcctgtgactaacatggaattacgggttaaggagggaagttgtactcacctgttgattcatttattcactcacttgctcactcatcaatcatttcttcaacaatgaaacccttactagacaaatactgactccctgctccagaataactatctgttcggtgctaggactgtcaaatgagtaagcgtttcttcccacaggcgttcagggtctatttctgcactttacagacaggcaagacagaagtgatcagaagcggccaccaaccatggagttcagaaacacggcacagttctggaagaggcgaaaggcggctcttccatccatgctggtcaagaggaaattcaacacacctcacagccattgaatctgaccaggcgtgtaatacatcccatcgtcttgtcagttagcagctgtgggaccttgaaggcttcttaaattccccaagtctagactttcttatctttaaaatgcagctgaaaacaatgcctgtctcatggaggtgtaagggttaaatggaatcatgtagcaagcattcagcacatgtcaagtccaggtcaaggccaacatgcaggggcagggagaggtgtaacctctttcagtttggagccatgcaggacactgccatttgcagccctttggggtaagactgtagcccccaaacatcctgctgccccagagcagtggcccagcaggtgcactgagagctctggtgcacctggcatgccccgactcctcacacagcagcaacagggacagtgacagggacctgagatggggtggcccacctggctggcagctggcactgggcacattgcccagaagttggggagttctcaggtaggggcagaggtgggtgtttgagggagcagttagcagcactgtctgctgtggcaggggtctcctgggtaaggtcagagggattcgaggaggcccagggatcaccccagggtggggtgggacgctgctcaagtcacaaagcaaagttgcagggtgtaggggaggggatgggactgttagtctaattgtgactcatctctccttatttttctccttatctcttgtatttattttttccaatcctcccaagttactgggccttgaggacactcctagtgtgtgtgtgtgtgtgtgtgtgtgtatgtgtgtgtgtgtgtgtatttctatatatataatttttcttttttttgagacagagtttcgctcttgttgctcaggtggaagtgcaatggtgcgatctcaactcactgcggcctgcatctcctgggatcgcttgagcccaggaggtcgaggctgcagtgagccatgatcatatttgccagcctgggtgacagagcaagaccatctcaaagaacgtatttaccgaatgaagttttatgatgttctctagcactttttagtttattgtctttaaaaagaaaccctctgaagtgtctctggagaatacaaacgcatgcgcgcatgcacacgctgggaacaggagctgcttcagtaggtaactgagtgggagggaggttagcttttcactgtgacccttatctgtacacctgctaactcaaaataatttaataacaacaacaatgacaataaaaagggagtgagtgctctcatttt

SEQ ID NO: 303 - DNA, 3557 bp, Homo sapiens
agtgcccactgcgctctgcctgccggtggtgtctggatttctataggaatcccaggagggtcttactggagggttgagagccacctgattgaaggcgtttgcagtcagagtaaagacggctgccgcagcatgaacccctgagctgatgagtcttattatagcccggctggcggaagacagagtgctgctattcacctctgcgtgggcgtcggtggtgcagggggaagcagcaggccatccagcggctcacaccctacgcggctgcagctgccaagggcctggcccctgcctccctcgggccatggtgagctgtggcggggctagaggaaccgggacccaggactgataggcggcgcacccaggggctcctctctccccagagcgacagggcccggagagccgtgggcctcaccatgctggcgccgggcagcagccctgggcagaggggcaggctcgccctgcagtggaggcaagtctcctggatcacctgctggatcgccctgtatgctgtggaggccctccccacctgccctttctcctgcaagtgtgacagccgcagcctggaggtggactgcagtggccttggcctcaccacggtgcccccagacgtgcccgcagccacccgaaccctcttgctcttgaacaataagctgagtgccctgccaagctgggctttcgccaacctctccagcctgcagcggttggacctgtccaacaacttcctggaccggctgccccgctccattttcggggacctgacgaatctgactgagcttcagctgcgcaataacagcatcaggaccctggacagggacctgctgcggcactcgccgctgctccgccacctggacctgtccatcaacggcctggcccagttgccccctggtcttttcgacgggctcctggctctgcgctccctctcgcttcgctccaaccgtctgcagaatctggaccggctgacatttgaacccctagcaaacctgcagctgctgcaggtcggggataacccctgggagtgtgactgtaacctgcgtgagttcaaacactggatggagtggttctcctaccgagggggacgcttggaccagcttgcctgcaccctgcccaaggagctgagggggaaggacatgcggatggtccccatggagatgttcaactactgctcccagctggaggacgagaatagctcagctgggctggatattcctgggccaccctgcaccaaggccagtccagagcctgctaagcccaagcccggggctgagccggagccggagcccagcacagcctgcccacagaagcagaggcaccggccggcgagcgtgaggcgagccatgggcacggtgatcattgcaggggtcgtgtgcggcgtcgtctgcatcatgatggtggtggccgctgcctatggctgcatctacgcctccctcatggccaagtaccaccgggagctcaaaaagcgccagcccctgatgggggaccccgagggcgagcacgaggaccagaagcagatctcttctgtggcctgagcgcccatccccacccggccaggtaggaagggcggggagagcacacggcattgctcagccacagctcccaccttgacccggcgctggccactgcctccccgagtccaccctcctccccgccctccagcagacaagccacaccgggttctctccctgcactttcgaggctccctgaaagccaccgtgctgggggctcctgctgatgctcctgtctgggccagtaaatctttggaacatgtgggggatctccctaagctctggccacagcaaagcaaggaggtgtgtgcaagaggaggcttccggactgggcattcccctgtcgcccttcctgccctggggtggccatagctggtgactcttcctaccttgctggtcccacctcacctgcattgaggggacggggagggagggatctgagggatgaaggtagatttctgagactctctcctaagccagaaagacgttcttaacacccctgcagtgtgaaagctggtccagctctacaactgttggtaccaatgtgcaaacacaccagccctgccatctggacccagcactcagaaacaccatacacccctggccgacgccatcatgcccctggatctgctataggccacactgaccacatgctcctggattcgctaattcactcacacacccattgcatcaccagtgcggtcacatggattgaaagaattaatacacacacacacacacacacactcacacggtcacacggagaccgaggctatgagcgctcgaacagcagagacatgctcttccccaggggtctccctgagaccacagagcctctcgcgtgctcactgcaatcttctcaagtcaacagcaggaaggaactcaaccagtaacaccaggatcctttgagatcctctaaagtgggccaaagtggtgcccctggaggagccctcctgtcaccatggtaaccctctcacacctctcctgctgggctttcccgggataccacccaggggcctggagcggctgcatgtgtgcatggcggcctcctgaggacccagccacacaccactggtgttgcctcggtcctgcccacgcatctcacagcaccaggccctgtggggcccccactgattcctccacagcctgcagcctggcaccgtgactctgtgcctctcgccctccatcttcagtactcctggcctgtgacttcagggctgggacttggtggtgctttgccattggtggcaccctctggggaaagcaggtggcaggcagagaacacggtggctcccctgaggctcattgcctgccagcttattgcagacagagcccaggagcaggagcgggtggccacgtgctgcccagaggctcccaggatggggcctctgttcccgggctttgtctgctcagtgtggctccctagagcacccagccggggccaaaccagagagtgggtggggagcctgtctgggacagagccacctgctgccaaggcagtgcaagttttccaggttacctgtccccctccctagctctgcccctcctcagagtgtgaagatggtgggtacctaggtgtcatgctcacaggctcaggaggcatcaggctcgtccctggctctgggatggaatctcaatgggggctcaggaagaggccagcaagaaccctgaagccaagggtctgagcagagggagttggcaggcctagctcctgtgccccactccgaccctccctgctcatgcggcagtgggtgggtgaggtgggctgggggcctggaggagtgcctttgaggaggtcagtcctggcaggtggacagaggacgcctggcatgggctgcttactgggaccccaggcggccctggccatggccacagtcttccttcttttggcgtgtgggctggtaccagatctggggattttctaaagggactggggggaggggagggcattgtcaatggtggtatctttagcctgagacagaagatttttaaaggcaaaattatatttctggtttgttgtttcagaagaccaataaagactgtattttcctatgt

SEQ ID NO: 304 - DNA, 4024 bp, Homo sapiens
ttggaagtggggcctttgggaggtgattgggtcataggggtgcagccctcatggatggatgaatgcccttctaagcccaggccagagggctagcttgctgtttctcctccaggtgaggatacaactggaagccagcagtctacaggctggaagaaggccctcaccagaacccaacccttggacttcagcctccagaactgtgagaaatacatacctgctgtttgtcagacaccagtctatggaattctgttacagtagcctgaactcagacatagcccttttccatttataaggtggttttaccttatattttatgtaaaaggtccattttatttatttttgaattgttgattttttttaagagacgcgtgtttgctatgttgcccaggctggactccaactcctggacatattgatcctcctgtctccacctcccgagttgctggaactacaggctaacagctctgttttaaagatgagaaaatgggccccacgcagtggctcacacctgtggtcccagcacttagggaggctgagccaggtggagccacttgaggtcaggtgttcgagattagcctggccaacatggcaaaaccccgtctctactaaaaatacaaaaaaaattagccgggcatgatggcgcgtgcctgtaatcccagctacttgggagtctgaggcaggagaattgcttgagcccgggaggcagaggttgcagtgagccgagactatgccactgcactccagcctaggtgacagagagagactctacctcaaaaaataaaaataattaaaaaataaagatgagaaaatggaggctgaggaggggtaaaagcgctaacttgacatggagttgaggactagcactcatgtcacctcactccaaatgccaggcttttcccactacaccagcagcagttcctcctggggaaacaggctaggttagaaagcgagtgagggaagggacagggaggggaagccctctagtagggagatggaggatagggggtcatgttttgtggggagagacactgaaagggctgccacttggactgaatgacctcccacctccagcattaggactccttccaattcctagggggttcggaggcaacaatatttatttagggattgggagcgagagtgctattccaaccttctttggtatttgtaatttcttttccttattctttaataaaagtagagtccaagcaaagtccaaaccaacatataacctgtcctcctttactctagattcattcagcttttccagaccaggcatcaccgagcggagagaggggaaacaccctggcttctctttggcacatcagcccctagttcttgagagagaagggcagggtggtctactcaccatgtctgtatcctgccgttcttcatttgactcatcctggatttctaactcttcttcctcgtcctcttccataaggctgagtctgatgtaggggcaaagagactggcttttcaaactgttctttgaggacccctgagagtttctcggacacccggggtgggggaagtggggagcagtaagtacagcatagtagtttcccgattgtgctgacaggaagtgctctgtggctaaaacaagtccaaaaagcacccacagagaggcaatgggtgagacaggaatcccctcacagtgggcgacagatctgaagtgaagacaggagatgatgagaaaagctcaccgcatcagctggttgcccaggccaggacctgaagggttgtgtggagtctggaaatattgtggacccaagaaccttgacctctcggtgcctgcgacgggctgactgctgggaatgaagcaggatcaatgatgggataaaaatcaagggtaagaagaggatgtaaggcagctggtgttaatggggagaaaagctcagagagatgcattttaaagctaaacaatggagaagggtttgagaagaacccaacaatgtgggagtgctacagcagggaaccatgaaacagaaacagcaagatggaggcagccagacaccaaactgggaactcagacacccagattccctccatggcctcacccctgggcaaaatccaactctgagccatcttcttcctccatctctttcaacccccacaggggctgcctgctcttcacagctgtggaggtgagggtgggcgtgggcgggatgctgttcagctgcagactttcttcctgggacgaggagacgtcctctctgttaggcttggcaggccctgccaagcagatgcatacattaaccacagcccagggcctgcgacaggtgtgctctctttccaagacctgcccaggatttagtaagggaaagtcaatcaggaagagaatggaaaacttatacagcttcattctgttgccctcaaatgggcatagccctatgtactaaatacatagccctatgtaccaaaaagtaaggcttagagaattgtagctaggccttgtccaagaagaacttgctacacagcctagaaaacaagatggaaagatatataaatatacatttcacagataaactgtaacaggtgaacaggtgaacacaaacatgagggagggttggagtctctaagattgagaggtctgagttagccaatgaagacatctgagatcctatccaagatttctgtggtcagaaaaagctgtaaatggcaatagagttttggtaccagaggctagagtggacaaatgagggccagggaggaactggaaaatgggagacaggattttctaaaagctagaaaaaaatgaagtgattgcaatgccagtataactgatatgatatgaagggggacttatctcctgcagagattggagaaggtagaggaggagaaagaatccaaagattctcactgcctgagaaaacccaggcaatactattttaaagcatcagtcaaattgacattaacatctgttaactgtaaacagtcacactcccattaccccccttctccactaaaaacaataatcccaaagtgagcgctcagcctatgggtttaagcagagggctacagaaaacagggaagagacatacccctgggcttggattcccagagaggaaaccttggggccccagatgtgtcctcctgatctccctgagctattaatggtgtgatgcccgagggctgggcccttgagtctctcctcttctccatcttcactggcttccccagccactcacgttcatgtccttaaatatcacctatactctgccacatcccaaagggatctcaagccttcagctctcccctgaactccatcttaacagcccccatggtttgttcaacatctccacctgtaatcctgtggccaacaccaatgccccaaccttcccccacagctatcttcactctctgccttccccatctcagatactgtcaactccgtccttctgtcaggccaaaatccttggagccatcctcaactgctctttttgtcttacatcccacatccagtttgtcagaaaagcctattagagataccttgaaaatgcacccagaatctggccgtttcttggcacctccaccattgcccccggcctaaaaagctctcttatcttgcatcttgggctggactcctacaacagccacaacttccctgctggtctcccagcttctagccttcccccatctcctgtcgttttcgacacagcagcctgggcgacagagcgagattccgtctcaaaaaataaataaataaataaataaataaaataaaaaacaaataatgaaacaggccaggcatggtggctcacgcctataatcccagcagtttgggaggccaagttgggcggatcacaaggtcaggagatcaagaccatcctggcgatggtgaaaccctgtctttactaaaactataaaaattagctgggcgtggcagcgcatgcctgtagtcccagctacttgggaggctgaggcaggagaactgcttgaaccccgggaggcggaggttgcagtgagccgagatagtgccattgcattctagcctggcgacagagctagaatctgtctcagg

SEQ ID NO: 305 - DNA, 3837 bp, Homo sapiens
gcgttgggagaaatgcctagtgtgggtgacgggttggtgggtgcagcgagccaccatggcatgcgtatacctatgtaacaaaactgcacattctgcacatatacctcagaacttaaagtacaataataaaaaattttaaaaacccacctactcaggccacagcaatggcggatgtccctcacccaaccaagcttgagcatcccaggtcaacctcagactgctgtcctagcagcgagaatttcaagccagtggattttcgcttgctgggctctgtgggagtgggacccactgatccagaccacttggctccctggcttcagccccctttccaggagagtgaacggttctgtcacactggcattcctggtgccactggggtattgagaaaaaaacaaaaacaaaaactcctgcagctagctcagtgtctgcccaaacagccgccctgttttgtgcttgaaacccagaaccatggtggtatagacacctggtcctggtctgccagttgcaaagaccgtgggaaaagcacagtatctgagccggagtgcactgttcctcccggtacactctctcacagctttccttggctggggaagggagatcccccaaccccttgcacttcccaggtgaggcgataacccaccctgcttcagcttgtcctccgtgggctacacccactgtccaaccagtccgaatgagatgaaccaggtccctcagttggaaacgcagaaatcacccgccttctgcatggatctctcttacagctgcagaccggagctattcctattcagccatcttgacagtgaaaccagagtctcattattttaatggttaaatattattccatcctgtgtatataccacatattccttattcattaacctattgatggatacttaggttgattccatatgttgtctattgcgaatagtgctgcaataaacatgggagtgcagatatctcttcaatatgctggtttcctttcttttgggtatatacccaacaatgggattgctagattatacagtagttttattttcagttttttgaggaacctccatactgttctccatagtagctgtaataattttcattcccaccaacaatgtacaaaggtttccttttctctacatcctcaccagcatttattattgcctgtctttcggttaaagccattttaactggggtgagatgattcattatagtttttgcttacttttctctggtaattactgatgttgagcatttttccataacctgtttgccatttataagtcttttgtggaatgtctgttcagatcttttgcccattttttaattggattttttgccttcttgctattgagttatttgaacttcttatgtatcttggttattaatcccttgtcagaggggtagtttgcaaatattttctccagttctgtgggctgtctctttactttgattgtttcctttgctgtgcagaagctttttaacttgatgtgatcctatttgtccatttttgctttggttgcctgtgcttttgaggtctgtctcaagaaattgttgcccagatcaatgtcctggagtgtttcccacattctggagtgtttctccaatgttttcttctaggagttttgtagtctaatcttagatttaagtctttaacctattttgatttgattttcatatatagcgagagatagggctctagtttcattcttttgcattttctcaggcgatttattgaaaagactgtcctttccccattgtgtagagaaccaagtcttaacactctcttgagatgtccgttgttgctatgggaatggtcatggcagacttggatgacatccttcaagaagtttgccacctctccctctctcaatgcacttcccactgtgagctggaaaaggcacaaaatgaagagcaccagcccagcttgtagactgaggaggtggaagtggaggtggggcatgggtgggcagtagagacttcctggaggaaacggaggagttgagctttgatacatggttgcagcttagcctgtcatgggagcatggggaagaatcccaagcggagagcacagcttgcttaaagtgcaggaaccctgagttaatgtaaatgggttcagaaaagtacaagggatttgatgtggctgcagcaaaagtcatggagctggggaaggatcagagatgaggctagaaaggcagcactgagccatggaggccttcagtgctgcactgaggagcttggactttgtcctttaggccaaacatgcattttagaaagatcactactcctgcctctggaggctggaagggagatccattagggagctgacacagttgtcccagtgagagaaagaagttggtggcctgaaccagggcaagtgtgatgggaaagggataaggggacagtcacatgacacaagagaggtagaattgccaggacttgaggcttacttggatgctgaaaggatagataaatgaaaatgtccatgtttctcacacaaatacctgagacagaaatacaggagtaggttctgggggaaaaagtgagtttgaccatatactcaagtgccattaagctacaaggggtccaattataagaacctccacccaccaaagcaattctgcctgcttgggaggccaaagtctagttgagcacaagtttggtggtaactcagatgctcagacagtccaggctgccacctcagactcacagccagcaacccaaagggtccaagccctgaaaagatttcactacaaaaattgggggtttcctatttgctgctatagggctgatatgaggagcagaacatcaaggggctttgggtcataaactgagtatgaatggctacaaacattctggaacctcagtagcatgggggaaaatcatgcatgtcaggacttagggggcccagtggcctaagagacagtaaccaggaggctgactttggttgaaaccagtattgatgactccagaggtccaactgggggcatggaccctaggagcaggaagccccaggcctctggtgatgctcaaatgcaggccaatgatgggtcgtcccaagaaactaggcttttcagagaaaggacccagccgatggctatggggagcaagacccagcccctggggtaggagctgtaggtgcaaacaggtgtaccacagcccagctaggtagacagaactacctaggggtggggaggcctctctcctagtgaagaactagggctctgtgaagacagctgtggcacatattcagtcttccagaggagactaatatatgagtgataggggagcctgcagtttcatgggaatgctgacctcctgggatctggccacacagataatgtcagccctcaccagccacttggcctgaggctcccgaatttctgcatgttgcctctatgccctctaacccaactgtctgccctggcccctagggaggacccatccagaaccgcaagtctaagcgctgtctggagctgcaggagaatagcgacctggagttcggcttccagctggtgttgcagaagtgctcgggccagcactggagcatcaccaacgtcctgaggagcctggcgtcctgacccaccggggccacttccggctgcctctttgctactgtgtagcacctgctgcaacattgcctgctgtccacgtggggttgtttggagtctggggaaccaggttagtgggcccccaagaagagctttttatttcctattcaattttcatggagtttatagaaagatgctgattggtaggtgatggtatgatatcaaactattttgcagttgtaaataggggacagatggaaaatatttataactgacaataaaatattattaagaaaag

SEQ ID NO: 306 - DNA, 3962 bp, Homo sapiens
agatgcatggagggcctggaatcatgatgaggggaggggatgcggtgctctctcgggcaccggctgcactatcagcgttccctggagaaacagaacccttaggatttatatagacatatagaaagatttactgtgggggattggctcatgccgttacggagactgagaagacccatgagctgttgtctgtaagctggaggaccagaaaagccagtgacgtggtttcagtccaagcctgaaggcctgaaacccaggagagacaatgttgtaagtcccagcctaagtcagaggcctgagaaccaggagcccgctttccaagggcaggggaagatggatgtctcagctcaagaagagagtgaattctcccctcctctacctttttgctctattcaagccttcagtggatttgataacgcccacctgaatttggcaatctctggggcccctggatccctgctgaggtgcccatggtcccctccatccccacagggcagcctgtgtagtgctgggtagggcccaggcctgtcccacggaagacatggccccatctaggttccgcactcagttggagcttgtctccaatgttctcattttctcctgcaccaacatcgtgggtgtctgcacccactatccggctgaggtctcccagagacaggctttccaggagacccgagagtgcatccaggcgcggctccactcgcagcgggagaaccagcagcaggaacggctcctgctgtctgtccttccccgtcatgttgccatggagatgaaagcagacatcaacgccaagcaggaggatatgatgttccataagatttacatccagaaacatgacaacgtgagcatcctgtttgctgacatcgagggcttcaccagcctggcgtcccagtgcactgcacaggaactggtcatgaccctcaacgagctcttcgcccgctttgacaagctggccgcagagaatcactgtttacgtattaagatccttggggattgttattactgcgtctcggggctgcctgaagcaagggctgaccacgcccactgctgtgtggagatgggcatggacatgatcgaggccatctcgttggtccgggaggtgacaggggtgaacgtgaacatgcgtgtgggaattcacagcgggcgagtacactgcggtgtccttggtctcaggaagtggcagttcgacgtctggtctaacgatgtcacgctagccaaccacatggaggctggcggcaaggcaggacgcatccacatcaccaaggctacactcaactacctgaatggggactacgaggtggagccaggctgtgggggcgagcgcaacgcctacctcaaggagcacagtatcgagaccttcctcatcctgcgctgcacccagaagcggaaagaagagaaggccatgatcgccaagatgaaccgccagagaaccaactccatcgggcacaacccaccacactggggggctgagcgccccttctacaaccacctgggtggcaaccaggtgtccaaggagatgaagcggatgggctttgaagaccccaaggacaagaacgcccaggagagtgcgaaccctgaggatgaagtggatgagtttctgggccgtgccattgacgccaggagcattgataggcttcggtctgagcacgtccgcaagttcctcctgaccttcagggagcctgacttagagaagaagtactccaagcaggtagacgaccgatttggtgcctatgtggcgtgtgcctcgctcgtcttcctcttcatctgctttgtccagatcaccatcgtgccccactccatattcatgctcagcttctacctgacctgttccctgctgctgaccttggtggtgtttgtgtctgtgatctactcctgcgtaaagctcttcccctccccactgcagaccctctccaggaagatcgtgcggtccaagatgaacagcaccctggttggggtgttcaccatcaccctggtgttcctggcggcttttgtcaacatgttcacgtgcaactccagggacctgctgggctgcttggcacaggagcacaacatcagcgcgagccaggtcaacgcgtgtcacgtggcggagtcggccgtcaactacagcctgggcgatgagcagggcttctgtggcagcccctggcccaactgcaacttccccgagtacttcacctacagcgtgctgctcagcctgctggcctgctccgtgttcctgcagatcagctgcatcgggaagctggtgctcatgctggccatcgagctcatctacgtgctcatcgtggaggtgccaggtgtcacgctcttcgacaacgccgacctgctggtcaccgccaacgccatagacttcttcaacaacgggacctcccagtggagcctgtgtgagaacctcagacacaggagaatggaagctggtacctactttccctctggagtcaaggaacaaagccctgagcatgcaaccaaggtggcattgaaggtggtgacgcccatcatcatctcagtctttgtgctggccctgtacctgcacgcccagcaggtggagtccactgcccgcctcgacttcctctggaaactgcaggccacagaggagaaagaggagatggaggagctgcaggcctacaaccggcggctgctgcacaacatcctgcccaaggacgtggccgctcacttcctggcccgcgagcggcgcaatgatgagctctactatcagtcctgtgagtgtgtggcggtcatgttcgcctccatcgccaacttctccgagttctacgttgagctggaggccaacaacgagggtgtcgagtgcctgcggctactcaatgagatcatcgctgactttgatgagatcatcagcgaggatcggttccggcagctggagaagatcaagaccatcggcagcacctacatggctgcctccggcctcaacgactctacctacgacaaggtgggcaagacccacatcaaggcactggccgactttgccatgaagctgatggaccagatgaagtacatcaatgagcactccttcaacaacttccagatgaagatcgggctcaacatcggccccgtggtggccggggtgataggggcacgaaagcctcagtacgacatctggggcaataccgtgaacgtggccagccgcatggacagcaccggtgtacccgaccgcatccaggtcaccacagacatgtaccaggtgctggctgccaacacgtaccagctggagtgccggggcgtggtcaaggtcaagggcaaaggcgagatgatgacctacttcctcaatggagggcccccgctcagttagcagctgttggccaatggtgccaggcagcctggcctccagaggcatggaagcagcttctctgtgtgccgggggtggcggggaagccatgctccagcccgcagggctgcgctgctgagattttccacttggactccagagcagcttctgcctttgctggtgggcagcggcctctgtcccaggccccggggtgccagcgtcctgcgagcacccagctgaccaaagacgtttccctctgtagaagactctgctagactgggtctgaagcttgagttttctaacaggtgctgctgcacaggtggaaaggagccgtgggaatgtgtgtgtggcacggcccagacaagggcagggctgaggggcctccgactcagctgggggtagacgggctcgaatgtggcctgggagagcctagggggccccaggggtctgcttttctatgtgagcctttaaacttcagacaggccaccaccctgcacctgcaggggctttggcacaggagtgctggctttggagggactgtggccttcatcgtggtcctctgcccacacctccacgcacacagacagtgccctaggagggaaacagaactaattacgagggggaggcaagaggacgccaagcaaggagtggtgattctgagaaaaatatttattaaataaaacaaaac

SEQ ID NO: 307 - DNA, 3925 bp, Homo sapiens
aaaaccatcagatctcctgagaactcattcgctgtcatgagatcaacaagggggaaccgtccccatgatccagtcacctcccaccaggtctcttcctcaacacctgaggattacaattcaagatgacatttgggtggggacacaaaacctaatcatatcagtgtgtcagtttgtgaaggaggtatctctgcatgtttctggaacctgtctgtcactttggaacattgttctaaacaaccagctcacaagtgagtttttagtacccagcctgctttttctcgtacttgacaactccagaaattggtttgagagttgtgcttcttaaacccatgggaagacacagaggagacaaaggctgactgtcgcccgctttgcaaccctgccccccaggtcccagcccccagccagctggaacttggcctggccactggctggactcaacatcaatcctggagagcttgtccacaccactagagccaccgggccttacccttgcctggtctaccaaatgccgggagtcagcagctgctgacaaggccctcctcatggagagggccgagcctggctgacagggaccttgctctcctgcagatgggctatgtgcgggagtatattctgtgggcagcgtctaaatcccagcttctggcacaccagttcatctggaacatgaagactaacatttatctagatgaagagggccaccagaaagaccctgacatcggcgacctcctggatcagttggtagaggagatcacaggctccttgtccggcccagcgaaggacttttaccagcgggagtttgatttctttaacaagatcaccaacgtgtcggctatcatcaagccctaccctaaaggcgacgagagaaagaaggcttgtctgtcggccctgtctgaagtgaaggtgcagccgggctgctacctgcccagcaaccctgaggccattgtgctggacatcgactacaagtctgggaccccgatgcagagtgctgcaaaagccccatatctggccaagttcaaggtgaagcgatgtggagttagtgaacttgaaaaagaaggtctgcggtgccgctcagactccgaggatgagtgcagcacgcaggaggccgacggccagaagatctcctggcaggcagccatcttcaaggtgggagacgactgccggcaggtaagcagggtcaggcctcgagtaggcttggggactgggcttgctgctccccaaggctccaggcccgccagagtccaatctcatatgcagaaatgtgaatcttttccttctcttatatggttcaggtgccacggggtaaattagggcttctgcaaaacccagaggcctctccttccagcccctttcccactgtccccgccatgccagtgcccacctgagggaactgtccaggggttgggtgccttatctcacacaccccaccagacagctcagcctcatgctcagcccagggcctggtggtcccagcagcctgagtccagcccccggtggtcagaaaggaaggccttccagactcttgctcggctgtggtctccccacctcactccatctctgggtgcttggcttttgccctgcatgagccagaagagctgctggggtgcaaggacgccaactgaccgcatcctgcgcctcccggcttcccaggacatgctggccctgcagatcatcgacctcttcaagaacatcttccagctggtcggcctggacctctttgtttttccctaccgcgtggtggccactgcccctgggtgcggggtgatcgagtgcatccccgactgcacctcccgggaccagctgggccgccagacagacttcggcatgtacgactacttcacacgccagtacggggatgagtccactctggccttccagcaggcccgctacaacttcatccgaagcatggccgcctacagcctcctgctgttcctgctgcagatcaaggacagacacaacggcaacattatgctggacaagaagggtcatatcatccacatcggtcagccagccacagcgccaccctcctctcccttcacccctggcacccaggggtggatagggatccccaccccacagagaggagaatgcccaggaccaccctgccaggagtgtcagggtccagctctgaggtccgaactgtcggccaccaagctgttctactgtagagggtgcctggccccggccccagggagctagggcgagagccgccattgctctgagtcagaagctggagctgggcggagtggggctggtccaggttcagtgccccagcttggctccttcctccacttcctcccttctctttctctgcctgctgccccaccacccaccccatcactgtctccaagaaaacacaacctgcctgttgggggtggagggggtgctcctgttgcagtccttttccactcctcaaaacagaccacttgtccttgcccgccctggctcctacccagtcacaggcagctctttggggttttgcagactttggcttcatgtttgaaagctcgccgggcggcaatctcggctgggaacccgacatcaagctgacggatgagatggtgatgatcatggggggcaagatggaggccacacccttcaagtggttcatggagatgtgtgtccgaggctacctggctgtgcggtgagcctgggtgagggccagggtggaggcggagggggtgtgtggaacgttctgagatcccctttaggatgaagggaatccggttccagagagtgaggtaggtgctagcagccacctgctgacctacacctgtcctttggtcacctctgtctgcccacctgtgccagtaaattcttgctctggacatctaattccaaccaccttccccacgatcctgcccacgccttcagccatgggctctccctttctgggcatcccatccaccctgtcaccaaagcctgagcacctgccaccccacaggctacgtgccaaagatgggctttgtcccagtttcatatacaggtcacttggccaaggccacagtccaacctgggttcatccccactgccctgcagagaaaggcaggtcagcgtgtctgcatcccacccaagtgcagaagccatggccagcagccttatgtgggggacagggcaggacactcagcctgtccagagtgcgtgtgggcagcccttgcctgggcggtatgggttaccaagtgcagcagatcgaaagttgcctcggggatgtgcaagatgtggcaggcgaggtgggtggcaggagcccacacctgaggctgttggcatcagccagtccacaggactacaggcagggccaccacctaggctggcctcagcccaccgctccctcctatctctccccaggccctacatggacgcggtcgtctccctggtcactctcatgttggacacgggcctgccctgttttcgcggccagacaatcaagctcttgaagcacaggtttagccccaacatgactgagcgcgaggctgcaaatttcatcatgaaggtcatccagagctgcttcctcagcaacaggagccggacctacgacatgatccagtactatcagaatgacatcccctactgaggaggggaccttcgagggcctctgccccatgtgccctcaaagctgtcccacaatcatggagccctgcgacctccctgccctgccgccacatgcagtggaggagaggcctgtggcccaaagaacctggtagcgcctcctggggcagcacgtgggtggcgcagccttggtaacgccatggactgcagcgacaatcaatggatggtgctgtctatgcacaggtgtgagtcctctgtttgcactggacatattccctacctgtcttatttcataggtacatgaagtattgtgtataaaaaaagagataagatttaaccaacatcaacaaaataaaaacccaaaatagtgctgtgttgg

SEQ ID NO: 308 - DNA, 3679 bp, Homo sapiens
acagccaccactgccagccgcttctacaggatcgaccgagcccaggtgagcgattgcaggcctgctccagccacagctgcttccgggccccagggtcgcctctcctgggacgccttccctgttagctcccccgatgggctcacctctgtcctcatgcctctgagagcttttactattgcctgtgtgcatggacagcgtgcggccctgccctccacactggagagtatagggcggtgccagccagaaaggcagtggggtacctaccaaaggcttgctgggtgggtaggagggcctggaagcccagagccatccagggagacacagaagcaaaggcattctggtcaggcgccagctcacctggtaaagtctgggcagtcggaggaggtgtcaggaatgggaaggagtgggagagggacaggcagggccccttgcctggccacctcctttcagtgtttgtgctcatggcagaggcttctccaggtctaccagccttgctgcccctcggcccccaccgtcaggtgccctgacctcccgccctgacctccccccacaggagcacctcaactatgtgactgagatcgcacaggatgagatttatatcctggaccctgagctgctgggggcatcggcccggcctgacctcccaacccccacttcccctctccccacctcaccctgctcacccacgccccggtgagtcctggtgtcccgtccctccagcccctggctttcagccccacctgtaagccgatgacttctgaatccctgcttctagcccctccaccagttaactaaatggtgtcaacctgaacctggccaaagcccacctgacggccttcagccctgtggttctgtggggaagcggcctcacgtccaccctggttccctccctgacttctccctcctctggacctcatccttcagccagtcctggcagcccccggacccaccacctgagcactcctccccacccctactgccaccagcccttcccggctgccacgccctggcccccagctcttatatccctgtggccattcgtgccctcgaacccccatctccataccacggtcaactaaaaatgcagagcataccaggccactccccaacctagaagcttctttctcagcagccctttggacgtggattctccccaggccccccgtcattgcactgggctcccagccccctccctgagttcacctccatggtcctgccccactctcttctcttggttctttgaggcttcaggtgtttgccaccactggacttctgtcatcgctgcctccaactcttcccccatctttccggagctcccccacccccatccccttcgaatctcagcttggctgtttcctccttggagagatcactcccaggaccccctctgcaggggtgccacatcacctgttctgaattcttaagagcacccctgctctcagaactccttatttatttgacttgtttgtatccctgaactagaatgtaagctccatgagggcaaggccttcctctgtctcgtttccctgctgtatccccagtgcctggaatagtgcttggtgtgtagcaggcactcaataaactgtggaaaggatgaagatgcccccagttggggttggggagggcgaccagctggcctgtgccgtagccggtcacagcacatcatgctctgttgcaggtcactgcaaggggatgctgcaccccctcaaggtgaggcctctccctctggggcccctcctttctgcctggttgggggcaggaggctcagtggggtggggatagggcccagacacagccttacacaaacacagcctttgagcttcacgcaccaacggagccctgggcacacatgcctggccggcacagtcctgtccactgaggcaccaacccaagcccaggcctccgactgcagagtaacaggcaggtattccgtgcaggtgaagagctgattgaggctgccaagaggaacgacttctgtaaggtactagctccaggctccagttccttcccccagcagctccctcgggccctggggagcgaggcctctgggttgggccaagagctgacctgctcaggtgctgtcatctgtcttcgtctggccctctgtgggatctccagtgatcgtcccattccacttcactgtatctctgtctaggccacaatagatggctcctagtaggggcttcctagctcagtccacctgtccctggtgcttagaaaggagcaggtcagaggaagcactgctccagggcttggtcaccagtgctgccagagagcccacaggctgtggggtgagaggcccctcctccggtgtgctccagagagacccacagaggcaactcaggagtaagatgtgtgagcgcactcgtttcaggcctgtgctggtgtacccggctgtgggccagcgtgtgagctcagggaaggaggggtggccccaggaggtccagccctgccatgcctcctgccctcagctccaggagctgcaccgagctgggggcgacctcatgcaccgagacgagcagagtcgcacgctcctgcaccacgcagtcagcactggcagcaaggatgtggtccgctacctgctggaccacgcccccccagagatccttgatgcggtggaggaaaagtaagtatctgggcagtgcagaaccgtggtcaccccggaaaccacccttttccccacccctcccattttgtcaggtcagagcccataaacttcctggtcacatctgtcatcccctgggccacccctattgccccagagccctgaacttcctgccctttctgatggcccttgggagacagatgggtggatcaggggacgggatggggtacacagccagcccctgctcccccagcggggagacctgtttgcaccaagcagcggccctgggccagcgcaccatctgccactacatcgtggaggccggggcctcgctcatgaagacagaccagcagggcgacactccccggcagcgggctgagaaggctcaggacaccgagctggccgcctacctggagaaccggcagcactaccagatgatccagcgggaggaccaggagacggctgtgtagcgggccgcccacgggcagcaggagggacaatgcggccaggggacgagcgccttccttgcccacctcactgccacattccagtgggacggccacggggggacctaggccccagggaaagagccccatgccgccccctaaggagccgcccagacctagggctggactcaggagctgggggggcctcacctgttcccctgaggaccccgccggacccggaggctcacagggaacaagacacggctgggttggatatgcctttgccggggttctggggcagggcgctccctggccgcagcagatgccctcccaggagtggaggggctggagagggggaggccttcgggaagaggcttcctgggccccctggtcttcggccgggtccccagcccccgctcctgccccaccccacctcctccgggcttcctcccggaaactcagcgcctgctgcacttgcctgccctgccttgcttggcacccgctccggcgaccctccccgctcccctgtcatttcatcgcggactgtgcggcctgggggtggggggcgggactctcacggtgacatgtttacagctgggtgtgactcagtaaagtggatttttttttc

SEQ ID NO: 309 - DNA, 4116 bp, Homo sapiens
gtaacaaggagctgccacagtgtctctcttgagcagcctgggcctgcatctcagcagcaccatcttgacggtgagatgctacctaccaaggaaggaagccagtctggctataaccagtggctgccgtttgatgaaagagctcaggagctgaggtgggaagcctggagcaccaagttccacctgaaagcagagagagaagaatttaaggtgcaaatagatttgagagaatgccaggcgtactccagtcccatggagtcccctcagcctgtggtgatgggagaagcacctcagattgtggtttggtgtttacaggcccctgggctctgccatccagatctaagtattggcgttcacctcctagtgacaaagtacaagtcaagggactgggacgggagaggtgaacccaacaggtcatcattccgctctgctgaggctgctgcttttgcctcacaatgactcatctatctcctaaggacactgggatcacccacaggatgcaggtcactaggttttcggtaacagcagcttcagaaaagattgataaactcctgtcgcattcccttctctccaattccccactgactccccttactgcaaaagcccaggaagccctcaagtcttcaggtctcaggccaaagggcctgggcactggagggtgttcaaaagcgagacagaaaaatcccagggggctgtgggaccaagtcagcctgtgctgtgaggccagctgcaaaggatttatcacctgggccaagtagatgactctggtgacttccttcccttccacagtgatgggctgcaagatccaggcactgggcaggatctccccgcgaaccatttttctgctgggtcttggcatggatgtatcatacacagactgggctgccatgacagacaggtgaccctggggacagagggaaatgggagtcctgcctgtgtagtgtggacaaaacaggaacaggctcccgtgtagacagtatggtgaaaggcaacactgggccagccttcaagccacccctaccctggctccagccccaatttgccctccttcccctagaggacctgaggcccacatagattgtttctcacgacacttcagcccaagttcttcccacaacatctttaccaccaaggcaggcacctctttggcttccacgcagacacaacagaaatcccgtggctgcttcagtgcgcacagggtggtgttgcacaccaagtacactggagggacagggataaggaaggtcaggaggcccatggacagacctagtcctaaagccttcctggtcagggagccctccccccaacaccccatcacttgacacctagctcaacctaggctgagcaatcaaggtaacctgagtacctggcctccaaagagggctgcctccaaccctccacctctatcccccagcaagaccccactgggcacaccagaaactaggccccatggaagccttccttccctgggctcacccaggctgatgctgttggtcactcgctgatgcagccttgctgtctggatgggcttgtaatacaggggccacacagtggggtcactgacagccgcccacacacgagacagcggctgggacaccacacctgcccccaggaagccatgccgagtgggagaaaacaccttgtagtaaagctgcaccgcctgctcctcaccctgatagctggggggagacaccaagcacagaaaatagaaaggggtcaaaaatgggctctaagggtcacaaaggaggggctcagagtgaagacttgaggaatccaggtaagggaaaggaggagagaagccaagcagggtgacaagcttaccaagacagacactgtacaaaggaccctaaacaaacttacttccagccagcagttgcctggcagctgaagaggttgtgcaaattatccgaacaagcagccattacctggggacacaatggccacacccaaattaggaggcacagtaaaaactaagcccctgggttagtcagtctggcctgcatctgctaaattccccttttctttttttttgagacagggtctagctctgtcgcccaggctggagtggagtggcgtgatcacagctcactgcagcgttgacctcctgggcttaagcgatcctcccacctcagcctcccagtctctggggctacaggtacacaccaccacgcccagctatctttttttatttttttggtagagacagggtctcaccatgttgcccaggctggtcttgaactcctggactcaggcaatcttcccacctcagcctcccaaagtgctgagactacaggtgtgagctaccacgcctggcctaatgttttttatttttttgtagagacggggtcttgctatgcttcccaggctggtctcgaactcctgacctcaagtgatcctcccacttcagcctcccaaaatgttgggattataggcatgagctactgcgcctgacccgaattcccctcttctcaagatgaagaaccactgaagatgcccacaagccttgggctcctcatctgcccagcttttttcctactttctcttcctgcacacccagcagaggtctgggtaaaggaatggtagggatgggtgggagcagttactcacatcagccatagaagtgtccacgacatgcttggccaaatcctggtaggaggaggaaaagcaggtccccaagctggacagactggatggtgaacagcagcaactgcccagggaggctctgtggcctacaagaaataggtggaggccctgtgatagcactgaacatcagggcctcaggacagcaacagctctcccacagaccagtgactcactaagatctagcagccatcagcccccaagtccccaaaccaggcagctggctatgcccaacactccccgcaactcactgtaggcagagttcttcctcactgcagaatggcctcctcgctcatcccctatccatacatccctggaatcaggcaagtttgtatgcccctgcagaagagaggatactcaggacagagccagaaggcaagcacagaattatctcctctgcctctgaactgcatctcacagcttccagtgggatgactcaactgcaaaggtcttcccagatgggaatacaagaggctcgatgtcccccaaagaagaccacagcaatagaaataggtatctagacgatctctgctccccctctaagccacaggcagaggctgcttacaggagagttccaacagggatcaaaacaaccagggcctgagagtatggggtgctctgccagcttccaagctagggggtaccagggatcagtgcatgagaggctctctgcaccacccgggcaacaggaatgaggccatggctagagggggtttaacggggtaataaatgtggaagatgggatgggaggaaaagtaatgggctatgaaaagctgaacgcttgacccccaccccaggtgcagcagccaagctaaaggtcctaactggggattagatggggttaccctctggatctgcaatgtggtcaccacacctccaccgcagcaagctcctcaacaataggacccttgacctctgctggaactcacaggcacccaccatcctacctccatcatcacctttaacctactgctactctgatcacaataaaggaggaaacaaagacagttctctatccaccctcatctccttctcacctgctgtcacagacagcaggcccttctgcctctggcttagctctcacgctgccctgtcagaagcctttcactactgatcaccagtctcttcacttgttgcccccacctcttcctcttcactggatctttcctattagctacaacacttggctaattttaaaaaaaaatttgggggccgggcggtggctcatgcctgtaatcccaacactttgggaggccaaggcggtagatcacctgaggtcaggagctccagaccagcctgaccaacatggtgaaaccccatctctactaacaatacaaaaaattagccgggcgtggtggcgggcgcctgtaatcccagctacttgagagaatcgcttgagcccaggacgcagaggttgcagtgagccgagattgtgccactgcactccggcctgggcacaacagagagagactccatctc

SEQ ID NO: 310 - DNA, 3363 bp, Homo sapiens
tgaatgcgcggtgactcaaaagtgctggccacgcgctcgttcatccaagcgcgaggggctgagttgggaacttggtttgcctcctggggctccggctcgtgcaatgtgcaaggcgggggtgcggaccgagagagcgcgcgtttcgggcagtccccgctggagacagcgcagtgggcgccatcggcctggggatggagatggtccactcaggcgggggtcggggggacgccaggagtggtgactccgggtccccgggggagcgtgccggggcggagcccaccgcgcggttctcccggcaccgccgagccgggcagaggccctggagcccaaggccccgcgcggccccacgccaagggcgccaggcctgcctaagagccgtggcgctgggaacccggctacccctgggccgggaacctgataaccagctccagcgcgagcaccaggggcgctcaaggtgaacgcgccgggcccggggtccgcccccggcgcggccccgccccggccccggccccgactttcgggcagccctgcccagtcccctgtcctggcccagcccctctccatcccagcgtgccgtgcgcggcggcggcgcgcgggcgcctggggcgggacttccggcgcgctggagcgttttccggccgtgcgtttgtggccgtccggcctccctgacatgcagccctctggaccccgaggttggaccctactgtgacacacctaccatgcggacactcttcaacctcctctggcttgccctggcctgcagccctgttcacactaccctgtcaaagtcagatgccaaaaaagccgcctcaaagacgctgctggagaagagtcagttttcagataagccggtgcaagaccggggtttggtggtgacggacctcaaagctgagagtgtggttcttgagcatcgcagctactgctcggcaaaggcccgggacagacactttgctggggatgtactgggctatgtcactccatggaacagccatggctacgatgtcaccaaggtctttgggagcaagttcacacagatctcacccgtctggctgcagctgaagagacgtggccgtgagatgtttgaggtcacgggcctccacgacgtggaccaagggtggatgcgagctgtcaggaagcatgccaagggcctgcacatagtgcctcggctcctgtttgaggactggacttacgatgatttccggaacgtcttagacagtgaggatgagatagaggagctgagcaagaccgtggtccaggtggcaaagaaccagcatttcgatggcttcgtggtggaggtctggaaccagctgctaagccagaagcgcgtgggcctcatccacatgctcacccacttggccgaggctctgcaccaggcccggctgctggccctcctggtcatcccgcctgccatcacccccgggaccgaccagctgggcatgttcacgcacaaggagtttgagcagctggcccccgtgctggatggtttcagcctcatgacctacgactactctacagcgcatcagcctggccctaatgcacccctgtcctgggttcgagcctgcgtccaggtcctggacccgaagtccaagtggcgaagcaaaatcctcctggggctcaacttctatggtatggactacgcgacctccaaggatgcccgtgagcctgttgtcggggccaggtacatccagacactgaaggaccacaggccccggatggtgtgggacagccaggtctcagagcacttcttcgagtacaagaagagccgcagtgggaggcacgtcgtcttctacccaaccctgaagtccctgcaggtgcggctggagctggcccgggagctgggcgttggggtctctatctgggagctgggccagggcctggactacttctacgacctgctctaggtgggcattgcggcctccgcggtggacgtgttcttttctaagccatggagtgagtgagcaggtgtgaaatacaggcctccactccgtttgctgtgacgggtctgctgcagtcctcagtcgggggtcctgggcaccatgtgactccccatcctcccatgaggggtccctgccctggatgagtcctagctgggggacaccctgagagctcgagcccctcccacccgggcatccgctggctgcctcctgtcagctgggcaggcggggcccacagtacctgccccaccaggacagcctggctcaggcctttctgggctgcttctcacatcctgggctggatgtgggtttggaagctctggaaccatcccggactcgcccactcctggattcgagggccctcgcagggacagctctgcccagcatcaccccagggcctggcagtggtagagctgagagctccacccccacatacctgccacccacctggccagccacagcacgtgtgtcacctgcagagagccacccagacgtccccaccgagtccagcacggcaagggtgcaggggctgccctagaaatggactcagaggagcctggcccaccctcttgaaactggtcctggaccttggctcagctctgccgcctcaggtagcacgacccccaggccagcctggacacatcagggagcatggtgaggggcaacggcaggacccgtgggccatatcgggacaggcatttccagcgaggggtggggcagaggacatgtggctggcaggctacacccaccctgccatgcagcggtgtccaggctctggggaggccctggggaatttggaggcatcatgagccaaggcctggtggccctcgttcccctgcccctcgtcaccatcctgtccttggctggccgtgaggactcccctcctcaccactgggtcccacagggctgaggtgggcagtagagggcataggtgggtacatgtcccgggcaaggtctctcggggggacagaagtgagtccagggagtgggtgggcctgggcgtccctcactcagaatgccgtggggtgaggacggtgaggacagggtgggcactgggttctggtttagagtcagtaatgttagggcgcagtgggcagggggtcaggacatctccagccggtggtgaggaagcatggtggggtctcctccacaggacgggagctggggagggggtcctgggtcggacccaaggcacccacacttgagaaagcctccgcctggacgtcagggaggcctgcgagctgccacagtgcaggtgcagccgttcccaccgccctgctgctgcttgacacgggcataggagatacaagtggtgtgtgcggcggttcatgcctgtaatcccagtactttggaaagccgtggcgggaggaacgctgggcaacatggtgaaaccccgtctctaccccctaaaaatagaaaaattagcaag

SEQ ID NO: 311 - DNA, 3615 bp, Homo sapiens
atgacattgtggactccctcagtgtgttgtccaaaactcagcatgacctcagctccttcctggtggacatgtgttaccagaaggcaagcacctgcttactcccttggacaggccctgagagccagaggtgggtaggaggttaagggggatcctgagcactggagctcttccctttcagaaatggatgctctacttttctgtctacggtgtgttgaaagaagaacacagtgatggtagcagctctcctcaaggagaaaataaaggtggagattcttcccaggggaattttggaaaggagaaccttcatgatgaacatgatggcaacccctctaccttacaacccgatagtaggagtgtgaaatgccatagtgaataccaagatagaattcctccagagagagaagtggagaagaacacacagaatggagacccagggacctggttcaaggtcacaattccttatgggataaagtatgataagagttggatagtgaattcaatccagagccattgcagtgtccccttcactccagtcgctttccactacaacaaaaatcgggcccatttctttattcaggatgctagtgctgcctgtgcattaaagaaagtcaactgcaagattcatgatgaggaaaaccaaaaggtatttgtttttgtcaatctttctactaaaccccagtctatccagaaaatgttgaaaccaaaagagatggcatagctaaagctgaccctgaacaaatgatatgatgtctcccagcaagctcttgatctccagaggctccgctttgacccaggtatggctgacagcagcaattctagggcaagtaggggcagagcagtctgcctggaaaggagacttatatggacggcaactttgggagggttggtgctggtgctggtccagtcaggccccttacagccttctgatgcccttctctcggcttcctggagacttggtgaaacatcatattgatataatcctgaatcaaagaaactacatggctgccactctgaagatcattgaaaggaatttccctgagctattatctttgaacttgtgcgacaacaaactgtaccacctggatggcctgcctgacattatagagaaggctcccaaagtcaagaccctgaatctctccaaaaataagctgaagtcggcttgggagttgggcaaggtgaaagggttgaagctcgaagagctatggctggaagggaactcattgtgcagcaccttctctgaccagtccgcctatgtaagtatcatccgggaatatttccccaagttgttatgcctggatggccaggagttagcatctccaattataattggcattgaagcccctgagataataaaaccttgtaaggaaagctataaaggatctgagaccataaagagtctggtgcttcagttcctgcttcagtattacttgatctatgactctgaagatcgaacgggtctcctcagtgtttaccatgacaaggcctgcttctccctgaccattaccctcaaccctgaggacccagaaccgagcagcttggaaaaatacttcaaggatagcaggaatataaagaatatcaaggacccttgcctgaggattcagctgctgaagcacacaaaacgtgagattgtggactccctcagtgtattgcccagaactcagcatgaccttaactcctatgtggtagacttgtgcatccaaacggtgagcacctgcttcctccctcagtcaggcccagagagctgaagtaggtaggaagtaggtaggtgggtaggaggatcatgaaggctctagttttttcttcttccctttcaggaaaggatgctcgtcttttctgtcaatggagtatttaaggaaggtgagtgtctatagattcttctctccagatcactcattactcccttccccaggctgggcttactccaagaactctctcagcttcccaagttgctcttctccccttcccttgcattcttcctctccgtttgtgttcttcctctcctggcaactttctgttatctttgtgttctttcctttttgttcccttccctttgtgttcttcctctcccccaattttgttcccaaacatcattacttcctgacctacatccatgcctgtctgcacctgcaccactcaggcgttagggacacagcctgtagagtttgatggctctcatcccaggttgttactttgcgaacttgggacattgtcctgttacctaacccctcagtttcctcatttgcaaaatggggttggtaagctcatctcttgggtgactgtgtaaaatgaatcaagcgaactcatgtttgtcaagagacctgacacatgttagggggttctatccctgggtgccgcttgttcctatttttgccctctcagtccctgaaactccctcctgactctcactgaaaagttgtcccagcctggctcccttcagggtgccaaaagattatctccctgactggagaaccctgtatgaatgtgtaaagcatgtgcaactgtaaggaggtatcattgtttgttgtttctaaagtggaaagagagtctccaggttctgttcttgccttcacccgaaccttcatcttgacttctgtcggcaattccaagtaagtgctgtgctgtgggtgggagcacccatcctgtcctggagccaatggtgtggtaatgtggtggtgcagtcctcgggatgttctcagtaccatagaaagccaactggtagatccaaggagaggtctagattatgagaataccagattctctttttggccacaatacttactaattagctgtgtatctttttgtccagttgtaagatttctctgtgaaacagtccttttctgaaaatgggatgtctacttcttttgtaaagtgtaaatgcattggggttaaatctacaaatctaaggaaactggtaggcaatctctccaaaggtggactctgcagcaggggtaaagcctaccagccaaggaatccgaaaggtgggcagagcaggggcttggaaggaatctggttcctcagtggcagtggaagcaggatcattgttgaaagtgtggggttgtccatttttccagttgtctgagagcttgtctttccttcagtctgtatattgtgaatgacaagctgattgtgaggaatgccagcacgaaggagacccagagtgccttctccatcccagtgcctgcaccctcctccagctccttgcctaccctctcccagaagcagcaggaaatggtggagactgtctccacccagtctgggatgaaacttgagcagtctcagaagtgccttcaggacagtgagtagaactacaccaaagctgaccaggttttcactattctccagaccgaaggcaagatctcagtggaggccttcaagcaaatcccctaaaaggagcccttcgatgtcttctttgtcctcattcacatcctctttgtttcctctttttaccagcctaaggccgtgcccaggactggggttggcagcctggctcaccggaaagccaaagttaacttgcaggccgggtaacataaccacttgaagaaccagttgttctgtgtattcgccccactcatgatcaccatttattttcataataaagagtgatgttacatgttg

SEQ ID NO: 312 - DNA, 3559 bp, Homo sapiens
ccatcagaccctatcttaaattcctttgggagagggacaatgttttgataatctttatatttccatagtacatagcccagtgccataaagcagaaactacaaaaatatcaaatttatgagaaagctccctaaagagcttcattgtttttaatttttttattttaaatttttgcaggtacatagtagatatatatttatggagtacatgagatgtttggatacaggcatgcaatgcacaataatcatatcatggagaatggggtagccatcccctcaagcaattatcctttgtgttgcaaacaatccaattatactcttttagtagttttaaaatgtacaattattatcaactatagtcaccctgttgggctatcaaatagtaggtcttactttattctttctattatttttgtacccattaaacatccccacctctcccaacccccactgccctacctagcctctggtaaccgtccttctactctctatgtccatgagttcagttgtttgatttttagatcccataaataagtgagaatatccaatgtttctctttctgtgcctggcttattttacttaacataatgatctccagttctatctaggttgttgcaaatgatatgatctctttctttttttatggctaaatagtactccattgtgtgtatgtacattttctttatccattcactgttattttaaattctcattcttttaaaattttctttgagattgtcagttctttaagtttttgatctttttaacccattgtccctttagaatttcttttcattcaattattcctatcttcaatttttgtttgaaatctgctttcttagtattttaggtggcatatatattacactttctccagcatgttcctttacacaccagtttgacatagaattatgttttcctgttatttgtcatttctgctccttccttatttgtcagaattcagtacactcaaataattcccattgtggcttcgttaaaccttggagagatgaaattattaataagaaaatctagatgtattatagtctttgctctttgcagaatgcagctgttagcagatgcctgattagttgatatactccatcactattattatttcacactttgtccttttgcttaaaagagagcagtctggattttattactaattacttataaagacttcttaaagttaggggaaaaaaacaaaactagtctcatgatatagtctcatgatactgaagtgagtcttggtttgtttgttttttccccaccttaggggcataatcaacccatttcctgcttcaaaaggaatcagagcttttccacttcagtgtattcacatagctgaagggcatacaaaagctgtgctctgtgtggattctactgatgatctcctcttcactggatcaaaagatcgtacttgtaaagtatggaatctggtgactgggcaggaaataatgtcactggggggtcatcccaacaatgtcgtgtctgtaaaatactgtaattataccagtttggtcttcactgtatcaacatcttatattaaggtgtgggatatcagagattcagcaaagtgcattcgaacactaacgtcttcaggtcaagttactcttggagatgcttgttctgcaagtaccagtcgaacagtagctattccttctggagagaaccagatcaatcaaattgccctaaacccaactggcaccttcctctatgctgcttctggaaatgctgtcaggatgtgggatcttaaaaggtttcagtctacaggaaagttaacaggacacctaggccctgttatgtgccttactgtggatcagatttccagtggacaagatctaatcatcactggctccaaggatcattacatcaaaatgtttgatgttacagaaggagctcttgggactgtgagtcccacccacaattttgaaccccctcattatgatggcatagaagcactaaccattcaaggggataacctatttagtgggtctagagataatggaatcaagaaatgggacttaactcaaaaagaccttcttcagcaagttccaaatgcacataaggattgggtctgtgccctgggagtggtgccagaccacccagttttgctcagtggctgcagagggggcattttgaaagtctggaacatggatacttttatgccagtgggagagatgaagggtcatgatagtcctatcaatgccatatgtgttaattccacccacatttttactgcagctgatgatcgaactgtgagaatttggaaggctcgcaatttgcaagatggtcagatctctgacacaggagatctgggggaagatattgccagtaattaaacatgaatgaagataggttgtaaactgaatgctgtgataatactctgtattctttatggaaaatgttgtcctgtacttactaggcaaaacgtatgaatcggattaactggaaaatatatctgaattcaactgctgactataaatggtattctaataaaattgtgtactatcctgtgtgcttagttttaagatcaaccaatagatatatatcctacaattgatatattgctttattcacacttttattgtggctgaatttttgtgcctatctataaaacacactttcaaattatttgaattaccaagacgtctgcttttgtgacagtcagaaaacacacctggaatacgatgcagcccaccattaactcattcatgtagtttattcaagtgatttatgtatttaaactaaatattgaaaatgttagtcaaattgtggtttgcttgtcaggtatttatatcagtctgtagtggattcccaaatttcaaagctcttttaatgtaatggacaaaaataagatatgagaatattattgatgaattttcataaggtggaattgatcttaatctactaacagagaagggtagacagtttgtgttaaatgttggcatttacttgtattgaccaaagttttgcagctctactatattctgtgctcaggactaaaatgctgttaatttttttttttttttccagtgctgtgcatatattctgtgatgggaaacattgttgatgtcctaacagaaatatattttgatctattttcctatggagttgtttctattatgaccatttaattttgtttttatttaatagtagtatttccttcccttttatctaattttttatatgctgctaaatatattttaaatatactatgtttgcgaaccttggtagctatgatgagagctattatcatctgtggtgggaaaagctatgtaaataggtagattgtatagagagactatcttgtgttgtgcctgtatgaatttttaaaagttgttgactggattttgcaaaaggatgtataatatttctgtctgctcagaatattaatttgtaaattctgcaagtttaatttttatgtagatggtataacatttgaaaatattgtcttatgtgattttttcccctgaaaatatttgcttgtaaatgaaaacttagctagggcttaaataaacatgttgctatgaaattaaaaaaaaaaaaaaaaaaaaag

SEQ ID NO: 313 - DNA, 3354 bp, Homo sapiens
tgttacaggtgcaggcaccagaatcagaccccctttcccagccctgtgctgtgggcaaatgatgaaaccagcttcatctcccacctgtagggttagggtgagagtcccagttcacaggtgactgagaaagtgcagaatgttagcgtgatgttaacacacataggcactcagtacggttgagcatgttttgggggtgggattgctggggtgggcagggggaggaggccccatcttggattcttagaggttgatcaacttccaggctccacagactccccagcctcactgtcggggggcactggtctccttgtccggctgatgtctataaagggcccctgtgaagggaggcgtcttgcaagttgcaggttgagcgtccgctgtaaggaggcggtgtgtgtgcaggtgtgtggggcttccaggacagtgtctttctggggtcttagagggctggagccaacagctctttgggcccagggcagttctttctgtggctgcggcaccttcccgctccctgctccccgctaagatgaggccgccccattgtttctccggggcagtctcccttccgtctgccctatgccagagactgagcgctggcgaccgtgaactgtgtgtggtgccgctgcacgccctcctgggtccttcagggccagtccactcaccaggcaccgtgtggcagggaaggagccgagggcgacactggctgtgaagcggggcttgagagctcacccccggggatgttggagctgctctgagcagttagggggcctgggtgggtctcctgtgcccccactactcccagcccctcctgaggcagcggcagaggcttcctgttttcatccatctctctaggactgactgtatgcagggccggcgggccccccccccaaaaaaaaccctataaaagctgagtacaacttgggccagaaccccagagttctgagtgtccagaagggacactggaggcagcccctacacccacttcccagacacatcatgctgtgaggagggggctctgctgtgagcctgcacacctgagaggggcacccctggcaactgcatgaaagatggtgccagagtccccagggcacaggggtagagggtgaccaggttccgggccttgggctaggtgcttctgcctacatttttccacagtggggaagtagggggaaacttttacagaagcaaggtgcagcaccccaccctgaatcacacaggcaggagaggggagccggcattcagactccacggctggggtggtcctgggagagggacctgactgcgtctcccaaccgtgcaccccagcccctggccacgcagcccatgtgcccctgggctcttccataatctctccattgactgctagagccacctggggactcagactcgtgtcagccccagagggagtggctgggaggaagaaagtgctcccagagaactttgtccctcctgcctaccccccgactctgcaccctgcatctcctggcagggacccagcctttccccttcagcaccaacagttatgccccacccgggaaaggggtgcaaggtccttggaatgcttggcaactatcaaagacagagaagggaggagaagggggaagcaagagggagcccgcagcctccagctctgagaaaagggaaactgaggcactgaaagactgagctagactgacctggatcggtcctgggcccaggattccacctaggtcagaaactccaccgggtgtggtggtccacacctgtaacctgagctactcaggaggctgaggcaggaggatcgcctgcatccaggagttcaatcaaggctacagtgatgagctgtagtggcgccactgtcctctggcctgggcgacaaagcaagaccctgtctctaaaactgccctaggccctctgctgtacagcaccgctgccccctacctgttactccaggaagaaaccaaggtcaaaatgtccagcactgggctaggacagtgaaggacttggagtggaatcagacgtggggaaggcgacagcgatgcttagctgtggtttctgtatacccagcaacgtgagagcaacctgatagggcagttgttctcagccgggcgactttgcacaatgattgtcacagcttgtggggagggggttgctactggcaccccgtgggtagaggtcagggaggcttctgaacatcccacagtacacaggacggcccccagaatagagttgcccagctcaggtgtcaagagtgcccaggagaaagcctgtaatccaggcacaagcaaagcgtgccaggtgcatgggaggagtggggagcagggtgggaggggcccagatgcctaaggagggaagggtgactgcaactgggtaggctggaggagcccaggggaaggagaggatgtggggactgttaggtacaagagagcaagaaggtgaggggggcctggcacagtggctcatgcctgtaatcccagcacttcaggaggccgaggcaagcagatcatttggggtcgggagttcgagaccagcctggacaacatggtgaaaccctgtctctactaaaaacagaaaaattagccgggcgtggtggtgcgtgtctgtaatcccagctactggggaggctgaggcaggagaatcacttgaacctgggatggtgaggggctgttgggctggctccgtcgcagaggggagatgggaaaggctgacaactgtgcccacccccagggtatattcaggcctgccgggcactcatgatcaccgccatcctcctgggcttcctcggcctcttgctaggcatagcgggcctgcgctgcaccaacattgggggcctggagctctccaggaaagccaagctggcggccaccgcaggggccctccacattctggccggtaactgggggaaggtgatggggcgggggtccccctcaaccgcagacttcaggctgctttgtcctcatctaatctcctctccaattcccactcctcatgctcacctcccctaccctgctgcatggacacctgctcacccctgcctcatctgtactccccagatctcctggctgcaaatcagcccatcggcagtgtttcttgagctcccagtaggggctggccacggccaggtgtgggagggacttcgaagataagagtgagcggctgcctccgggagcttacatcctagctggggagcagagttagggtgcacgctatggcgcacacacacagtgcacgtccacagtgccataccacggggcatggtggctcatgcctgtaatcccagcactttggtaggctgaggtgggtggattacttgaggtcaggagttcaaaaccagcctggccaacatggtgaaaccctgtctctactaaaaatacc

SEQ ID NO: 314 - DNA, 3815 bp, Homo sapiens
cttctactcactgcttcctctccacaactttatgactcagtgaaaccttcacactctctcatctgaaatatttccattttccatcatgttcccatcagcctgcactcctcgactcagtgaaaccctccctccctctcatctgaaatatttccattttccatgtttccatcagcctgcactcctcgactcagtgaaaccctcactctctctcatctgaaatatttccattttccatcatgtttccatcagcctgcactcctctcacttcccgttatcttgttcgcttccacactaatatctctaaacaggtaactgtgttcctcaaggacttaaaagcacttaacaacagcttaaaacttaggttctcactctttagcaaggacttgaagacttttaatgattcagctcctgttcacaaatctaaccactttttcccacatcaaccctgaacagaagctaagttccactcatatacaaaatctttcaattttcctgaataaaaaagattatgtagccatcacccataatctgactccagaactctgtttctgcaccttcctgtcaaactcataataagtctccatattagtctattctcatgctgctaatatggacatgcccaaggctgggtaatttataaagaaaaataagtttaatggactcacagttccacatggctggggagacctcacaatcatggcagaaggcaaagatcaggtcttacacggcagcagacgagagagcatgtgtaggggaacttccctccatacaaccatcagatctcatgagacttattcactatcataagaacaacacagtcctcatgattcaattacctccccccaggttcctcccacaatatgtgggaattatgggaacaacaattcgagatttgggtgaggacacagccaaaccatatcagtctcataataaggaccaaaggccaagccttccctaagtcgtccttaagagactcatgcagatttcataatttgctcccagttgggccttttctcaagaccttgacattctgatctagactcagatggctttgtggctcattatgaaacccatctgtgttcttacgctagactcagtaagatagctactctttcatcaattcgtgtcattatttattaattctttgcataactggacttcaaaataggattttaaaaaaagttttgaccgtgtgctcttcacaatgaagatcactaggcatttgttatgtgattctttctttcctatcatatgggagaaaatagcattgggctgtgtgccctgagagggagggcacatttagatattttaggagttgtaaatagaagaccaaacatcagagagagagactttgcttcacctgtagttcaaatatttagttaggacaggcgcagtggctcatgcctgtaattccagcactttgggaggttgaggcaggtggatcacttgggctcatgagttcaagacaagcctgagcaacatggtgaaactctgtctctacaaaaaatagaaaaactagccaggcatggtgatgcacggtattatgaggttgcacttcactgaaaaaccaaagttgtttagcacttccatgtgaaccacaccatctcacaagtatgaggtgtagcagaagtccagtcccaaggacacaaagaagacacaccatgttaatggaatgacatactgcagtgtatctagataaacgatcctgggccttgatgagagagatagatgcagtcttgaaggaactgattatgcagtgattctgcatttaaatatttgacctaattttagtaacaaaaatgtatgcacctttcattttcaaagtgcagttgttcctcagtatccgtgggaaatcagctccagaatacccccacagacaccaaaaaccactgatgctcaagtcttatataaaacggtattttgcatataacccatgcttatccttccatatgcagtcatgtgtctcataatgaccattttaatcaataatgaaccatgtatattaccatggtcccctaagattataaacacatgtagaaaccttcttgcgggaagtcagagaccccaaatggagggactggctggaaccgtggcagaagaacataaattgtgaagatttcatggacatttattagttcccaaaattaatacttttataatttcttatgcctgtcttactttaatctcctaatcccgtcatcttcataagctgaggatgtatgtcgcctcaagaccctgtgatgattgcgttaactgtataaattgtttgtaaaacatgtgtgttcaaacaatatcaaatctgattgtaaaacatgggtgtttgaacaatatgaaatccgtgcaccctgaaaaagaacagaataacagcgattttcagggaatgagggaagataaccataagatctgactgcctgcagggttgggcagaatacagccatgtttttcttcttgcagagggcctacagatggacgtgtgagtaagagaatatcactgaattcttttcccagcaaggaatattaataattaatatcctgggaaaggaatgcattcctgggggtaggtctatagacggccgctctgggagtgtctgtcttatgtggttgaaataagtactgaaatacaccctggtctcctgcagtaccctcaggcttgctaggattgggaaattccagcctggtgaattctagtcagactggttctctgctcttgaaccttgtttcctgttaagatgtttatcaagacaatgtgtgcacagcgggacacagaccctcatcagtggttctaattttgccttcaccttgtgatctttatggctctttgaagcatgtgatgcttgtgacctactccctgttcgtacatcccctcccctttcaaaatccctaataaaaactggctggttttgtagctcaaggtcgccatcatagtcctaccaatgtgatggcacccccagaggccaagctgtaaaatttctttgtactctttatttctcagaccagccaacacttagggaaaatagaaagaacctacattgaaatattgggggctggttcccccaataaaacctcatatgtgggacttgatactagcactgcagatcaagtagggaaagtgactgatattcaatgatggtgctagaacatatggtttctcctatgaaaaaacataaacatatacaccatctagggttatgtaactacactttatgatgttcacaaaacaaaaatattgcttagtaagcatgtctcagaacatacacatgtcattaagccatgcatgactgtactttatatcatctctggaacacttcggtcaatcaagaaaaatgaccaagacaaatctcaatcactttaggaggtttatttgccaacgttaaggatgcacacccagaagacaggtctatgcttttcttcaaaaatgattatgagggttccaaatttaaaggggaaagggtgaaatattgagaaatacagttttcatgtaagactggggtaaggggaaaacattcattgatacggtttggctctgtgtccccacccaaatctcaccataaattgcaataatccccatgtgtcaagggtgggaccaggtggaagtaattggaccatgggggcagtttcctctatgctgttctcatgataatgagtcacatgagatctgatggttttataaatgtctgacatttcactcattgtctgcttgcactcattgtctctcctgccaccctgtgaagaggtgctctctgccattattgtaagtttcctgaggcctccccagccatgcagagctgtgagtcaattaaacctctttcctttat

SEQ ID NO: 315 - DNA, 3983 bp, Homo sapiens
aaagggagaaagaaagcgtgcgacagggagtgggagccccaagtcaagaggagccccacagaggcagccctggacttcgggaccacagaggtgctgagtgctgcccgattctggatcccactctgcttagctcagaactttgtcagcgagcaagaacaatgccaggaggtctggagaaaacgtgtcatcagtgcatttctaaaatcgccagcaatggtgtctctcctgttgtacgactccaccaggatgaggcggctgctgtccaaggccgtggtgattgatgacgatgacgatgacgaatacccctggaggcagaatgcgcacagatactacatccacctcctgctgagcctcttcctcttcctctggttcatcctgggaaactactgggtcttttctgtgtacctgcctgattttcttccccctttccagcagcctcaggactactgtgacaaaaccctgtacctctttgcagtcggagtcctggcgctcagtcacactgtgctggtcttgctcctgctgtgcagcggctgtgtctacctgtgctccaggtggagacttgctgccgatgaagactgacagctgccttgtccagcataccatgtatgcatatgcgtgtgcatgcacgcgcgtgcacacagacacacagacgcacacacacacacacacacacacaggttcagagaagggcataaaggtaataaaaccttccctgaaggcatttaaaaagccacccaaaggcactgaatataatagcagactaaagaaactcttgccttcctagacatggggaaatcacttctgctcttttcagagtgggaattttgttctcacaagagttttcaaagggataattgtttttgagggtatgaagtgtgggaggcaaagaatgggagaccttttcaaatcatagtgcaatttcaatgactggtgcaagagcaaggttggttgttgctactgctgctgtcattcagccatggtcaccttgaagttatagaaagtgcacagactttcacacaagatatatcttaacttcactcgctatgatggcttttgttattaaaaggaaaaagatattcttttagtgactctagctgccttttgggaaagtgaaggagcagtctcttccagccctatatcagataggtttgacgtgatgggtggaacatcccaaggtcagctataaaatctaacaacgtcaaagcagtagcttccacatagggggcgggctggcctgctacaggcattgcggagtgcagcgccgtgtgcaccgtgtgccgctgctgcaagttctttgcttggccttgagtctgtctctgcctctggctattcaagtacctctctatgatctgcggctggctgggtggcataaaccagttttgtatgtttctggacaggttgcatgagttggggtgccgtcagtgtagctgtttttggtttctgagcttaaatatcgaataatagctcctcaacctaatgaccagttaggctttggaagccttttgtaaattgagatgtctggaagtccaggatgacaccgaacagtgaccactaaccttccctctggctgccgctgttgagagatgaagtccaggtctgttgtcagtgctcgctggggagcctctttatgagcaaaaagtcccatgttttagaattttgtatgaagatactgtcatgagtgtttctagggcagtgcccaggggtgcgtggcacctgcttaaccgtgcttctctcagccacgtgcatagcatttctgtatatttacacactgctgagctgtgtttattttttaactttgttatgttttcgtgctttctcatcaaaccaatccctgagtggccatgaatggaggcacctcccttcatcagaagtgtcagctcaaaccaagaggctcattcttctccgtagctttaagagaaaggccccgtgagtcccatggggtcttcccatttcagtttagaagcactccccgggcagtcaccgttagtccccctttcctcccaggtgagaagaaagtgcttggtgtgccatctgctggacaaaggaagaacagccctttttttgcccctgtccctaagggcagtttctgttttcattttcacttgagccatggcagaagaccagcgggtgtgcagtttgcagatcctacctcacctatgatgcccaattccatcctcactgtgtcccacgttgccctctctgtgttggggactggggagagtctgtgggctatgatactggggtggacaggagttccatgggctcctctcccaccctcctttccccagtccatgactcgtcagccattcccagtcacttagccaatgcttggacatctgtgagcagcaaagacctgggcccagggacacctgcatgactcccacatgaaagcctctgaggcttctgttgcgagggccttggcaaaggcggaaagagctgtgaacaaccatgggcatgaagatttctgttagcagatggcaggtactggttagtgctttggatacatcagtagctaggtctcaaacgttggacattcccagtttctggtaggcatgagtatcaccagagtgttgcagaaatctttcccagagggagtggtggatgaagtgtgctcattctcatatgcaccccaccagcccacccccagttgcaatggagaatactggtcataggtcctaaataattgctaaaatctggactatatttttagctttgagttttcttgtcaccaaagcagtaaggaagaggtgatgatctctttgtataggtcatacatcttccctggtttgaggttacagtgagctatgattgcaccactgcactctactctgggtgacagaatgagaccccatctctaaaaaacaaaattacccccttctggggaaacaggttagatcctaaagaaaatgttcatgtgcatccattcatagaggggacactgaatggttcagtgggtgacatcttcaagcgcagcaggctttgaatgataactgattaaggcctccctcaggagatggtgagatggttatgataaggcacatttcaagaaagaggctctggggctaagtaaggcaaatggtctataactgtggttctttgaagtctggcttaatccagggatgacacccagactgtctaggaagggctgagctgcgtgccctttaagtgatcacctcttagtataatttcactgagctggaggtgagtgtaagaagttcctggttatagaagaagttataatccttggcatggcctgaagtaggcagtccacactgatatgaaatgtgctgtgtatacctggagaatgaaaatgcccatctaagactggcccaagagctgggcagccttcctccatgggaacctggcaaggcaatgggaagtggacatgggaacacctgaactttctggatgctatgaaacctcaagggaacaaattatgtggcagagagggataatctgttcttcccatctgagaaaagactgcagcaaagataaactatatgttgagatcattttatttgctacatcgggcatcattctaaaaaccattctttgcctgaatctatataaatgacagttgaaagcagtaaaagtgggactgtttcactggagtcagccacactagtggttctcaaatcttggtgaaccctgagagctacccaaggacttgtttgcaatgcagaatcacagcccccagagactgacttgtggggcccagctggttctgattcggtggccagagaaaccgcatgtgtgcactcgggccacacatacagcctggactggcttatgtcaggcccatcctggttgtcaccatgaggacaatataatgtcacttccagtacttcgtgttatttccttctcttttagtatgagaagtggccaagtggtcaatagctttcatctttgtgtaactgaatcttgtgcttcatttccttctgggcatttttcattgttgatgaaataaactttgttcaatttgt

SEQ ID NO: 316 - DNA, 3242 bp, Homo sapiens
gtgctcgtgccatgtgcctgtcagttctgcaagcatttgttggatgtgaaggttggtgtgatgaccacgctgcccacaacaggcaaaagggtgcggacagctgaggctcctcacttcccgctccaaagctcagaacctcccttccctcctggatccaacagaagcagcggccgctgctgcctgtgcctctcaaacttgtcacccacggatgctgggaaaaatgcacataaaatgactggatggagatgacccaggaaggggccctgttgcccaggaaatgggcttgtcctgaaccacagcttgaaggagagccaccgactgatcaggaatacccaactggactttattccagcaacatacaaagcattactgtgctgggccatggtatattcttgggtttcttttattagaacacttggcattaccttcactaatatacactcatcatagtagacattttcactagttatagatgatatgcactattttcccttctgaaacagaaatttgcagcagcactgccaaaggacaatagatttttaaaaatcatagaatgactggagttcatgtctctgcaaagaacatctaagccctaagccatccagagtggatgaggcatctctgcatgagttaaattacacactccagctgctgtaaccaagaaggagtttcacagtggtcaaaacgtcgtagaagtttagttctcatgcatgtaacagtccaaacgcagctccacagtggcaaggagccagcgtcctttctcttgctgtcctgctgtgctcaagaggtggcttctgtctttgagtccaacgtggctgctctggccccagccatcatttctatactccagcaggtggcaagtgggaagaagaaagggagggcttatgcctttcattttagggacacatggcctagtgctgctcacatcaccctgctcaccttgtgttgggaccagagtctagtcacatggcagcaaatagctgtgaggaatattgggaaaggttgtctttggctacttggcctcatgaccatcggaaactgctgtactacaaaaggtgggttctgatcatcttagttgggaatgctgtgacaaatgaccatagcctgggggcttaaacaacaaacatttatttcacacagtcctggaggctggagatccaagatcaaaatgctggctggcttggtgtctggtgagggcttgcagacagccacttgttgtatcctcaaatggtagagagagagagagaaagacagagagagacagagagaggcagagagagagagagggagcaagctctcttgagcctcttatcagggcactaatcccatcttgaggggtcccccctcatggcctaatcaatcatctcccaaacgcctcaactcccaacaccatcatgttgtgggtgagggtttcagcacatgaatttggaggggacacagacattcagtgtgcagaggctgccactgtgcctctctgtccccatccctttcctgacaccttagagtgtgtgtccccacaggcaagcaatgtccttcagcatctcttcccaggagcccctgagcacccgcttccctctcactttattactgctcctatccatacaggtttgggcaggagaacaggagccacactcagtatttagaggaaagagagacagagagcacaagtgagagagattgacttaatccaggaaatcagaggctcacacagacattggaagggagcggtgaaggtcagttttaggaaacccagaagtgcagagatgacgaggaagccccgaaatgcccctggaagcccgcagtgcccagtgagccattcccagggaacgcctgggaaccaccagaggctgacaagcctggaaccactgggggaggggacctgggaaactggggagaacatggaggtgacgggatgacgctgagttggaacggacaacccaatgcaggcttcctctcctcgcttctcagcccagcagggtggctggctcatttgtgggatttatcaccaactaagggttttcagggggttgaaaatggctcattatccctcctagataatgttgcctcttagtagaggatttgatgctttgacccagacatgattcctcctgtgggcatgaaaatatatattttttcttttcaacttttagtctaagttccagggtccatgtgcaggatgtgcaggtttgttacataggcagatgtgtgccatggtggtttgctttgaagcagagactggtgggtgcgtagcaaggccagctccgccctgctccagcctctcctggctctgccccctgccctccactcagcacttggtttctgcagtcacctcccctctccggtctctccgggtatggcccctctctgggtcactcccatcagcattcatcctcgtctccaggcatgggaggtctccgtgaccccatgcccctgagcaccgctgccctatttctctggtccctttctctggaccctatttctctggtcccttttgcggccagagtcctcagaagagctggctgcccaccgcctctcctcccgcccctctgctgaggctgtatcgtgaccaccccacccccctgccacatcacatcagggggcctgccctctgtcctcctcttctgtttcctcttcgttgcttttctcacgcttggcccttcatcccttctctcctgggctccccggacctcctgcgcatgggtttctttctgcccctgtctctttccctgcattcttgtcctcttctcggcattctgttttcagtctgtccctctgccatgtgactgtccagtacacgtgagtacatgggatatgttccccaaaccatggaggctgggcttagccatgtgacctgctttggccaaggatgttttgacagcactgcacaagcagaggtctcagctgtgcttctgcggcggcggggctcccccccggggctcctgtcacctgtctggggagaacgtgctccaggcgcggcccttccagagagtgtggaatccccggggaagcccagatgatccacagccagacgctggctgaggttgagaaactggcacttgttgatgtcagccaccgagtttggagttttggagtggcttgtcagacagcagcattgtagcaatggccgaatcatccatgaagacgctgaatttcatttttgttttttgttacggcagcataactttgctgatctggtctgtgacaaaataactttttcctctgtcagtctttctcttttcatt

SEQ ID NO: 317 - DNA, 3238 bp, Homo sapiens
cagaacactggtcagagaaatgggaggcatgcattctagtcctgattttgccattaatttgccacatgactttgaagaagttacttatcttctctgtgcctcggtttatgcatctatacagaggaaataacatttgtccttccaggatggctgtaagggtaaagggggatgatgtatgtgaaagtgctttggaaagcacagagcactgtataaaaggtactcaaggtggtaatagtactaccaactctccctagctgtccccttccccactttgtgctcctccatcaaagggaaaacccaacccctttgattcctgatctcatgagcacaaataacttcctcagttctcagggtctgtacctcaatatgcctataatccattccaggactaacggtgcttcctcttcctgccctttcagctgtgctgcttttggcattcacctatgaggagcgggttggagtgggacatgggaatggcctttcctgagtaactccttcccatttgctcctcagagcatagagcctctggaccccagtgagaaggctaacaaagtcttggccagaatcttcaaagagacagagctaaggaagcttaaagtgcttggctcgggtgtctttggaactgtgcacaaaggagtgtggatccctgagggtgaatcaatcaagattccagtctgcattaaagtcattgaggacaagagtggacggcagagttttcaagctgtgacagatcatatgctggccattggcagcctggaccatgcccacattgtaaggctgctgggactatgcccagggtcatctctgcagcttgtcactcaatatttgcctctgggttctctgctggatcatgtgagacaacaccggggggcactggggccacagctgctgctcaactggggagtacaaattgccaagggaatgtactaccttgaggaacatggtatggtgcatagaaacctggctgcccgaaacgtgctactcaagtcacccagtcaggttcaggtggcagattttggtgtggctgacctgctgcctcctgatgataagcagctgctatacagtgaggccaagactccaattaagtggatggcccttgagagtatccactttgggaaatacacacaccagagtgatgtctggagctatggtgtgacagtttgggagttgatgaccttcggggcagagccctatgcagggctacgattggctgaagtaccagacctgctagagaagggggagcggttggcacagccccagatctgcacaattgatgtctacatggtgatggtcaagtgttggatgattgatgagaacattcgcccaacctttaaagaactagccaatgagttcaccaggatggcccgagacccaccacggtatctggtcataaagagagagagtgggcctggaatagcccctgggccagagccccatggtctgacaaacaagaagctagaggaagtagagctggagccagaactagacctagacctagacttggaagcagaggaggacaacctggcaaccaccacactgggctccgccctcagcctaccagttggaacacttaatcggccacgtgggagccagagccttttaagtccatcatctggatacatgcccatgaaccagggtaatcttggggagtcttgccaggagtctgcagtttctgggagcagtgaacggtgcccccgtccagtctctctacacccaatgccacggggatgcctggcatcagagtcatcagaggggcatgtaacaggctctgaggctgagctccaggagaaagtgtcaatgtgtagaagccggagcaggagccggagcccacggccacgcggagatagcgcctaccattcccagcgccacagtctgctgactcctgttaccccactctccccacccgggttagaggaagaggatgtcaacggttatgtcatgccagatacacacctcaaaggtactccctcctcccgggaaggcaccctttcttcagtgggtctcagttctgtcctgggtactgaagaagaagatgaagatgaggagtatgaatacatgaaccggaggaggaggcacagtccacctcatccccctaggccaagttcccttgaggagctgggttatgagtacatggatgtggggtcagacctcagtgcctctctgggcagcacacagagttgcccactccaccctgtacccatcatgcccactgcaggcacaactccagatgaagactatgaatatatgaatcggcaacgagatggaggtggtcctgggggtgattatgcagccatgggggcctgcccagcatctgagcaagggtatgaagagatgagagcttttcaggggcctggacatcaggccccccatgtccattatgcccgcctaaaaactctacgtagcttagaggctacagactctgcctttgataaccctgattactggcatagcaggcttttccccaaggctaatgcccagggaacgtaactcctgctccctgtggcactcagggagcatttaatggcagctagtgcctttagagggtaccgtcttctccctattccctctctctcccaggtcccagccccttttccccagtcccagacaattccattcaatctttggaggcttttaaacattttgacacaaaattcttatggtatgtagccagctgtgcactttcttctctttcccaaccccaggaaaggttttccttattttgtgtgctttcccagtcccattcctcagcttcttcacaggcactcctggagatatgaaggattactctccatatcccttcctctcaggctcttgactacttggaactaggctcttatgtgtgcctttgtttcccatcagactgtcaagaagaggaaagggaggaaacctagcagaggaaagtgtaattttggtttatgactcttaaccccctagaaagacagaagctaaaaatctgtgaagaaagaggttaggagtagatattgattactatcataattcagcacttaactatgagccaggcatcatactaaacttcacctacattatctcacttagtcctttatcatccttaaaacaattctgtgacatacatattatctcattttacacaaagggaagtcgggcatggtggctcatgcctgtaatctcagcactttgggaggctgaggcagaaggattacctgaggcaaggagtttgagaccagcttagccaacatagtaagacccccatctcttt

SEQ ID NO: 318 - DNA, 3795 bp, Homo sapiens
ctctcatgtgatacgtgagaacacttaaccttagcgaagttgggagacttgaatctcacagttccaggaggagctaggattcaaacccagagcccatgccaagcagaaagaatgtttatgaacagagaacccccacctccaattcccaaatggggccatgagcccagggaaggtgaaggtcttctcttgggctacacttttttggtggagctagaactagagttcagagtgtatgacgccagcctgaatatgtgcactgccccattggcctcttttctgacttgctgccaacttacctgatgccgaggactgttgtgtgttaggaggaaatcaagtgtcacgagccagtgggcaggaaaggaggcccaagacagctcagttaaggaggcactccctgatgaggcaagctgtgaagcagtgatgggcatgagtctcttgtcctcctgagcctcagtttcctcaccctcaaaatggggataatgatttcttccgatagatattgttatggggatgaaaagcaatgcccctggtgagagctcctgaagtggtgtagcccccaactggacttggtggacgttggctcccctctcgctccctgttccccacattctctgggaaatggcagagaaggcatctgtggagccattgctgcacagtgcttagaacagtgtcctatggctgctgtaacaaatgcccacaaactaggtggctgaaaacaacagaaatgtattctctcaccattccagaggccagatgtcccacatcaaggtgtcagcaggactgtactccctacagatgctctaggagaaaacccattccttgcctcttctgggggttgccggctcccgtggctggtggccacatcactccagtctctgcctccagggtcacacaccttctcccctgtgtgtctctgtaatcttacctctctcccacaaggacactcatgatggcatccaggatccacctggataatccagggtaatctcatctccaaatccttagcttaaccacatctgcaaggacccttttccaaataagggaataattgcaggggccagggctgaggacatgggtgtatcttttcgggaccaccattcatgccactgcagaacccacatgttggggaccctggctcaccacctccctctgttcctactaggaggccaactgcaaaaaccacagagtgaaccgggtggtgttcctggggaacatgaagcggctcctcacgacaggggtctccaggtggaacacaagacagattgccctctgggaccaggaggacctctccatgcccctgatcgaagaggaaattgatgggctctctggcctcctgttccccttctatgatgctgacacccacatgctctacctggctggaaagggtgatggaaacatccggtactacgagatcagcactgagaagccctacctgagttacctcatggagttccgctccccagccccgcagaaaggcctaggggtcatgcccaagcacgggctggatgtgtcagcctgcgaggtgttccgcttctacaagctggtgactctcaagggcctgatcgagcccatctccatgatcgtgccccggaggtcagattcctaccaggaagacatttacccaatgacaccaggcacggagccagcactgaccccggatgaatggctgggaggcatcaaccgagatcccgtgctgatgtctttgaaagaaggctataagaagtcctcaaaaatggtatttaaggctcccatcaaagaaaagaagagtgttgtggtcaacggaatagatttattagaaaatgtcccacccaggacagagaatgagctccttcgaatgttcttccggcagcaggatgagattcgacggttgaaagaggagctggcccagaaggacatccgcattcggcagctccagctggaactgaaaaacttgcgcaacagccccaagaactgttagctccccagctgggctgttttctaagccgatctctccgtcgtttctactcatcccttaacttctcccttaccagtgaccccagagacagagccaggacaggagtgggggccagcctgaggacccccgcctaccacctcgagaactggaagccaacctctaacctcctgacctcatgctaataaaagtccccagcttctggagaccccctgccggcagcccctttccctgccaccccaggagccaggcttcccctcagctgggtgaagactacagactccctggggttggcaggggctccatctcagtggaccaggaagcaagaggggaagcgggatcccagctagacttagaacttggacttttcccctgtgaagggggctgccaggacatctcagcactcccgcctggagctctcagcatcactgaaggtaccacagtgtaagtgctggactgcaggctgcagtgatccctctttcgtcccaccccctcttccctcagcagccccggaagcctgcctcacccgacgaggacagcgagcggcccggctcctttctgtctcttcccttcccgccctcttgtcttcagggaattcagaggattgctctccaaggccataatgaccccttgccttccccatgattctcttcaaagctcttgcacacccttttcccattcaatttgtgagccaggcagggtagggattagtgtccccctttgacaaatgacagaactgagggttgcaatggggaaatgacttataaagtcacccagcaggtcaacaatgggcccacgaccaagaccctgggtgttcagaccccaaggccagggcctttcccgctgcatcaagatgccaatccctttgtgggcttcaccagtgcccaagtctctatggagaatgagaactggaagccactgctaccgtctacccagcaccagtagtgccgatgtgccacactgcccagttgaggcccctcacgctctgtgcccctagatccttcaggtccccaccctcagctgtcaccaccaccctccccaggggactccatctgagatgaggcctcgtcctcctggaagctgaggctgagaagggtggagcttggccctggggaaggcagaccagggtctgatggcttctagggatgctctgcgtgtgtctcagcaccgctatctcagccactttcagccttatgcacgtagaatgaccacagccactcgcatccgtatagcactttaaagtttctgcagtcctttgacacataggatctcatggagcctcacgtctactcccttctgcagatgaggaaaccgagagaagtggcccaaggtcacgcaactctgagatgccacatttcatttgatcttgtacacattttcttttattccttcttttttcctcctttcatttcccactacgcacaaagagtttataaacactgttctcagaagagtcacagtttggggtgagatctggaaatcaagaaatgggtgtccactcttttctttcattagctaggatctactagatgcattatactccatacctgcttttcccatggccgccctacggaaaatcccatccacagaggccagggctacccaagcccctccaggtgagctgggcctttcctttatgaacctccatcctcccagccagctacagtagggcctcctcaccccgtaccccacagctagacagtgtcagcactcatctcctcctcccacatttctggagcttttttttttccttccccattgacctttgtggtcttctgtgattatttatgctgcctcccaaggatagaattgaaataaaatgttttcaacttaaaaaaaaaaag

SEQ ID NO: 319 - DNA, 3316 bp, Homo sapiens
attccacgcggctcgagcccgcgtgcgggcctctttcaggccgctcctagtggacgcagaggcgggccgaggacgctgcagagaaagtaccctgggccatgcagctgcactcccctcccaggaaaggggcaggatggctgcccagatgagtgaggcatcagccctggccccccaggtcttcccgagtccactggaactgatggtgccagcccccaggccccaagaggagctggtccccaggacagaggagggagaggagcaagaggctcccctgggccccttccaggccccacctccagggatctgggctgcacagccaccccatgccttggaccacctggtctgacctgcacagaggcctggtgtggacattgcctgggtaacagccactgagatcctccagcctggacatgctgcccatactgtgtggactacccagggatccggccagggtggagtgggtgaggcagacatagctgtgtttgggtcaggcggtgtcctccagccttcaggaatggagacgggtccatcgtgttcctcacaaactggagtctccaccttcttgacacttggggccccaccctgtgaagcaaggagaggagagtggtgccacagtagggccagtgcaggtcacaggcgcgagatggagtccccaagagggtggaccctgcaggtggccccagaggaaggccaggtgtcacctggggcccagtgacagaagcagccatattttatgagacgcagcccagcctgtgggcagagtccgaatcactgctgaaacccttggccaatgtgacgctgacgtgccaggcccgcctggagactccagacttccagctgttcaagaatggggtggcccaggagcctgtgcaccttgactcacctgccatcaagcaccagttcctgctgacgggtgacacccagggccgctaccgctgccgctcgggcttgtccacaggatggacccagctgagcaagctcctggagctgacaggggcaaagtccttgcctgctccctggctctcgatggcgccagtgtcctggatcacccccggcctgaaaacaacagcagtgtgccgaggtgtgctgcggggtgtgacttttctgctgaggcgggagggcgaccatgagtttctggaggtgcctgaggcccaggaggatgtggaggccacctttccagtccatcagcctggcaactacagctgcagctaccggaccgatggggaaggcgccctctctgagcccagcgctactgtgaccattgaggagctcgctgcaccaccaccgcctgtgctgatgcaccatggagagtcctcccaggtcctgcaccctggcaacaaggtgaccctcacctgcgtggctcccctgagtggagtggacttccagctacggcgcggggagaaagagctgctggtacccaggagcagcaccagcccagatcgcatcttctttcacctgaacgcggtggccctgggggatggaggtcactacacctgccgctaccggctgcatgacaaccaaaacggctggtccggggacagcgcgccggtcgagctgattctgagcgatgagacgctgcccgcgccggagttctccccggagccggagtccggcagggccttgcggctgcggtgcctggcgcccctggagggcgcgcgcttcgccctggtgcgcgaggacaggggcgggcgccgcgtgcaccgtttccagagccccgctgggaccgaggcgctcttcgagctgcacaacatttccgtggctgactccgccaactacagctgcgtctacgtggacctgaagccgcctttcgggggctccgcgcccagcgagcgcttggagctgcacgtggacggtgagctggcggggcaccagcgagggcgggcgcgggttcagtgcccctcggggcctcctgtctttcccctctttccttgggcgtccgacggcggcgctctgggccttggttcagcccccatcgcctaccccggcggggagcaggcgatcggtggtcgagggtctggggacgcctggaatttcggcttatttcccacggacgcaagcccgtaggtcacgtgtagcgtggtggtcggcagcagggaggctggccccaggttttcttgttcagatccctgcagctctgtggctgccttgttttattactggccatgtcagtcgtcatactggaccccccgccccggccccggtcccgcaggcgcacggctgatgtgtccttctccccatccccgccgtccccagctctgtttgtccctctgatttcctcatcgacgtctccaggactcagagcccagcagagcgtgagggcacaggtctgacctccagatcttgaggtcgtaccctttgctgggagcaccgttttctcttttctttcactttctttcttttctttcctgccttctttcctctttctttctttctctttccttctttctttcttccttccttctttctctcttttctttcttcttttttcttctttctctctctctcatctctgccccccaaccccatctctctccttcattcctcccttttcttctcctttttgttttttttttggataacttacttttattcttgcaggccggagtgcagtggtgcagtctcagctcactgcaactttcgccttctgggttcaggagaattgctttaacccgggaggtggagtttgcagtgagtccaggtcatgccactgcattccagcctgggcaacaagagcaaaactccatctcaaaaaaaaaaaaaagtttaatctttaaattgtacatctatatcctatgactccaaattttatttatcactctccttaaagtctgaagaaaatgattaatttactaagctccaaagacaacacagtcccactgacataacatttagtatgatgtcctactctcctgttagaattaagaacagccagtatcaaactggcctgaaatctgattgggttcctgggctcagaataactgtagtaaatttgtaaatccacactaagacacaaaattaaactaggatgtgtatatctatcttacaagaaaacgtttcacagtaaaaattaacattatgattttaccaaatttcaacattatagtttgttaatccaatcaagctttcaaaattcctgattagcttacaattaattgcaaataacttcatgtagtttggctagcatttcaaaatggatagggaatataacttttaaaatgcgaaagtatattatacatattgcacttttctgctaggctgggctagtatcttccatggcaagatactcaaactattgaataaaatacacatttaaatc

SEQ ID NO: 320 - DNA, 1721 bp, Homo sapiens
aaaaaaatgctacaagatagcatccaaaaagcttttctagacattggcttaggccaagtagtcatgactaatgccccaaaagcaaacgcaaaaatataaaaatagaataagatcaataggacctaatgaaaccgaaaatcttctgcaaggcagaagaaatatcagcagggtaaacacacaacccacagtataggaaacagtagtcacaaactaggcatctgacaaaggactaatgtccagactccaaaggaactgaaagaaatcagcaagaagaaaaggtgccatttaccaccttcctgactcattggccagaaccaatgttagtggaattaacatatgccccaccccaagtgacttctaaagggctaactcaccacaagggagtcagagcagatcttggactgagacctacaggacacaggtactgctttttctcttttatttgttttaaattttatttatgtttttagatcaaatagttcagattgcattggtttttaatctgctgttgttggattaacatatgctttaagcgactcttaaataggtggctcaccaggagaaaggcatagcagaacctggactgagacctacgggagacaggtattgctttttctcttctaatcattttaaatttaatttaccatctttcatcaaatagctccgatcatatcattatttttttcttttctgttttgttggtggttttattggtggagttttattttactattttagaaaagcagtcttttaaaaaagacttttaaaaagttttattactcttttttttaaaaaaattatgttttcccttgatgtgcttatttcctttataaagatcatcaccattaaattactaggagacactgcggctgattttgtcatgcgtgagataagaaattttttgccaaagcaattagtgatgagtgcaatggaaaaatccgtgatgatcttttaagatgattaactttctaatccagaaaatgctgctgtttgtactgaacaaaatagctttatttttatatgaccaggggtacataaaatgcttcaaaacaacacataatttggcaaaaatactatgtcttgccagccagaagaataagtgtggttttatttctatgtatatgtctagtaccatgcctgcactagagttgggaaattttaaaaacatcacctattgatacagaagagaagtgctgggaagggaagggcatggtccctttgaatgatacagaaaaggtgaaggaaagtgatgggtagaggaggccggggtccctggctagggctccaaacctgagcttgtgcccctggacctagatgaggacaggcatttttgttttcctgaccaaatgttgcatttcccaagatcaccctggcccaccatgccctatcctgtgcctaaaaaaaccctgggaccctagcaggcagacacacaggaggttggacgtcgagaggagcacatcagtgcaagaacacatgggtggctgccacttctctccctttcctgagagggaaaaactctcgacgctgagaggaatccaccaacaggcaccagcactctggcaggccaccgaccaatggattgacatagagtttggctggggcagccagaggagagcctgggccgctgaataacccgacttcaggggaaaactattctcccttttggctcccccatctgctgagagctacttccactcaataaaaccttgcactcattctcc

SEQ ID NO: 321 - DNA, 2176 bp, Homo sapiens
gatatcaagggatagagttagggtttctgtgggttttgtttttgctgaggaaaggatgtgcaggtcgatagctattgtttcctttccattcctgtgattctctttacatctgtatatatctatcacaccatgctgactttgtgatgagtcctgttcctcagaaacatcaagctgggttccttttcaaagaaacacacagatcatatttctccatctcattttgttttcacagggagcttttcttatcaacaaagtcgcatgcttttttttttggatataatgtttatcacgtctggagagccataaacagtaaatacagaggatatcaatgcccagaatagttagagtattttgatgaaatcctatttttagataataaatttcaagatgtgtctatagtgtattgtttaaaacaactgaagacatttgagacgtacataaagtagacatttttaatttagggaaacttatatgcccttttttaagaagccattctaataaaataatctgactaattggcccaaaatacaataagtatcactttctaacagagaccaaagggaagctgagaggctttccttttatgtactaccgttggatcgctgcagccgcctctcataacacccaacagaacccggtgaggctctgtgggcttcccgcggccctcagggaggctgcagagtcccctagtccatgtcagggagccgccatcccacatacctccaaagcctgtcctcgcctgcagtttttgcagagctcgcggttggaggtggaaatttagaagccctgtgttgcaggagaggcagtagcacccccaggcagctcttggcagggacagaccaccccccgcctcgctggtattttagggtcttttggtattttgccactgtgtggggctaggcgggtggctggaggacacggtgtaggccttgccgctgtctgggttcctcgccactgcaggagcagggctgtttctggaaacactgggctgctggtggcccgtcaaacttctcccacaaattctgaatccgagaaagtgaaggaaggatggtggggaagtgaggaggcaggagcagaggccacagggaccgaccagagatgcggtggagacagaggagcttccttctcaggctgtttctgggaagcctgagaggcggccagcaccaccctccgctcactctcccctcagcctcttcgcttcccttctcaaccctttctctcctcctcgcctcttccctttcttgctgtcttgttagtccctgtcccaaaactcctggctcctttgttctgctgccgtggcccccacccaggaggaggtctcaggcaccatccccccgacgagggatccacacaacaggttcatgctggggctgggggagccccgctgggttcctgatgccttgtgcacagggagttgctgcagtcatttttggactctcctgaatgtgtccacatgttctgacctcccaccagaaggaacgctggtggccacatctctagagatctatttacttttttgagaccggcttatgagattggctaatttttgtatttttggtagagatggggtctcaccatgttgcccaggctagtctcgaactcctggcctcaagtgatctgcccaccccggcctcccagagtgctgggattacaggcatgagccaccgcgctggcctctagagattcacaccaaacaatatcactcctgcgggaaccgcagacagatcaaaccctggtgagaggaacactttatttcccaactcatcatcctaagccaaggttggagggatgagcattccctaaacaccaaggcgagatcacctggtcccagtgcctcttttcacacaggccctagatttctatctctctgcagtttatgcatcggtaaaaaaaaaaatctctcccagtgtgccccgttagttttcagcattttgtaagcaaaatgaacttaacacatagtaattctaattgaaggtatgtacataaaaagcatgatagaatggcaatattgtatcaatggatgtacatttgtaatatttgtaaaaaaaaaatccaaaaccttaaaatatgaatttacatatgttaatttgcctctaagttctataaattgcacttcagtgatatctaataagtgaatgtttctgttaagtaaataaaaatattcagtaaaattgtt

SEQ ID NO: 322 - DNA, 3113 bp, Homo sapiens
acttatagaagcatcccaagcctcagccggtctgcatctccatcggaaagtgcgcttgccacatcccttcggatcacttcgtcctcccgagagcgttctgccttctacagctcggaaagaaagaaatcttagctgtgaagtgaccgtggagaaagcgcaggaagcgacacaattggttagggaggcagagagtgtgagcgggcgcaccccttgcctggggaccgcgctcgcgggcggggacggagcatcccagtggctgcacccgccgctccgcgctcctgcctggcgtcgccaaccccgcggcggccgctggaattccagagctgccaggcgctcccagccggtctcggcaaacttttccccagcccacgtgctaaccaagcggctcgcttcccgagcccgggatggagcaccgcgcctagggaggccgcgccgcccgagacgtgcgcacggttcgtggcggagagatgctgatcgcgctgaactgaccggtgcggcccgggggtgagtggcgagtctccctctgagtcctccccagcagcgcggccggcgccggctctttgggcgaaccctccagttcctagactttgagaggcgtctctcccccgcccgaccgcccagatgcagtttcgccttttctcctttgccctcatcattctgaactgcatggattacagccactgccaaggcaaccgatggagacgcagtaagcgagctagttatgtatcaaatcccatttgcaagggttgtttgtcttgttcaaaggacaatgggtgtagccgatgtcaacagaagttgttcttcttccttcgaagagaagggatgcgccagtatggagagtgcctgcattcctgcccatccgggtactatggacaccgagccccagatatgaacagatgtgcaagatgcagaatagaaaactgtgattcttgctttagcaaagacttttgtaccaagtgcaaagtaggcttttatttgcatagaggccgttgctttgatgaatgtccagatggttttgcaccattagaagaaaccatggaatgtgtggaaggatgtgaagttggtcattggagcgaatggggaacttgtagcagaaataatcgcacatgtggatttaaatggggtctggaaaccagaacacggcaaattgttaaaaagccagtgaaagacacaataccgtgtccaaccattgctgaatccaggagatgcaagatgacaatgaggcattgtccaggagggaagagaacaccaaaggcgaaggagaagaggaacaagaaaaagaaaaggaagctgatagaaagggcccaggagcaacacagcgtcttcctagctacagacagagctaaccaataaaacaagagatccggtagatttttaggggtttttgtttttgcaaatgtgcacaaagctactctccactcctgcacactggtgtgcagcctttgtgctgctctgcccagtatctgttcccagtaacatggtgaaaggaagcaccaccagcatggcccctgtgttatttatgctttgatttgaatctggagactgtgaaggcaggagtaagtgcacagcccgtgacttggctcagtgtgtgctgagagaatccgtccccggcaccatggacatgctagaggtgtgaggctgcagaacaccgctggaggacggacttgtgcctatttatgtgaaagaagatgcttggcaggcaatgcgctactcactcgtgacctttatttctcacattgtgcattttcaaggatatgtttgtgtggatatctgcttagtgttaccacatggtattctcagcatgttaccttcacactgttgtgcgatgaaactgcttttagctgaggatatgctctggaaattcctgctcagtttcactgcagccctaatatgtacatatactgcaggagctacatataaagctcttatttactgtatatttatgctttcttgtgggtaacaagtcatacctgattaatatgatgccactttgtttctagtggttcctaacccattgtctgataaatgacttttctagtttggggaattgacacttgttttgttgcctcttgaaactttttttttttcccctcattgtgggcttatttctcattgtaagggtaggataaactagtttttgtatatagagtcaaatgaccagtgtcaaagagtttgcatattgggtagactttctccactccacatgtcccacacatatagataaagcagcaggcggcatctggcaatcagaagcccaaactgcctttgagtctaagatgtgatgactttgatgaaacacaactgaaaacatgagggactatatccagtcacttgtagccagtttcacaggccagctacagaattgtccaaacaaacattatttctgactgcaatttttttcccccaaatttaaagcaatccctggctttaaatgacaaggcacctaccaatgttcttgggtcactgaagaagctactaccatgagcctgtgcatagaattttaggagataaaaggatgaatttctgtgactgccagtcagatcttaacaggtttctgttgagccagaatctgtttcagatccaagatggagaggaacactatggaaacttcccaggtgactttcagagcagttgtttcaaacacatcattgtccttttaggggaaccagtttttagaaggttgtgaattggctttttcacaaagcatgattatcttcctggctgatccaggagaaaattagaacagaaaaataatggttgtggattttgaaacaaagcaaggtaaagccttttttttttttcaccttgcattggcaaaactacctcttcagtgtttttaacttttgattcaaaagcatcttaccaataaggataaatatcatatacatcgttatgaaaatattgctatgagataataagccacatatgaatgttgtatacaactttagggtttacatttaatcctgaagtgttacctcctttcatgtctatttacactattttcccatttactaagtggggagggggtctccttatatagtgcttcatcgttaataagtcaatacctgttgttcctgggatgttcttttttgtgcattaaaaacttcaaaatt

SEQ ID NO: 323 - DNA, 2723 bp, Homo sapiens
aatgacagctggcaccaaagcccagagctggcagcctccacctgaggagtggcatctccatgaacggcttgtgttctcgcacagccccattgcgtagatgaggaaactgaagctcagagaggttcctgcccttgcccaaggccacacagccggatgagctagaaaggtgctaggggactgggaggtgggggagctgagacgctgtcccgctgctgccaggatgcggccgccccccgtgccagccaggcctgcctcctccctctgtccggctcagcagccccggcctcctgttgctcccagtccgagctatggccaagggagactgattcctgctcaccctgggagagagctcaggattttgtctcaaaaccttataaaagatacgaggctcgacattttactaaggccaaggactcttgatctcccagacagatcctagaaccacagggcacatgtgaccagaatccaatctgtgcaaatcaatcagcaaaaggagcccccagcaaaggcgcaggccggggcctccggggaccggcacctacacagcgcacagccccccagggtccgagtcctccaaacccgtgtaggcaggagcctccttaccttgatttgcttgatgtttgctaatcttctcttgaacaccccacagcgtgaaggtaagcaactgttccctaaacgacttagatccttaaaatatgtgtggttgggccgcatatctcatgagagagcctccgcccaaaccagagccctcctctctctgcggccaacaccctggtagacctgggggagcagcctctcccgcccccaccccctcagcgtggtgctggcccgtggctcctgaaccactcaccagtccagtccggggcctgggcccttccccggggccctggtggcagctcccagtggctcaagcagcgtgcccagcaccgcgggtggaggttgagctccgtggtcttctcttgcagggggccgaaggccagagaccaggatttggctacggaggcagagcgtccgactataaatcggctcacaagggattcaagggagtcgatgcccagggcacgctttccaaaatttttaagctgggaggaagagatagtcgctctggatcacccatggctagacgctgaaaacccacctggttccggaatcctgtcctcagcttcttaatataaccgccttaaaactttaatcccacttgcccctgttacctaattagagcagatgacccctcccctaatgcctgcggagttgtgcacgtagtagggtcaggccacggcagcctaccggcaatttccggccaacagttaaatgagaacatgaaaacagaaaacggttaaaactgtccctttctgtgtgaagatcacgttccttcccccgcaatgtgcccccagacgcacgtgggtcttcagggggccaggtgcacagacgtccctccacgttcacccctccacccttggactttcttttcgccgtggctgcggcacccttgcgcttttgctggtcactgccatggaggcacacagctgcagagacagagaggacgtgggcggcagagaggactgttgacatccaagcttcctttgtttttttttcctgtccttctctcacctcctaaagtagacttcatttttcctaacaggattagacagtcaaggagtggcttactacatgtgggagcttttggtatgtgacatgcgggctgggcagctgttagagtccaacgtggggcagcacagagagggggccacctccccaggccgtggctgcccacacaccccaattagctgaattcgcgtgtggcagagggaggaaaaggaggcaaacgtgggctgggcaatggcctcacataggaaacagggtcttcctggagatttggtgatggagatgtcaagcaggtggcctctggacgtcaccgttgccctgcatggtggccccagagcagcctctatgaacaacctcgtttccaaaccacagcccacagccggagagtccaggaagacttgcgcactcagagcagaagggtaggagtcctctagacagcctcgcagccgcgccagtcgcccatagacactggctgtgaccgggcgtgctggcagcggcagtgcacagtggccagcactaaccctccctgagaagataaccggctcattcacttcctcccagaagacgcgtggtagcgagtaggcacaggcgtgcacctgctcccgaattactcaccgagacacacgggctgagcagacggccccgtggatggagacaaagagctcttctgaccatatccttcctaacacccgctggcatctcctttcgcgcctccctcactaacctactgacccaccttttgattttagcgcacctgtgattgataggccttccaaagagtcccacgctggcatcgccctccccgaggacggagatgaggagtagtcagcgtgatgccaaaacgcgtcttcctaatccaattctaattctgaatgtttcgtgtgggcttaataccatgtctattaatatatagcctcgatgatgagagggttacaaagaacaaaactccagacacaaacctccaaatttttcagcagaagcactctgcgtcgctgagctgaggtcggctctgcgatccatacgtggccgcacccacacagcacgtgctgtgacgatggctgaacggaaagtgtacactgttcctgaatattgaaataaaacaataaacttttaatggt

SEQ ID NO: 324 - DNA, 2587 bp, Homo sapiens
catatccatgtggtaggattgtcccggccccaaagtatggccctggtcaggggagcccctgctggaaattgcatctccagagctttgatgcaggacccctgggggatcagggaatgagggtctccaccccaggggtctccttgcagtgagtctatatgcaggcctgcgttctgctcctggggctggttctgagtgcccagcttcagtctcctgagaacatgaggatgggagggggcagagtcttgctgagggcacacccagttcccgctggaggaggacagtgccagtcttctgcaaagggaccttgggtgggaacgggcccggagcgggaggaacgtgactccccagagggaagatgggcatcatactgggcccagagctgggaaggagttgctgccagcacagggtgggcctggactcccctcgcccctacccccagtggttgtggctgtagccctaagcctggagagcaggaccggcccggggtgtctgggaggctgccaggtgcctcccagagctcccaagggcccccacctgcaagtgccagcctcagggcagtgcccaaatgaggccctctcagctgcagccagcgatgccttgggatgctcaccgggagggaggcggctttgggctcctaagtccttgggagaggctgggagcagtcactgcgcggcttgcgcaagcccattgtcgggttgggtggcttcctcagccagggctgggagggactccaggatcaggtcctccctgtctcgagtctcagtggggtgatggggaggagacctggccacccatggctcaggggcagctgagaacaaggacctgctggagctggaagtgctgtggtgttgaggggtggggtgggcagcttctcacacctgcctcctgcctccttctgtccacctttccaccaccctgacctgtcccagccccacacatggttctgcctggctggcctgcccttggcacctggcgtagagcacacagaaggcactcagctaatgctgggcaggcccactcatggggagtgcgtggctgtgcagcaccagggaaccggcacagcagcgccggcagaaatcacagcagtaaacttgtccgggttgtatgcatcaaggtggcgatggacgtgggtccccccactgcactgtggccctgagcactgtatagcagcccggcaatgggagccattatcttgcccctttgacagaggaggacacagaggcacagggaggtgaagtagctgccccacactagtgcctcctcgctcactcaccaccccctgcaccacagtgcagccgcttctcccaccagctggggttccttggacccccaagcctgggaagggggaggtgagtttacaaaatggaaagcttaaaaggagaaaagtggaaccagaggtttgagaagccctgagtggtagagtaaggcctccagcgctgcctctgggtgcagggcagagtggcagaggagagggggagaggcactgggcaccatgggggcccagttcccacttcggggatctctctcgcagaaccgagggtccccttcatgggggtagatgcccagggctagctgttgccactgtctgtgtggacctgagtcctggacatgcccgagtgactcaggagtggctgcttgggcgggctctgtcaccctaggatgttatacattctgggaactggacaggagtggctgcttgggcgggctctggcaccctgggatgttatacattctgggagctggacaggagtggctgcttgggtgggctctggcaccctgggatgttatacattctgggaactgcaatcagccactagagaagtcggagctacaggaagtgaccctggggtgggacctggggacatggccaggtcagcatggggacacccggctccagcaggagctctggtctgtcctggggtctttgggggcagggctgcggccctgggcaggcttcctccaggcggaggtcctggggaagtgggggagccaggccagctgccgcctcccccactatgtagcatctgattcgtcatctctcatgaaggcgatttggttcataactctgaaactctgaaaaaggtcaaaagaagcagagaggccctcggtggatatgccagcttttctgccggtgctttctcccactactctgggtggtctgctctcctcttcaaacctcagctcgcagggagggcctgaatctgccagcccctcaggatctccttccctctgggccctccccagccttaaggagcctcccagacagaagggtggacagagccacctgggcagcccgagagacacacgggggtcctccctgtggacagccctgccagcttccgcccagccctgagcttcatttgcatcttgaggagtaaggggtggtgaaatgggaatgctggtctggctcagctggtcgtgggcataagtgcccgctgaatggatggcatctctccctcctgtcttatgttctggggtccaggtgcttcccagggccatgcccctgctgctaatgcttgccctaacccttaccctaaccagcgtccagcgtcgtctcaccgagccgtaaataaatcaacagattcgc

SEQ ID NO: 325 - DNA, 2494 bp, Homo sapiens
acttgagagagagaattgtgtctcccctatgaagatggattgcttgagacagagttcaatagaagatgttaaacagataagctgagggcagggggactgagctttggaagagggcctttcaggcagcgaggccgctggcctgtggctccctctgatgagcttcttctaaagatggtaagggctgggggaagagcttggcagcaggggctgcactctctctcagctgtgtctatcttggccaagggttttatgttcctattggtaggggattcgagagcagagagcgtcaccaatacactcgtgttgttcaccataggagaagagtccctgaccatttttgtggacaagcagaaactgggaagaaagacagagacaacaggaggtgcctctataatcgggggcagtgggaacagcacagctgtgtccctggagaccctgcaccagctggccgcctcctacttcatcgacagagagagcacgctgcgacggctgcaccatatccagatagccacgggggccatcaaggtcaccgagaccaggaccggtcctctgggctgcagcaactatgacaatctggactcagtcagttctgtcttggtacagagtccagagaacaaagtacagttacttggccttcaggtgctgctgcctgagtatctgcgtgagcgctttgtagctgcagcactcagctacatcacatgcagctctgagggtgagctcgtctgcaaggagaatgactgctggtgcaagtgcagccccaccttccctgaatgcaactgccctgatgctgacatccaggccatggaggacagcctgctgcagatccaggactcctgggccactcacaaccggcagtttgaagagtcagaagagttccaggccctgctgaaaaggctgcccgatgaccggttcctgaactccacagctatctcccagttctgggccatggacaccagccttcagcaccgctaccagcagctgggagctggcttgaaagtgctgttcaaaaagacccatcggatcctacgccggctcttcaacctctgcaagcgctgccatcgccagcctcgcttccgcctgcccaaggagaggtccttgtcctactggtggaaccgaatccagtccctcctctactgtggggaaagcacctttcctggcactttcctggaacagagccacagctgcacctgcccctatgaccaatcttcctgccagggccccatcccatgtgccttgggcgaagggcccgcgtgtgcccactgtgctccagacaatagcacacgctgtgggagctgcaacccgggctatgtgctggcccaggggctgtgccggccagaggtggccgagtccctggaaaactttcttgggctggagacagacttgcaggacctggagctaaagtacctgctgcagaagcaggatagccgcattgaggtacactccatcttcatcagcaatgacatgcggctgggcagctggtttgacccttcctggaggaagcgcatgctgctcaccctgaagagcaacaagtacaagcctgggctggtgcacgtgatgttggccttgtccttgcagatctgtctcaccaagaacagcaccctggagcctgtcatggccatctacgtcaacccctttgggggcagccactctgagagctggttcatgcctgtgaatgagggcagctttcctgactgggaaaggactaacgtggatgcagctgcccagtgccaaaactggactatcaccttggggaataggtggaagactttctttgagacagttcatgtttacctacggagccgaatcaagtccctggatgacagctccaatgagacaatctactatgagcccctggagatgactgatccctctaagaatttgggttacatgaaaattaacaccttgcaggtctttggctacagcctgccctttgacccagatgctatccgggacttaattctccagttggactacccatatactcaaggttcccaggactctgcactcttgcagctcattgagctcagggaccgggtgaaccagctttctccacctggcaaagtccgacttgaccttttctcctgcttgctccggcatcggcttaagctggccaacaatgaggtgggcaggatccagtcctccctgagggctttcaattctaagctgccaaaccctgtggaatatgagaccggcaagctctgtagctaatgggcggcccacttcagcactgggcaaggaggggatccatgaatctggggtacaaagataatctaagccctcaccttagtgccaacagggtgtgctcccacgagactttcagcatccagtagatgggacctcgaggctcgagctgaagcaggcgagagagaaacagctactgcgtgcgtgcgcgcacgcatacacacacacacacacacactggcacagggaggctacaactaagcagcctcagatctgtaaagttgattggtgctttctaaaatgaatgcaattg

SEQ ID NO: 326 - DNA, 2029 bp, Homo sapiens
ggatgttgtgaaccgggtcgcggcggccgaggctcgggcctccaggaccactggctgcccatgagagacgaaggatggcatccaagggggccggcgtgtctttctcccgcaagagctgtaggctgacctcagatgctgagaaatccagggtcacagggacccgctgcagctgggaggggagctgtccaggaggccggcctgggaatgagcacaggcctgcggctggcagagagccgggtcgagccagccctggagaagcaggcccagctggaggagcagctgcgggacaaggtgctccacgagaaggacctgtcccagcagcagatgcaaagcgacctggacaaggctgacctcagtgccaggagggtccctggtgggtgctgcatgaggcaggcgtcactgcagaagagtgacagagctgggcctggcagtgaagcgtctacagaagcagaatctggagaaggatcaggtcgacaaggacctcaccgagaagcttgaggccctggaatccctgcggctacaggagcaggcggccctggagacagaggatggagaggggctacagcggagcctaagggacctggcacaggccgtcctgtctgacgctgagagcggcagcctgcgtccaacagcgtccgaccgcagcctgcgggggctctcgggccagcggaccccgtctccaccgcggcgctcctcgccgggccgaggccgttcgccccgcagaggcccctccccggcctgctcagacgactccacgctcgcttgccctgattctctccgccctgcacttttgccagctgaaggtccaggtaggaaggggcttgagttttctgggcgcagccagaggcccagggggaggggctcgcgccctccaggtgggggtgggggcgtgtctgggggaggagtctgagcgccctggggtgcagccagagccctgagaaatagtgtctgagggtgtcaggacccccaaggaggtggtcgagggctctgcgctgaagccagcccagaagtgggggtgcttgggcagctgggggtgggtgcttgggcagccggtggagggaggaggctgcggcagtgttagggtcctggtagagagggagacaggtccctggtcatacagagccaggaccctgggaaaaggtctagcaagggaaatcacagcctaggatgagagcttgggaactaggggcagagccagggtagggaggagtgtgagagtggaaccaggatgcaagggggaggagcctgggagccctgggggtgggatcagaacccaggagacgagtgtgcctgggagtttgtctggcatcccgggggctttgataggagttgtccgggaccccagggagatgagggttcagagggtggtgagggcacataggaggggagtggaagcctggctctcaggcctaggcccctatcctgccccagggcaggtccaggccctggaccccgcctagcgtaggctagtgtgtatccctggaaccagaagagagtaggtgggctctggaggcctcaaaggacccccgctagactctgtgatccccacgccccagaacatgcgtgggcgctatgaggcaagccaggacctgctgggcaccctgcggaagcagcttagcgacagcgagagtgagcggcgggccctagaggaacacctgcgtggcgccgtcggtcttgtcccgcaggcactggccaacatggcgaaaccccgtctctactaaaaatttaaaaaattgcccaggcacagtggctaacgcctgtaatcccagcactttgggaggccgaggcgtgcagatcacttgaggtcaggaatttgagaccagcctggccaacatggtgaaaccccacttctaaataaaaatgcaaaaattagctgggcgtggtgataggcgcttgtaatcccagctactcgggaggctgaggcaggagaatcgcttgaactctggaggtggagattgcagcaagctgtgtggagtgcagtgagattgtgtcactgcactccagcctaggcaagagtgagactgtgtgt

SEQ ID NO: 327 - DNA, 2817 bp, Homo sapiens
atttttttaaagtcctactaccctgcagctcactactttaccttgatttggaagatcatggaatatctatttgaatcctggatgtatttttctcacagtcttcttgcttcctgaaatttcctctggtgttgagggaaagctgagagaatgaaggctctaaatccccagtggaagcatgatatggcgaagcagagctggtgctgaattgttctctctgatggctctatgggagtggatagcactgagtcttcattgctgggttttagcggttgctgctgtttcggatcagcatgccacaagccccttcgactggctcctctctgataagggacccttccatcgctcacaggaatacacagattttgtggacagaagccggcagggatttagcacaagatacaagatatacagggagtttggccgctggaaagtaaataaccttgcagttgagagaagaaatttccttggctctcctctgcctcttgcccctgaattcttccgcaacataagacttttgggacgtcgacctacccttcagcaaatcacagaaaaccttatcaagaaatatgggacacatttcttgctatctgctactctgggaggagaggagtcactcacaatttttgtggacaagcggaagttgagcaaacgagctgaaggaagtgattccaccaccaatagctcttcggtcactctggagacgctacatcagctagccgcttcttatttcattgacagggacagcacccttcggagacttcaccacattcaaattgcatccactgccataaaggtaacagaaacacggactggtcctcttggctgcagtaactatgacaacctagattctgtcagttctgttctggttcagagtcctgagaataagattcagttgcaagggcttcaagtacttctcccagactatcttcaggaacgttttgtacaagcagctttgagctacattgcttgcaattcagagggagagtttatctgcaaggaaaatgactgctggtgtcactgtggtcccaaatttccagaatgcaactgcccctccatggacattcaagccatggaagagaatcttcttcgaataactgaaacctggaaagcttacaacagtgactttgaggaatcagatgaattcaagttatttatgaaaaggctacctatgaattatttcctcaacacatctactataatgcatttgtggacaatggattctaattttcagcgccgttatgaacaactggagaacagcatgaaacaacttttcctaaaggcgcagaaaattgtacacaagctttttagccttagcaagaggtgtcataaacaacccctcatcagcctgccaagacaaagaacctcaacctactggcttactcgcatccagtcttttctctactgcaatgagaacggcctcctaggcagcttttcagaagagacgcactcgtgcacgtgtccgaatgaccaggtggtctgcaccgcgttcctgccctgcacagtgggagacgcctctgcctgcctgacatgcgcaccagacaaccgcacccgctgcggcacctgcaacaccggctacatgctcagccaggggctctgcaagcctgaagtcgccgagtccaccgatcactatattggctttgaaactgacctgcaagatctcgagatgaaatatctgctgcagaaaacggacagacgaatagaagtccatgccatttttatcagcaatgacatgcgcctcaatagctggtttgatccctcctggcgtaagcggatgctcctcaccttgaagagcaataagtacaagtcaagtctggtccatatgattttgggtctctctttacagatttgcttaactaaaaacagcaccttggagccagtgttggctgtttatgtcaatcccttcggaggcagccactctgagagctggtttatgcctgtgaatgaaaacagctttccagactgggagcggactaagttggacctacccctgcagtgttataactggacattaactctggggaacaaatggaagacattttttgagacagtacacatctacctgagaagtcgcatcaagtccaatggtcccaatggtaatgagagcatttactatgaacctctggagtttattgacccttcccggaacctgggctatatgaaaatcaataacattcaagtgtttggctacagcatgcactttgaccctgaagcaattcgggacctgattttgcagctggactacccctatactcagggatcccaggattcagcacttttgcaactactagagatcagagaccgtgtaaataaactctccccacctggtcagcgtcgtctagatcttttctcttgcttgcttcgtcatagactcaagctgtctactagtgaggtggtgaggatccaatctgctctgcaggcgtttaatgccaaattgccaaacacaatggattatgacacgaccaaattatgtagttaaccataaatgtcaagcacaacccaaaatcttgaaggagtttttacagtgcttttgtggaacagtttatgtttggaagagtaaatttaaattgtcttttcaatatctgtcttatatcagtcaataacattggatggcaatttacacacatgaacttgctgacaatgaatatattatacagcagttttggtttatgaatgacataaatactgacaccagtctagaagacattctactttttacaataaatttcatttgtaattttatatgttccgtggcaatgcttttgtgcattacatcctctagagggaacataaaaagataccaataaaattttgtagctg

SEQ ID NO: 328 - DNA, 2296 bp, Homo sapiens
ctcaaaagcagcgttaggggcaggcagcctggttccaaggtcacagccctgtgaggaccatgcgccgtggctgttttacgggggtgctcacacagggctagcccgtgccagacactgtgccaagcacttgccatgtacgggctctctttttcctcacagattcccccgaggcgagcgctattggtaacccatcttccagatatggaaaccaaggctgaggggaagggactggcccaagatgcacagctcatgaggagcagagctacagtgtttgaaagcaaaagcccttcagctccgacctctcagaacggggcctcccatcagacccccagcttccacagggtgcccggtgggcctcactctgagagtagcgggacctcattttcctctttcccacccaaccaggaaggaagggcaggggtgtctgtgcaccatggggccggcaggaaaggctgggcctgcagccgccccccacttccctcaacaccctcgccttcctgccatcctgcccgccttgttccagacccctcagccctggtctggccactgctttgatggccgggagtgttgagctgcaggaaattggaggccccctcccaggcccatccacccaccaagagccactcaggggactgcccgtgggactgtgtccctgtcttcctctctggatggagaaggcgcacatcgtgccacccgtgggggccaactgcagagcccagcaggggtgcatggggcctgcctccatgcccctcctcctcactcacatcctcagtgcccccaccccagtccatccgctggtctctctgtcttatctctctctctcctgcccccacccatctctgttcctatctgtcttgctcctcccgttcactctctttgtctctccttctctcagtgtcttgcccccttccctttccactcttcatctgtctctctgtgtctctatctctgtctctctctctgtctccctccctatccctcacccccactccctctccagcccctcctctcttccttcctgtctcccgctcatctggttcatcttgctgcatcctgcagctccccccactgagccgtgaggataatgctcagtgttgtcttagaccagcctgtggtgatgatcctgggcacttgggacacaagctccctgccaagctgagcagtggggtttaggagctctctaggtgaagggtattcgggtctgagtatcctcacatcaactggaggtgagaagtgctgtgtggtcttgtgcaaggcactcaccctctctgagcctcagtttcctcaactgtaaaatgaggacaatcgtagcagaacacctgcccctgggagggtgtgagatggagaatataacataacaggtgtcaagcacaacaaggctcttagcaaacaccagtttctccccgccttgtggcagtgaaccatgacccctgaagcccatgttagagccaggagttggggtggggggcattgcaactaaagaccagggctccacctcctgtcctgagccccaatgtggctagcagagccaccagacggtgagagtgaatcctgtgcccagcactgccctaccagatcttacaccatccttgcagccagctgactaggctgtggtcagcaaacccatttcacagatggggaaactgaggggcattagcaaggtaaggattgaaacccagatctggctccacatcttatgatttctcccttctacccattagctgggagcaccatcaggccaggatggctcatggtggcagcccctatacccctggctgggcagaggaggtgctgacaattactggctgaatgaatgaataaaggaaggaacaaaccacaccttccctggccttactaagatgcaatgaggtgttcttccagagggaattttggagggaaccaaggggagatgaaaggtactcaggagtggggattaggtgggacccagcaataactaacttggaatgaactaacccagaatagccagacctagttggttattcacactgcaatttgggcctttttcagtttttgttcaagtctgattatatcaaggaaaaggtcttggtttgaggctaacatgtctttaatgactgtaacatttgtcactgtctctttttaatagagagaaggtctcaaactcagggctgttgacatcagcgtgctagaatgtactgatagcgctttgttttctttgtacttgccgttactttctggttttggcaagtgctactggttttccatgtacagtaatgatgtaaagcttccttgataaatgcattgattgaagtccttt

SEQ ID NO: 329 - DNA, 1755 bp, Homo sapiens
agcagactgcgctcccaaaggcgtttgcgaccggtaatcgagggactctacagactctcctaggagcagctcctacaggaatgaattcagggcatggacggacatcaagcctgtgaaaccaataaaggccaagccccagtacaagcccccagatgataagatggttcatgagaccagctacagtgctcagttcaaaggagaggccagcaagccaacaacagctgacaataaggtcattgatcgcagaagaatacgcagcctctacagcgaacccttcaaggaacccccaaaggtggaaaaacctagtgttcagagttccaaaccaaaaaagacctcagcgagccataagcccacgaggaaggccaaagacaagcaggcggtgtcaggccaggctgccaagaaaaagagcgcggagggcccgagtaccaccaagccagacgacaaggagcaaagcaaagagatgaacaataaactggctgaggcgaaagagagcctggctcaacccgtcagtgattcaagtaagactcaaggtcctgtagccacagagccagacaaggatcaaggttctgtggtcccaggccttctgaaaggtcaaggtcctatggtgcaagagcctctgaagaagcaaggttctgtggtcccagggcctccaaaggatctaggtcccatgatcccattaccagtcaaggatcaagatcacacggtccctgagcctttaaagaatgaaagccctgttatctcagcaccagtcaaggaccaaggtccctcggtcccagttcctccaaagaatcaaagtcctatggttccagcaaaagttaaggatcaaggctctgtggtaccagagtctctaaaggatcaaggtcctaggattcctgagcctgtgaagaatcaagctcctatggtcccagcacctgtcaaggatgaaggtcccatggtctcagcatctgtcaaggatcaaggtcccatggtctcagcacctgtcaaggatcaaggtcccatagtcccagcacctgtcaagggtgaaggtcccatagtcccagcacctgtcaaggatgaaggtcccatggtctcagcacctatcaaggatcaagatcccatggtcccagagcatccgaaggatgaaagtgccatggccacagcacccataaagaatcaaggttccatggtctctgagcctgtaaagaatcaaggtttagtggtctcagggccagtcaaggatcaagatgttgtagtcccagagcatgcaaaggttcacgattctgcagttgtggcacctgtaaagaatcaaggtcctgtggtccccgagtccgtgaagaatcaagaccccattctcccagtactagttaaggatcaaggccccacagtcctacagcctccaaagaatcaaggtcgtatagtccctgaacctctgaagaatcaagttcctatagtcccagtgcctctgaaggatcaagatcctctggtgccagtaccagcaaaggaccaaggtcctgcagtccctgaacctctgaagactcaaggtcccagggaccctcagctacctactgtctcacctctaccccgagtcatgatcccaactgccccccatacggaatacattgagagctccccttgacactcaccccttgacacaccaatgaaggagctgacagtgagagtgctcccctcccaggggcagtgaagacacatatttaatctgcatgaaacatgtacagtagtcttgctggaatctaataaaaatggtccctctggctc

SEQ ID NO: 330 - DNA, 2261 bp, Homo sapiens
atcatgctaattgtctgcactagagctggagaacgccacccaaaatgaagagagaaaggggagccctgtccagagcctccagggccctgcgccttgctccttttgtctaccttcttctgatccagacagaccccctggagggggtgaacatcaccagccccgtgcgcctgatccatggcaccgtggggaagtcggctctgctttctgtgcagtacagcagtaccagcagcgacaggcctgtagtgaagtggcagctgaagcgggacaagccagtgaccgtggtgcagtccattggcacagaggtcatcggcaccctgcggcctgactctcgagaccgtatccgactctttgaaaatggctccctgcttctcagcgacctgcagctggccgatgagggcacctatgaggtcgagatctccatcaccgacgacaccttcactggggagaagaccatcaaccttactgtagatgtgcccatttcgaggccacaggtgttggtggcttcaaccactgtgctggagctcagcgaggccttcaccttgaactgctcacatgagaatggcaccaagcccagctacacctggctgaaggatggcaagcccctcctcaatgactcgagaatgctcctgtcccccgaccaaaaggtgctcaccatcacccgcgtgctcatggaggatgacgacctgtacagctgcgtggtggagaaccccatcagccagggccgcagcctgcctgtcaagatcaccgtatacagaagaagctccctttacatcatcttgtctacaggaggcatcttcctccttgtgaccttggtgacagtctgtgcctgctggaaaccctccaaaaggaaacagaagaagctagaaaagcaaaactccctggaatacatggatcagaatgatgaccgcctgaaaccagaaggtgagctcccagctacccaatcacccatcccatcaacaatcagatcagtgggctgctgggaaaaggcagaactgggcgacaaggaaaacagctctgcagggacccttccctctgacctgggcgctagcaagggcaaagaacccgagcctgccagcttggcctcctcccacagcctccctcggaggcatgccatgccaagcactctttctgtctctgttcatgaataaaagagatggatgggcttattcttatagagaagtgaatttcacttactcccctggcccgaaaactagaccaaatgaggaactgttttagctcatcaaactcatatattcctcctggcttccttacaaaacaagcctttcaaacaatcattgtcctcaggaaagttgttgagcttcctccagctgtgagaataagtcctaatctccagagaaatggtggggggaggaggaggcttattgcttcccagcatttggggggaacatgatccaacccctggcctcctgccacccatctgccctgctcccacatgctcaggtcccagggcacagaaaaagggcagactccctaatcacactaacatcaaaataaagaggctgggccgctgtgtagccaggacatgcccatgccaccgcctattgaacagttcataggagtggcagtaatctactgtgtgaggagagagggcaattaaaaagctgaaagagaaggaggccctctgtgtattccgttccctcctccttaatgcctccaagggtccttgcatccctagtctcctaaactccagctctgattcgccatcaacccatggagcaattccaaggccccagttacccatcacctccacaccaggtcaagttttgtctcagccccaaaggcactgacatttctagtttgccccctctgccctgaaccccacagcatgcctgtctcagctccctgtccctcggcacttccccaggctcatttgagcaggtgtgccttcgcagctcccctaaacttcccaggtgcctcatccataatgagataatgcatgtaggggaaaagtttctcaagaaggtggaagaggcagcaggacttggataaggagtacctgctggtcagccttgagatgcacaggtgaaggttagggtgagatgagaacatgccataccctggtgctgaatccctgaggggccagcttgccaggcttaagccaaatctgccttaaattgggggtggggaggggtaagtaaggaagtggggtttgtttttgtgttgttttcatcttcatctttgtattactagcatccagcagagtgcctagcacatactggatgctcaataaacttttgatg

SEQ ID NO: 331 - DNA, 2371 bp, Homo sapiens
attttgagtcaggagcctggactgacccgggtccctccacagcactggagggggtgggacacatcactacagggtttccttccatgaggactctgaggagttgacagtggaggcaaggagtgagctggatcccaagtgatggtggtttcctcggagggcgagctgagtcctgcgcgactggttagcacggtggagctggtagccacgcctgctggctggcgtgcgtgaacaggtgtggaccgcaggatctcagcactctgacccaaggggaagcatgtcgaagaaaggccggagcaagggcgagaagcccgagatggagacggacgcggtgcagatggccaacgaggagctgcgggccaagctgaccagcattcagatcgagttccagcaggaaaaaagcaaggtgggcaaactgcgcgagcggctgcaggaggcgaagctggagcgcgagcaggagcagcgacggcacacggcctacatttcggagctcaaggccaagctgcatgaggagaagaccaaggagctgcaggcgctgcgcgaggggctcatccggcagcacgagcaggaggcggcgcgcaccgccaagatcaaggagggcgagctgcagcggctgcaggccacgctgaacgtgctgcgcgacggcgcggccgacaaggtcaagacggcgctgctgaccgaggcgcgcgaggaggcgcgcagggccttcgatggagagcgcctgcggctgcagcaggagatcctggagctcaaggcagcgcgcaagcaggcagaggaggcgctcagtaactgcatgcaggctgacaagaccaaggcagccgacctgcgtgccgcctaccaggcgcaccaagacgaggtgcaccgcatcaagcgcgagtgcgagcgcgacatccgcaggctgatggatgagatcaaagggaaagaccgtgtgattctggcctcggagaaggaacttggcgtgcaggctgggcagacccagaagctgcttctgcagaaagaggctttggatgagcagctggttcaggtcaaggaggccgagcggcaccacagtagtccaaagagagagctcccgcccgggatcggggacatggtggagctcatgggcgtccaggatcaacatatggacgagcgagatgtgaggcgatttcaactaaaaattgctgaactgaattcagtgatacggaagctggaagacagaaatacgctgttggcagatgagaggaatgaactgctgaaacgctcacgagagaccgaggttcagctgaagcccctggtggagaagaacaagcggatgaacaagaagaatgaggatctgttgcagagtatccagaggatggaggagaaaatcaagaacctcacacgggaaaacgcggaaatgaaagaaaagctgtcagcgcaggcgtctctgaagcggcatacctccttgaatgacctcagcctgacgagggatgagcaggagatcgagttcctgaggctgcaggtgctggagcagcagcacgtcattgacgacctctcactggagagagaacggctgttgcgctccaaaaggcatcgagggaaaagtctgaaaccgcccaagaagcatgttgtggagacattttttggatttgatgaggagtctgtggactcagaaacgttgtccgaaacatcctacaacacagacaggacagacaggaccccagccacgcccgaagaagacttggacgatgccacagcccgagaggaggctgacctgcgcttctgccagctgacccgggagtaccaggccctgcaacgcgcctacgccctgctccaggagcaggtgggaggcacgctggacgctgagagggaggcccggactcgggagcagctacaagctgatctgctgaggtgtcaggccaaaatcgaagatttggagaagttactggttgagaagggacaggattccaagtgggttgaagagaagcagctgctcatcagaacaaaccaagacttgctggaaaagatttacagactggaaatggaagagaaccagctgaagaatgaaatgcaagacgccaaggatcagaacgagctgttagaattcagagtgctagaactcgaagtaagagactctatctgttgtaaactctcaaacggagcagacattctctttgaacccaaactgaaattcatgtaaagctctcagatgttttcaagcatgtgtaaaggggacatgttatagtttctttctttctttctttctttctttttttaaatctgtatgttcagaataatttcactgccttaatgtgttctggagagcgtgctcacccaagtctatggacatgtaccagagctaatatatttattgcctatggcttgttttgcacttaataaaataatttgtttttgc

SEQ ID NO: 332 - DNA, 3119 bp, Homo sapiens
ctttttttttaatgacagctcccatgccatgtaaaacttgtgttaaagacatttgcctgcttttctcctgttgacctatcttaaatttcaatttaattttcaagcccatctgacaagaagccctaaatgggatccccactcccctacccacatatgaaactcagtgaattatgtaaatagattatttgacctcttaactctaaaattttacatgttaagttggcccctcaaaagtttttaaacgctattcttttaatttgaaaaatggggccggtcccttctatttgggtatgacatgtagtagatattgcagggcccacccagatcccctcaccaggagctgccggagcattagctgcagacagctcagagctgagtccctctctgggaatgtcgctggccaaaggaaagtggctctcaacgttaggcaccctccctgcagcaggctgcacccagtaacggtaggcggcggcgaaacagtttataaaggctcagccccattgccttgatcaggtcaactctgaaaagccagctcagcatcagggcctcccttgggattcctgggggctgatgtcacaactcacaacagatcaccaccttctacaagctctgcagaacattgctgccatcagcctggccatcaactacccaaacaaggccacccgcctctggaatgtggagtgttagcccttggtggggcgtgcatgggactagttcatctgccacagggattttagagcagacatctaacctcattcaggaaaactcctgtagcgccagtgcccagctctccttgagctgaccactccagttaggatgccaagcagccacgtctccaagagctcccgtgcgtaggctggacacaagcacaggctgtagcatggtgaaaataagccaagcagtgcagaatgcctcagaaagggtgggcagggggcccttaagaaggttcagagaccagccttctccagaggctgtcactgcaggagccgtgggcctgggaagacttggaagcggcctctctcaactggtttctgtctccgtggagctggaactgcctgcacttgccttcagagggaggcacagtccacccagatccacctttccagcaagacccccagtggctgcccagcctgggagcacctctttgcttttcacaccaaaccaaaactggcgagagcccctcctagccaccagtgatccccaagcatccagtacagaaccaggcatcgagctagctccctgcacggccgcaccctcccagagaactccttgaggagaacaagtgcccttggggacagccggcaggcgcccctgtacgtctgctcatgcaccaggcagcacagccgcagttcctcagttgttgttttgacatatttcagtttccacctcacgtttttagagcagaaccacactgtctccctggaggggctcgagggcatgaccggggactgaccattctgtgaaaggagcagaatgtgaggagcacgcgtgagcttatgtaccgtgaagatgatcagaggatatcttattttaagagtaaaaacccacataattttatttctgcttgatagtcatggtagtctgtcatacccacctctgggactctgcgtggctgtttggctgtcacttgtagcaataacgacattagttctagtcagtgctgttttacatttttcttttgatgggtttagtcttgccctggagtgccgatgatgattctccctccagagccacgcttgggaacatgaagcaagtctggcgtgtgggctgcgtgccggccttagtgggacccgtggggttggagcatgcctttaggggcagtgtctgggccgaagcacgtcccaccacacagtgccagagccagagaaggggccccaccaccaaggccaagcttgaccaggtcagcattgccatggcccagtgtgccccgtggcctctgaagatccctctgtgcagggtctgcagggatctggattgcaagggcccaagtctgcaggtctggaagcatcttcctataagagcactttcgccttctgggtcaggactccaaggtgcagcgggcttcacagccctacaattgggttctcagctaagccccagagttctggtagaaccatcccggggcgggtggagggtgggatttaagggagacgggaacacatggggcaggtcctggaacttggtggcctgaggactgaggccattgccctggtggaaaggcctggcctggttcctgtggcttgggacctgaataggcaggtgctgctggctccgtagaaacccttttcccatcttttgctctttgccaaacctaccttgctttgggagctgcctgcaccaccccagagaaggccccaccttcttcatccctcagacccgaggaggcctcccagtaaggagtttcccaagaggggactcacaggaaacaagtcttagtgcttgggagggaggccccgctgcgtgctcagactcacagccaacctggaaggtagacgagatagcgccacccacgcccctccacaccccagactccgagtaaagcgggcggtagggccggagtcacctcccctatggcagtggccgccgctgtactccatcctcccgtcaggaagatcagctgtaaataaacgctgggctccccagagcacctgtccgcccactgcccttgctgttctgggatcttcgctgcagttcacgggaaacaagcctgagtccgctcgcacccgcggctgctctcccggctcggcccggccgcctctgtctccggccaccgggtggcgctgccgagccagagccgccgcgtcccggcgctttccaggagccccaggcccggaggaggcgaagcccgcagagcaaaggtggaaacacgtgcctacgctgtaaagaaatcctgttccagagcatacctgttgtacaaacagacactgttcctaacgagaggagtgacgtattttcatcaccgttttcaatttgttttcttacgggtttacgattttgaatttttcttatttggttgaaagaattttgattctatcagcctgagtgagttcagcctgtaaaaaggatgttaagctgtgggtaaaatatgcaaacgaaaagaaatatattgtacaaattct

SEQ ID NO: 333 - DNA, 2170 bp, Homo sapiens
gcgtcgcagcggaactgctgagattcaggcccagggtgcgcgctcagacgcggcgcgagcgccaggcaagctgcggctgctacctcccacgcctctccaggtgcactcggcgccgcccccctgcacctggctgcggtgccgagtcactcaggcctgtgtcagggagagagggagggagctgtcctggaaagcagacacgtaagccccccgcggatcctcagacagctctggagaggggtcccgggggaaggtcactgcgtccagccggccagcaggcagctagagcccccgagccccaagccccactccagccttgccacattcaccggaaccgggactctaagccctgcaagtggctttctagggttgcattgacaccgtgcgctgcagcccacccctatctcgggctccctgctgccccaagatcagcgccaagggggctgcaccatggccatgagccttttgcaggactggtgccggagcctggacgtggacgcgcacagggccctgctggtcaccggcatcccggagggcctggagcaggcagacgtcgaagccgtcctgcagccgaccctcctgcccctgggcacgttcaggttgcgacacatgaaggctttgatgaacgagaaggcccaggccgccctggtggagtttgtggaggacgtcaatcacgctgccattcccagggagatcccaggcaaggatggggtctggagggttctgtggaaggaccgtgcgcaggacacgagggtcctgaggcagatgagacgcctgctgctggatgacgggcccacgcaggccgcggaggctgggacccccggggaggcacccacccctcccgcttcggagacgcaggcccaggattctggggaggtaacagggcaggctggctcgcttcttggggcagccaggaacccaaggaggggccgtcggggtcgcagaaacagaaccagacgcaacaggttgacccagaagggcaagaagagaagccgaggaggacggccgtctgctcccgcgaggagtgaggccgaggactcttccgacgagagcctgggcatcgtgatcgaggagatcgaccagggcgacctgagcggagaagaggaccagagcgcgctgtacgccacgctgcaggccgctgccagggagctggttaggcagtgggcgccctgcaactccgagggggcctgccccacttgtccctgggaaggaataggagggtttgggtgtgacctcacagtccagaccagactgtcccagtcctatgtcagggacacccagatgtagaagctgactgagacctgctgcagggcgtgggtgctcccccctgcttggaggctgtccctggacagtgacccacccactgaggaccaggctgggtgtaccttgagctgggcacagcagcctgtggtgttgcctgtgggtggggagggccccaggtgtgcttctcccgtagcagtcctaggcttctctccctgtgccctgtgtcacctggatcctccagtaaagtgaaattcagcactgtactctctctgtgctctgggcagtggggcaggcggggtgtgggagcgtgggccacagatgtccacggtcttgactgtggtttgcccagaatacctgggaactgtcctgtcactggtttacatacactgtcctttgctgcttcggggtccctgcctggctctccctaccccccagcatcatctcaccccttgcagatctgagccagcttccactcccacccctgatgcctccccacttccagcctcagctccgaagcccctggacacccatggagaccccgcccagccaatccccaccctagcttccacccagatacactctgccaggccacagctgcaggcactctccccccagcctccacccctcacctgtgccctggacctcagactcagctttccatcctacctgagttttctgcctccctccatcctgtgtccccccaccatacatggctgccagagacgtcctcttagaagtcacacctggggtctgattgcgtccctcgcctccccagatcccccaaggtctccttcctgtgccgtcatatctgcagttcttaggactgtctagacatgctttgttcaactaggtaatcacacggggtaaattggatttaaatgtaattaagattaaataaaaatacacatgc

SEQ ID NO: 334 - DNA, 2219 bp, Homo sapiens
actgctgcgggggccgcggggggcgcagctggggcgcggctcggaggggaggctagggggccgtgccaggcccgaagccgaggcggggccgggatgcggcgctgaggcccagcatggccggcccgggccccaccttcccgctgcaccggctcgtctgggcgaaccggcatcgcgaactggaggccgcactgcacagccaccaggttccgccaaactcctgacaacctgcagctctgcctgaccaggccccgccgccagaccccggctctgcccctgccttccctcctgccccctcctctcccctgccaggacacgcaggccaccctctgccatctccctgcacgacattgaacaggaggacccccgcgggcggaccccactggagctggccgtgtctctgggaaacctggagtctgtgagagtgctccttcgacacaatgccaacgtgggcaaagagaaccgccagggctgggcagtcctgcaggaggcagtcagcactggagaccccgagatggtgcagctggtgctccagtatcgggactaccagagggccacgcagaggctggcgggcattccggaactgctcaacaaacttcgccaggcccccgatttctacgttgagatgaagtgggagttcaccagctgggtgccccttgtgtctaagatgtgcccaagcgatgtgtaccgcgtgtggaagcggggtgagagcctgcgagtagacaccagtctcctgggcttcgagcacgtgacctggcagcggggccggaggagcttcatcttcaagggccaggaggcaggagccctggtgatggaagtggaccatgaccggcaggtggtgcatgtggagacactggggctcactctgcaggagcccgaaacactgctggccgccatgcggcccagcgaggagcatgtggccagtcgcctcacctctcctatcgtctccacccacctggacactcgtaatgtggcctttgagaggaacaaatgtggtatctggggctggcggtctgagaagatggaaactgttagcggctacgaggccaaggtgtacagtgccaccaacgtggagctggtgacacgcacacgcacggagcacctctctgatcaggacaagtcgaggagcaaagcggggaagactccattccagtccttcctggggatggcgcagcagcattcctcccacaccggggcccccgtgcagcaggcagccagccccaccaaccccacagccatctcccctgaggagtacttcgaccccaacttcagcctggagtcacggaacattggccgccccatcgagatgtccagcaaagtacagaggttcaaggcaacactgtggctgagtgaagagcacccgctctccctgggtgaccaggtgacccccatcatcgacctaatggccatcagcaacgctcactttgccaagctgcgcgacttcatcactctgcgccttccacctggcttccccgtcaaaattgagattccccttttccacgtgctcaatgcccgcatcaccttcagcaacctgtgtggctgtgatgagcccctgagctccgtgtgggtgccggcccccagctctgctgtcgccgcatcagggaaccctttcccgtgcgaggtggaccccaccgtgtttgaagtgcccaacgggtacagcgtgctgggcatggagcgcaacgagcccctccgggacgaggacgatgacctcctgcagttcgccatccagcagagcctgcttgaagcgggcactgaggcggagcaggtgaccgtctgggaagccctgaccaacacccggcccggtgcccgccctcctccccaggccacggtttatgaggaacagcttcagctggagcgggccctccaggaaagcctgcagctgtccacagagcccaggggcccaggatcccctcccaggacacccccagcccccggtccacccagctttgaagagcagctgcgcctggccctggagttgtcttcacgggagcaggaggagcgggagcggcgcgggcagcaggaggaggaggacttacagcggatcctgcagctgtcactcactgagcactgagccatagccccgggagggctggccaggccactccctgcccacttttgtaatttatttatttataaactctctgctgctgagcttggggcctggagccccaggaatgagcaggcaggggagactgagatggaaataaagagactgtcgcagc

SEQ ID NO: 335 - DNA, 3073 bp, Homo sapiens
acattagctgctcctttattgcacccgaacctcgggcgactgaaaagccaccgcccccaccccaaactgcgagccgcgctcctggcgcacccgcctcccgccggcctagctgcaatgaccgcaccggcccgaaggtctcggtctctccgacccgggatgtggagcccgaaagagtggtgggaaccccagcccgggagggacgcggccgccgctcgggccagatccccttatccaggccacctttggaaaccagcccacctgctacaccaaccttttcccaacaccgtggtcccacccctaccttcgctgctgaaaaaccgcattgtgtgggggtctggaatcttctggactcctgggaccccaatccgcttgcctcttgtacccctcttgcagagcaatgaggtatgttttgggtttgtgtactgacccctacctgcctcctctgccagacctgagggcaggagccttcctctgggtattccagttcatctcggaccttcgaagtcctaggagacaccgggctcccgctgaatatcggttgaatgactttccatagagcaaatggggtatacatgattgtgcaatgtggaggggaatggtttgggcccctcagaggagtttagagattaggaggattccagaaatgagtaacacagggtcagtgggggtagagccagccctgacattctgggctccaatctttctgcccaatcccctactgagcccccatgctggggcaaggcagacactctgggggtctccccacccccagtcagctgggccagcatcttctcacctggagctgaaagcagctgattcccagagtctgctccacagagggaatacctgtcttcagagcataatctatatgctaccatgatcctcaattcctgtttgctgcttaaacagccagggtccaggtttattctttctcagtggatagggaagggatcattctgccaaaaatctgctttccctcagtttagggaatattccagacaaagaagagggaaacagcatttcatgaattgccacaataaggggaccctgcagacccaaacaaaacaggttaaaccttaacacaggagaagaattcgcttaaacccccaaagactccattggattcactctggattgttttggtacccccattcatttccagattatttgtataagcaccagcattgactctcaggccagagttcctttagagaaaagggtctgacactgcttgaaacacgttaacttggccagcagtgcggatcattttactgttgttgttgttgtcccatgaagacctgctactctgacactctgtgtggaattcagagtgtttcttctcctatggaagtggactatgataaacggcctcctgccacccaggctaagtcaggactgcccacttggtttttacattttgccctgggccactgtctgcagtaacagcgacaataaccatgacaataaataccataagcccttaccttgtgcctggctccaggctaagagttttattcatttcatttattactcacaatctttctaggtagctatgctcttaccccgattttacataacaggaaaatgaggcccagagaagttaagtaacccatccaaagtcacacagcctgttttggagtgatcaggattggaacactgtccttttgttttgttttgtttcttattcaagtctgtccccttaattcctgaaccagggggttcttaaccagaggtcccccaagggctctttgaatgggcttcaggggctctgtaaatctcagaaatttatatgtgtacccaggtgggcacatttttctgggagcaatattatataacacccaggattctcaaagcgggtgaggatccagaaaaggtaaaggctggaatcaggccactgtagggaagggaggcaagccactggggaagggggatggaagcggcctcctcccaggcctggggagcagggaggcagctgcttcaaaattcaggctgggctccaagcctgctcctggacctgccctgctttttctggccacacccagctcttaggacctcagctggcaggaagacgtggggcaccatctgagggcaggacactcctttggtcccctccctgattctccccttccctacttcttttgtgagctgaattccttcagagcactgtgacaaggtgaccataccacatgcaccagcctcctccaggcactgtaatcctgcttggaaggagcggggagtgcttgccctttggaagtactgggggacatagacagaccactgagtgacagagacaggaagggaggagaagagacaagttcccagagatgctcaagtcctgggtgcccactctctgcagcctctagaacagccttctcttttggttccaagcttttgctcccctcatccaagggttgggatgatttgtgtcccttcctttcctggcacctcctgctctgtctctagtgctcaactcatttcctgggggaaaccttctctgccctgttcagctcctctgcgctccttagcacattcccctggatgtcactgtcatattgccaagaatgtgttgctttgtctgtctgtcctgcctctctctctccatctgttgtgaacttgggaaggaaggacctgaatcacctctccatgcccctatgccagcccagcatacaccaaggggtccaagcatttgttgagtaaataaactaaataaataaacaagggacaaaaatggagccagacagggaacttagcctgtgcctcagagagaggaccaggggtaggtgtattggttttgccagctgcctgcagatgcgtgcggtgctcctactgctcacaccaatatactcagaggggcccagaagcctcattctctaatgctttttggctatggagtgagtttcctgggttgtggacccagctgtggtggtgtggtctgacttagtaatgaacttccttcatttgctttttttgtttgtttttgagatgaggtctcgctatgtcacccaggatggagtgcagtgagccgagatcgcgccgctgcactttagcctgggtgacagagcgagacgctgtc

SEQ ID NO: 336 - DNA, 2604 bp, Homo sapiens
ctgcaaactgcacctttcatgtgtaaaaggattgctactactttacttgtcagctgtggatttccaaatgtggtggctccctcttatttttttttctttgaggagtgtaccaattttttatctttataaaccaggtaagggaaatgatgcccttgcccattttctacagacctaatcgatttttacctaatcagttttacagaaagggttacatggaagaagagataggggccaggaatgcaagaggggcattggtgagtggggtaagaatccccgtagccctgggaaaggtgtctccacttccacatctggcttttctagggggcatctgtgctaactgacctgggattatgttggatggcatatgactgcaaattcaaagaaaccaatttataataagtttatagtaagttaaaggtttgttttactctcatgtgaagggaatctggaggaaggaaagccagggctggagtggctgcctttgatcatgggagcacactccttctgcccgatcattgggagcacactccttctgcctgatcgttgggagcacactcctgcctgatcatgggcgcacgttccttctgcctgatcgttgggagcacactccttctgcctgatcatgggagcacactccttctgcctgatcattgggagcacgctccttctgcctgatcgttgggagcacactctttctgcctgatcgttgggagcacaccccttctgcctgatcattgggagcacactccttctgcctgatcatgggcacacgctccttctgcccgatcatgggcacacgctccttctgcccgatcgttgggagcacactccttctgcccaatcattgggctcacgctccttctgcccgatcgctgggctcacgctccttctgcccgatcttgggcgcacgctccttctgcccgatcgttgggcgcacgctccttctgcccgatcgttgggcgcatgctccttctgcccgatcgttgggagcacgctcattctgcccgattgttgggagcacgctccttctgcccgatcgttgggcgcacgctccttctgcccgatcgttgggcgcacgcttcttctgcctgatcgttgggcgcacgctccttctgcctgatcgttgggcgcacgctccttctgcctgatcgttgggagcacgctccttctgcctgattgttggaagcacgctccttctgccttcagactccttgattttagtgcagtttccatcactgaggctgcctcatgggctgagatggctgttgaagcactgaacctcacatccacaattcaggcaggaagcagaaggaagggcaatgggcaaaggggctgtgccttgcagccgatccagcctccctttgctgcagaggaggcagggaaatgcggtatttactgggaacattgctgcccctcctccaaattgagggtcttggctcgaaggacaaaagccagaaaggataggtggattagtgcttcttaaacttttgcgtgcatcagaatcacccagaaagatgttaaaactcactcttcaaggccccatccccagagattcggattctggggatttggaatctggggtggggtctgaagaatctgcattttttaacaaactcccaggtgacatagatggcatcaattctcaagccatattttgagtagcactgacactcttccaataggtggtactttgacttgtcagggaagttctattgctctgataacttaaaaccaacccaaccagaagctcacaaaaactagcagcctgtgaaaaatgatcaccattttcctagagctccgagacaactagtggtagtgcaacagtaacccaaaaatgtcaatgaaaatatttccttccccagaaactgcttggtttcactcaggtcctgtccttatgggcctgtgtctggttgcagggcttgaagtatttcggaagctcagcagaggttgaaccctttcccctgggggttggtgatctttgttttggccatttccacctggtgaagattttcatagacaaatatgcttgtggcatcctgtaattcattgtgccttatgatggacctctgattctataagcttccccctagctagggatgcacgggggtgatcaagacatgactagatgtgaacctgacctgcagacagtccacctgaacgtgcctggaaatgtctcccgaaaaggatgaaaagcctcctcctttagacaaggaagacagagtggagcaaatttctctacatagatctcattcgaaaacaaatttacagaatgcagaatggctactgtgtgtcttgtgctatgctaggtctctctctctctaagtggactctgaccctgtccaaaacattgtgcttttgcatgtagctgtgtcgcatttaggcccagctctaagaaccgtttggaaataaatcacatagagcctttgattgtgaggcaggcttaaagtacattttgtttgatttgcagaggcatggtgaggaatttatatgcatggctgttgtggcagcagcgagatttccaaaaagatgaatgatgaaatgaaacagactgaagctatctcacaaatgttaaatggagaaataaaagttgttatagtcattgct

SEQ ID NO: 337 - DNA, 2505 bp, Homo sapiens
attctccatccctgcatttctccatcgcagcatccctgcatgcctccgttctctgcatccctccaccccagtatccctgcacctcttcatccctccattcctgcatccctctatttttccatccctccattcctgtatccctgtgccctccatcctccatcccagcatccctccatccctgctctccactctcacttcccttcccttcacagacaggcttttcctgccatcctcagaccccacccagggttacctgatgcctttccagctgcacacggggactgactcacctctctctttctcagtcccaaagtcccgaaagagagcatctgatgtggtcagcttgtgacaaggcgtccaccttctgtccatgacacggaggccaggggaaggtctcactgcccagcaccccaccctgtgctcccaggccttgaatgttcctcctgctcagcccagtgactgcgggctgtggctcctcctccagcctcccctcgaggtcctggtcttacttaggaggccccgggtgtagatgccttcccacccaccaggcattgccccttttcctggcttcacagactcgggaataaagtttccttctgtttcccctcttgcagaaggagatccggttggcagctaaaccgcgctgggaacaggggcctgagtcctggactagggctctttccccggggctgctgcagatggggaggagcctacacccgcctcccgagtgctaatcagacctgacaggctggagaatggccagtcagcctgaggccaccgcgggacaccacctaggcccagcttctccccccaccagagggcgccagagcccgccaagcctcgtaggagatggcaacagggcctgctgctgccacctagcggccaattccgggaatgaatctcggcacgctcattacccagcgactctgcccatcttgaccctttatgtgaagcagaacagccgcttccgcagtgagctgtcagaaggcgtcgtgcctgtcttgctagtggggaaactgaggctcagagaggcagaagacttgcccaagatcacaccaccgggacccaggattcaagcgcaggcctgcccaggctctctgtggcctcctggctgcgaggaggcagccagggaccaggtgccacccttctgagacacctgagatcccaggcccgagaggatgaaggcgggattacctggagcgtgtctgaatgctggaggaagaagggcagctgggagatgaagctgtcaggatgggccgcatcccatttcctgcctcgtttcagttcaactttccaacagacctccctggctcgtcttgctcttctctaatggacaaacaaacaggctcagagaggtggtgtgacttgcccaaggtcactcagcttggatgctatggaacagggacgtccactgtcccagtctgtttatgggaagccgctctgcaactgtcctgacccaccacatgccccaccgctgtttctcttgccctgaccccttgttccctggaccagggtggcacagctccaggctcttgggcccttcccgagggcaggcacctgtgactgtgtccccaaagacctgagtggctgagggggccccacagagcttggacttcctggaggacaaggaggggtctgccagccacccccaccacgcccgccccagggctcccctggagcttccatgccagccggactcaggtgggtctggaggagcaccgtgcctccaatcagaccttgagatgtgccccctgcccccactgtgccctcccctgcccaggagtctggttgcaaaccctgattaaggggattttatctccaccagagggccagtaggtgggaagtagcttaaacaatgcaggtttataatctcacagttctggaggtcaagagtctgaaatgggcctcatggggctaaaaccaaggtgtctgcagggctgtgttccttctggaggctccagggcaggaaggggaggatccacttctgtgcctttccagcttctagaggctgcctgcgttccttggctcgtggccccttcctccaccttcaagccagcagcggaggcctgagtccttctcatgccatctctctgttctctctcctgcctcctcctccacactgaaggacccctgtgatcacactggcccccccaccggatgacccaggataatccatctccctgtttgaaggtcggctgattagcaaccttcattccatctgcctccttcattccccctggccatgtaatgggattcacagcttctggggattaggacatggacatcttgtggcgggggcataattctgtcgacgacaccaagaaacacttggatgttaaggattcaccgaacactgttcaggctccaggtgctgggagcagcagtgaacaaagccaacagacactgccaccctcaaggagttcacgttcatgggcgagggaacagatgagaaacccggcaatgaaaacatagcctgggtgggcaacaagagcaaaactctgtctc

SEQ ID NO: 338 - DNA, 3100 bp, Homo sapiens
ttcttctttctccctctgccttaatgatgctgcccctttcctgttcctggttgaagctgaagcccgcttcccttcgccgcacacaacacaggagcaatcttctcagccgtgcactcacagcttggaaaataaagggaggaaggagtcccagccacagggtagaggaacggcctctccacagagaagctgctgctgctgagctgaagtgacagtcaagttcagcagctgtgtggggaccaaggggacacaatatgagaccaacagcatggacttcaaagttggggcagatgggacagtcttcgccgcccgggagctgcaggtcccctccgagcaggtggcgttcacggtgactgcatgggacagccagacagcagagaaatgggacgccgtggtgcggttgctggtggcccagacctcgtccccgcactctggacacaagccgcagaaaggaaagaaggtcgtggctctggacccctctccgcctccgaaggacaccctgctgccgtggccccagcaccagaacgccaacgggctgaggcggcgcaaacgggactgggtcatcccgcccatcaacgtgcccgagaactcgcgcgggcccttcccgcagcagctcgtgaggatccggtccgacaaagacaatgacatccccatccggtacagcatcacgggagtgggcgccgaccagccccccatggaggtcttcagcattgactccatgtccggccggatgtacgtcacaaggcccatggaccgggaggagcacgcctcttaccacctccgagcccacgctgtggacatgaatggcaacaaggtggagaaccccatcgacctgtacatctacgtcatcgacatgaatgacaaccgccctgagttcatcaaccaggtctacaacggctccgtggacgagggctccaagccaggcacctacgtgatgaccgtcacggccaacgatgctgacgacagcaccacggccaacgggatggtgcggtaccggatcgtgacccagaccccacagagcccgtcccagaatatgttcaccatcaacagcgagactggagatatcgtcacagtggcggctggcctggaccgagagaaagttcagcagtacacagtcatcgttcaggccacagatatggaaggaaatctcaactatggcctctcaaacacagccacagccatcatcacggtgacagatgtgaatgacaacccgccagaatttaccgccagcacgtttgcaggggaggtccccgaaaaccgcgtggagaccgtggtcgcaaacctcacggtgatggaccgagatcagccccactctccaaactggaatgccgtttaccgcatcatcagtggggatccatccgggcacttcagcgtccgcacagatcccgtaaccaacgagggcatggtcaccgtggtgaaggcagtcgactacgagctcaacagagctttcatgctgacagtgatggtgtccaaccaggcgcccctggccagcggaatccagatgtccttccagtccacggcaggggtgaccatctccatcatggacatcagcgaggctccctacttcccctcaaaccacaagctgatccgcctggaggagggcgtgccccccggcaccgtgctgaccacgttttcagctgtggaccctgaccggttcatgcagcgggctgtgagatactcaaagctgtcagacccagcgagctggctgcacatcaatgccaccaacggccagatcaccacggcggcagtgctggaccgtgagtccctctacaccaaaaacaacgtctacgaggccaccttcctggcagctgacaatgggatacccccggccagcggcaccgggaccctccagatctatctcattgacatcaacgacaacgcccctgagctgctgcccaaggaggcgcagatctgcgagaagcccaacctgaacgccatcaacatcacggcggccgacgctgacgtcgaccccaacatcggcccctacgtcttcgagctgccctttgtcccggcggccgtgcggaagaactggaccatcacccgcctgaacggtgactatgcccaactcagcttgcgcatcctgtacctggaggccgggatgtatgacgtccccatcatcgtcacagactctggaaaccctcccctgtccaacacgtccatcatcaaagtcaaggtgtgcccatgtgatgacaacggggactgcaccaccattggcgcagtggcagcggctggtctgggcaccggtgccatcgtggccatcctcatctgcatcctcatcctgctgaccatggtcctgctgtttgtcatgtggatgaagcggcgagagaaggagcgccacacgaagcagctgctcattgaccccgaggacgacgtccgcgacaacatcctcaagtatgacgaggaaggcggtggcgaggaggaccaggactacgacctcagccagctgcagcagccggaagccatggggcacgtgccaagcaaagcccctggcgtgcgtcgcgtggatgagcggccggtgggcgctgagccccagtacccgatcaggcccatggtgccgcacccaggcgacatcggtgacttcatcaatgagggactccgcgctgctgacaacgaccccacggcacccccctatgactccctgctggtcttcgactacgaggggagcggctccaccgcaggctccgtcagctccctgaactcatccagttccggggaccaagactacgattacctcaacgactgggggcccagattcaagaagctggcggacatgtatggaggtggtgaagaggattgactgacctcgcatcttcggaccgaagtgagagccgtgctcggacgccggaggagcaggactgagcagaggcggccggtcttcccgactccctgcggctgtgtccttagtgctgttaggaggccccccaatccccacgttgagctgtctagcatgagcacccacccccacagcgccctgcacccggccgctgcccagcaccgcgctggctggcactgaaggacagcaagaggcactctgtcttcacttgaatttcctagaacagaagcactgtttttaaaaaaaaaaaaaaaaaaagaagaaagaaag

SEQ ID NO: 339 - DNA, 2173 bp, Homo sapiens
aggcggtgcctgtcctcagggcccctggagccatggggctgagcagaacccgggaagtgctgtgatctggcaggaaggagggaggctgggtgtagatttgacgccatatctccttcccccattttagtaaagtctaattttttcctgataacgaaggcagtgtttgttgggaaatttcaaatgtagaagatcatcctttagtctttaaaagtcctctggcagaagccactcctcctgacgctcagcagtctggctgtgcattgctcttggggctgcctgggtggcagcacaggcctatcctgctggtgacctgcccacgcctcccttgcaggtcctgcgcctcgctcagctcatcacagaggccaaacacacagccaagtccatctccgaccagtgtgcggagagcccggctggccactccttcctctcatggctgggctttagctccatggacaccagtggctcctacacagccaacgacctggacgagatggggcaagacagtgtccggaagacagatgaatacctggagaaggccctggagtacctgcgccagatattccggctcagcgaagcgcagcttaggcagttcacactcgccttgggcatcacccaggatgagaatggaaaacagcagctccccgactgcgtcgtgggtgagaacggactcatccttacgcccctggggcggtaccagttcgcaggacagatggcggctctgtgttcccgggatgacttcctcggcagcttctgtcgctaccacctcacagaacctgggctggccagcaggcacctgctgagtcctgtggggcggaggcaggtggccggccacacccgcggccccaggctcagcctgcgcttcctgggcagttaccggacgctggtctcgctgctgctggccttcttcgtggcctctctgttctgcgtcgggcccctcccatgcatgctgctgctcaccctgggctatgtcctctacgcctctgccatgatactgctgaccgagcgggggaagctgcaccagccctgaaggtggcagctgccttcagagcaggctggagggatttgccacacagccccacccttgggctgagaggacctgggaagcccctccaggagggaacacggtcatcctcaggcttctggagcggggttcctgcagccgcagaggcatctggaggaaacacaaccaagaaaggaaggcagttgggccccagcaaaggagtggctaccagggctcaacagccacgctctgtgacagcgcagagctcagcgccggcctttccctccctctgccaaggactcatggccaagccagctctcggggccttttttccagtgcccatttggctactctgctgcaccaagcttgggagccagcctgccaagagccgcctgggcctggcctccccactggctggccttgaggtaggcagagtgggttgtggcgcctcctctctctgtgtgggaccaggacggtggcttaagtctccactccaggaaagaatcaaagtttctagagttgtgagaaaaccagagagtggctctcctgattcttcactctggggtgcgttcttcatgttctcccagctgttccaagactgggccgtagaattccatgtttcaggagcctaagaccctcccagagcccaggtgcttcaccgcagaccgcaagccattgagcacatcacccaaagcagtggccaacatcgcggacccctgtgccttgtcacagatgggtgctggtcctcaggcgttggggacactgctgggtcgatggggtcggattctgccagtttctgctctgcagccaaagatggtcagaagcattgtcacttcagtaacatcaagtgctcaaagacatggcaaccgttcagtggtacttaagtattcaaaatatacaactacagattctctgacagaaaccagcacggggtcttcaccttcattcaccccacaggcgacatgcgagggagaacagcatctcagtggtgatttccaaaccaagcctttgttttcggtgtggggttttgggggtttgctttaatgtttttgaaattgtaaatgttgggctttgtattttgatgtaaactgagaataatggcattttagggcctgtgaccaaaaatgaagcttgtaacgaccatggatctgaataaacatgtccttgcttctg

SEQ ID NO: 340 - DNA, 2240 bp, Homo sapiens
acttccccgccctcgccccaaaggagcagcagctccttcttgcctctccattgccgccgccgcaccggcggagctcctctctcgcgcgtctctcctccgatggagctcgggcgccgccgacgccgccgctgccccgaaccctgagcggggccgccccggtcggaggaacgcgccgcccagtccgagggcgcagagcgccaggagcacgcggagggctggggcgcgggctccgggaacgagaaagtgcagctctctcgggtcactgggccggcggcggggggactatggctctgaaggacacgggcagcggcggcagcaccatcctgcccattagcgagatggtttcctcgtccagctcgcccggcgcgtcggccgccgccgccccggggccctgcgcaccctcgcccttccctgaagtagtggagctgaacgtaggcggccaggtttatgtgaccaagcactcgacgctgctcagcgtcccggacagtactttggccagcatgttctcgccctctagtccccgtggcggcgcccggcgccggggcgagctgcccagggacagccgggcgcgcttcttcatcgaccgggacggcttccttttcaggtacgtgctggattatctgcgggacaagcaactcgcgctgccggagcacttccccgagaaggagcggctgctgcgcgaggccgagtatttccagctcaccgacttggtcaagctgctgtcgcccaaggtcaccaagcagaactctctcaacgacgagggctgccagagcgacctggaggacaacgtctcgcagggtagcagcgacgcgctgctgctgcgcggggcggcggccgccgtgccctcgggcccgggagcgcacggtggtggcggcggcggcggcgcgcaggacaagcgctcgggcttcctcacgctgggctaccggggctcctacaccaccgtgcgcgacaaccaggccgacgccaaattccggcgtgtggcgcgcatcatggtgtgcgggcgcatcgcgctggccaaggaggtcttcggggacacgctcaacgagagccgcgaccccgaccggcagccggagaagtacacgtcccgcttctacctcaagttcacctacttggagcaggcctttgatcgcctgtccgaggccggcttccacatggtggcgtgtaactcctcgggcaccgccgccttcgtcaaccagtaccgcgacgacaagatctggagcagctacaccgagtacattttcttccgaccacctcagaaaatagtatcacctaaacaagaacatgaagataggaaacatgacaaagtcactgataaaggaagtgaaagtgggacttcctgtaatgagctctccacttccagttgtgacagccattcagaggcaagcactccccaggacaacccatccagtgcccagcaggcaacagctcaccaacctaacactttaacattggatcgcccctctaaaaaagcacctgtacaatggatacccccaccagacaaacgcagaaacagtgaactctttcagaccctcatcagcaagtcccgggaaacaaatctgtccaaaaagaaagtctgtgagaagctaagtgtggaagaagaaatgaaaaagtgtattcaggattttaaaaaaatccacattccagattattttccagagcgcaaacgccaatggcaatctgaactgttgcagaagtatgggttatagtaattgtcacattcctgcagtattttgatgacattcaatgtttactacagtgtcaccacctgactgatgtcctaacaatggtcagtgtgattcttgctgctcttccttgttgtgaacagtggatgtgggacagtattttcttttatgttttagttgttgttctttttagaaacatgattaaaaaggaaaaaatattaaatcaataagtgttaaatcaaaatggaatatctgattcaaaccattttacaagaatgaaagtaaaatgtgcatgatcaagcttagtatcttggtttttgaactctggtcaactggatatgtttgtcattttgtaacttaccaaaaacaaaccatcatatcataccaactaaaatgatatatggatgaagcaacatcaagtaaaattttagacgatggctataggacccaaatctaaagctgtctaaatgttaattcaatgaaacaagtattatttttgcatgaatacaatgttacaaataaatcacaagaaatagggaagatctgtttgttgcttgg

SEQ ID NO: 341 - DNA, 3094 bp, Homo sapiens
attcatcaaaagaggctttcgctcccggactcccctgggcctcgagcagaaagcgtctcggccacggagatacagaaccgggagccttcaaggtcctccgccactctcagcaagccctgctctcgatggagaggagatcgctgggtgatggatgtgggcttccagggaaggtgctcgcgctggtcccgagccctccggggaagatattcgagcgcggagcgtaagcgcagggcacgccagccccgggagccgcgggagcaggcgccgcgcgtctctgcaccaccgggccgcctcccagccttctttccccagtttgccctcctgccgcagtccgggccgagattaattctctgcacttgtgagtgggcacacacaagttctccgggcacgatcctttcatctatttccctgggggagtccacctttttaacgattaacctcctagctaccgcgggcaaggtggcaggatgcgagtggggcggggaggggcgtttcacacgttcagaggcaccaaaattagctgccagtgctaaaaggctttgctttcttcggtttttgacaaataaatggggtgggatgcttgcttggccgcccgctgccccagcccgagccctgggctcacttagcagcctgatgccgagtttcagacgcagtcctgctgcgcttacacccgggcttcttcgcccccttgccaaagtctgcagcccgatggatgccgggcgcgggctttccctgagcgctttaacgcagcttaggctaaagccccagagctcccaccttctacctcctgtttatccgcccgcccctctaccaccgccaaaggacgtgccccttcagtagagtcggggatcccagccccagagcgggggagggcgcctccctatcccctcctccccgtccccgcctcggctcggggttttactgcagcagccggaggtgacagcgacgcctcagccgcctctgttgctctcggagccccggcttcccctgcaccgggaaagcgccccctctcgagaggctggtccctggagaactgcgaacgagctgcagaaaaccagattttaaaatgtagaagtcgttgggctgcattcctccgaggaccagtctgatcgcccaggactaagagtggcagcgtatgagaagttgggaccatagagcaagggggggaggggagtgttgcagcaggcattctcttctggaaggagtcgctgggagcagtgcggttggacacaagtttgcgtaggagtgttttccttttgtcaataattaatcaccggaattagccaggtagaatttgagttttagcaagagtcctgagggcggggccgaacacctaactccgggaggctcccaggcgcccggcgcagtgggaagctcgcagcagctggggaggagccaaagcctcggcgctcacctaagccgcagggagatacacccaactgggagatgaggaaacagcaacccagagaggagaactaacccacacaggatcatttcgtgaaggagcaaggctgaagaaccagacctggactttcttaggacaaacttactgcagcttgaaggagccaaccatggatttgaggcgtgtgaaggaatatttctcctggctctactatcaataccaaatcattagctgctgtgctgttttagagccctgggagcgatctatgtttaacaccatcttactaaccattattgctatggtggtatacactgcctatgtctttattccaatccacattcgcctggcttgggaatttttctcaaaaatatgtggatatcacagtacaatttctaattgatcctgttcacattcagtgaaatggcattgcatatttatatgttgcttacagcttattgatttaggtaactattgtgtcttccttcactatctgacctgaaaagcactctcttctctatgcactcttatattctgcctttctgcctggagtttgaaatacatgtctctttagtttcttttgcacatgctacattgtgctttagaccggagataatacagtgactttacctcacaaatcatattctgtcaacacaaatctatgaatttagtttatttaaaatcagaacaatttcctacaaaatttttctggaaaatagactcctaacagacctaccagaatcatgcttaaagtgctcccttgacacttattctatactgaaggataaattttaaaaaatctttataggctactgtcagaagtatcctatccttgtttacgatgtataaaaagatgtgaataaattatatggaccccctaagtcttattttctagtaaactgatgatactggaaattcttttacttcaaatgcaaaagaataagctggaggcaattatttcctttcatacagagttcatgaattgttttaaatgcttcttaaagtctggctttataaccgtttaaaatcaacaatgttgattttagataaccaagtaagtattataatacaaaataattttaagtgtaagaaactaaagtataatcaaagtaaattcagttattgtatttgtggtgttgccttgccttgcatgatgctgggggaaaaagagaaaagaaatggttttctttttgtactttcattcagtgtagagggaaaaaagcatgtattgggccaccggaagacaagctaataaataggctggaagtaatattctaccagcaggaactcaacagctccagttaaatgctttgatatagtggctcctttgcagagccaaaacaagatttattaaatttccttcaaactgtttatctttaaaacaaatataaggttttaattatactgctgaagcaaatgtgaatgccaaagactacgttttgcagttttgctttcctcccaataaatattaatgtatgtaattctagagggtaaaaatgtaaataggtttggacaatatttgcacccttgtttgtgttatgaaaaaaatttttccaaggcgagctagagagaaagatgtttggcatgccaaattaacttgcatgtttgttaaaaaaacaaacacatgttttgaagagaaaccagatctgaacatgtatttgttgagttttgcaaaataaaattaattttgtaagt

SEQ ID NO: 342 - DNA, 2183 bp, Homo sapiens
cacatttgtcctgagtcacctgtccagagcaggtggtgaatattgtgtcctactcacggcatctcaactatcggagcctgggatctgactcaaaggccggcctccgtctgagaactgagcgtccatttctcaatccttgccggctctgacccaggcctgggccacaggctgtccgggaataagtggtgctgcaatccctgctgggcagatggagagaggagcaagggagatggcagccccgggggactgtgcatagggaggtaggtgggcaccagggactcatgaagtggcagctaagccctgtccagtggccacccgtcagccaagggccagagaccaggaaaggaagaaaggcagcttcacttcctctttgaggatggagtcgcacagccgcgctggaaagagcagaaaatctgcaaaatttcggtccatctccaggtccctgatgctctgtaatgctaagaccagtgatgatggctctagccctgatgagaaatatcctgatccctttgagatttccttggcccagggcaaggagggaattttccactcatctgtgcagctggcagacacatcggaggctgggcccagcagtgttcctgatctagcactggcctcggaggctgctcaactccaagcagctgggaatgatcgaggcaagacctgtaggaggatattcttcatgaaggaatcttccacagcttcctctcgagaaaagcctggaaaactagaagcacaaagtagtaacttcctgtttcctaaagcctgccaccaaagggcacgcagcaactcaaccagtgttaatccctattgcacaagagaaattgattttccaatgaccaagaaatctgcagcgcccacggacaggcagccttactctctctgcagtaacaggaagtccctctctcaacaattggactgtccagcaggaaaggctgcgggaacttcgagaccaacacggtccctgagcacagctcagctcgtgcagccatctgggggcctccaggcttcagtcatctccaacatcgtgctgatgaagggccaggctaagggtctgggcttcagcatcgttgggggaaaagacagcatttatggccccattgggatttacgtcaaaaccatttttgcagggggagcagcagcagccgatggaaggctacaggaaggtgatgaaattctggagctcaatggtgaatcaatggctggactaacacatcaggatgctttgcagaagttcaagcaagccaaaaaggggctcctcaccctcaccgtgagaacccgcctgacggcgcctccttccctgtgcagccacctgtctcccccactgtgccgctccctgagctccagcacttgtatcaccaaggacagcagctccttcgccttggaaagcccctcggctcccatcagcaccgccaagcccaattacagaatcatggtggaggtttctctgcagaaagaggccggcgtgggcctgggcatcggcctgtgcagcgttccctacttccaatgcatctctggcattttcgtccacacgctgtcaccaggatccgtggcgcacctggacggacgtctccggtgtggggacgagattgtggaaatcagtgattcccctgtgcactgcctgacgctcaatgaagtctacacgatcctgagtcactgtgatcccggtccagtccccatcattgttagccgacatccagacccacaggtctctgaacagcaactcaaagaagctgtggcccaggctgtggaaaacaccaagtttggaaaggagaggcatcagtggagtctggaaggtgtcaaaaggctggaaagcagttggcacgggcggcccaccttggagaaggaacgagagaagaactcagcacccccgcatcgcagggctcagaaggtcatgacccgctccagcagtgacagcagctacatgtctgggtccccagggggaagtcctgggagtggcagtgctgagaagccgtcctctgacgtggacatcagcacacacagccccagcttgcctctggcacgggagccagtggtgctttctatagcatcctccaggctgccccaggagagcccacccctcccagagagccgggacagccacccgccgctgagactgaagaaatcctttgagattttggtgagaaagcctatgtccaatatagcgagaccccgttctccag

SEQ ID NO: 343 - DNA, 2224 bp, Homo sapiens
aatctgttgataactcggtcccagctcggccgctgccctcgcgaatggagagcgggtccccggcggggggagcgcagcgcgtctgtctccgggagcgcggcccggccgccccggcagccgcttcggccacagcagatgggagcagctcccggactgcgcccgccccgccgcggtcaccctgaggccaggggcccgggagcgcgacctcctggccgccgtctgggactttgaccttccagaggccatggaggctggcggggagcagggcgccacctgatcgcctccccctggacgcctcctccagcggcgctcacgcttccgtaactttgcagcgctcatggatctgaagacagtgctctccctgccccgctacccaggggagttcctgcaccccgtggtgtacgcgtgcacggccgtcatgctgctctgcctcctggcctccttcgtcacctacatcgtgcaccagagcgccatccgcatcagccgcaagggccggcacacgctcctgaatttctgcttccacgctgccctgacctttcccagtgttcaatgtgtgtgtcttgcgttctactccgggggtggcggcggcaggtctgtccccagcattctcgctctgggcagaaccctcgggaccctccgctgtcgtgtgtctgagccacccctgcagcttcacagggcccctgcacacctctgcccactcagtgtgccctgtcagccctgtccttgtcgtagccccagccctgcagggctgagagcaccacagatgctgggggctgctctggactttggggatggctgtcagcctcagagggccaatggggggctttcacgggcccaaggcttgggaaaatgcccagacatcctttagtgaagactcgacttccaaaaccagccaccgctgggactggattccactccagtataggcacttagcaacacgaaggtttattccaaaaagaaaaggggctgacagacgggagattctcatggacaaaatccctttccctttttctcgtctccatgaacatctgggtaccaagccctgactcaaaggacagatgtggatgacagcaagacttctgtgaaagcaagtggcccgtccctaggtgggagggagtccagagggtcatgggtgtgaaactgtgcacagctttccctccctccctcttcctccttgtctgtgacacatgtgcacccacacacacacacacaaacacatgtgcatatcacacacatgcacacacacaaacacatgtgcatatcacacacgcgcacacacccaaacacgtgcatatcacacacatgcacacacacaaacacgtgcatatcacacacatgcacacaaacgtgcatatcacacacacgcacacacacccaaacacgtgcatatcacacacacgcacacacacaaacacgtgcatatcacacacaaacacacgtgcacacatacttaacacacacttgcacctgctgtgcacatgtgcacacacacgtagtagtgtgttttccagccacccacacactgggtttgcattggagattgtttcaccctgcaaacgtcaacgtcagcagactcgtcggtgcgctgtgctatccggttgggaggtctcaccaggagcagagcctccctaacgtgcacctccgagaagaggggtgtcggggagtgttcccagcacctgctcggtggaagggctctccggagactggcactcagtatctgagtatgaggagcctcacttcccggggtgtcggtaaacttgaccgtgactcagtaacccacagcgtgctcctcccagcaaaccccgtgtgtccttacaggtcgaccagacgggccgtcggaggaccaccaggtggctctgcctctgcctcaccttctcacctgcttccatagctgatgtgaacccgaatccccacgctgtgctgtgtacgcactgtaggtgcagaaccgtccacacaaaaatacagtcttggcattgtttgttctttgtgaggctggttaatagcatccccgtgtgtttttctcaccctcgatggggtagaggggcacctgaatgtgtggcccccgtctgtgtcctggatcctggggcagggctgctctccctggcccctgcagcccctcatgaactttccaccctcagtgcccccggctgagcagagaggcgtcccaccattcaaccaaagaaagtcaacattgaacattaaacctctgtgcgtttctatactg

SEQ ID NO: 344 - DNA, 3597 bp, Homo sapiens
tatctgtaaaaaataaaaacaggaaaaagaaaaccctcttgttaggaagattatgttttatttaaggagaagccctggtgctgagaatcccacagcctcgttttctgggcctatgctacagggttttgtgcaacagggactgtggatcatattggtggaataactactggccctacatagtctcttttgtctcttgtggtcagaaggttagaaggaaggagagatcatccctagccctcagtgtactcatggtggccaggtgaggagggcagatatagagtccctttgaggagaagagggcctgccagcccaggtacagatgcttccctcagggtccaatctccctgatgtcccccgccatggccacacactgagccttgcttctgatccttggaggctagatagttccagaatggccacacgttggcgagggcttagtcaaccagctctgactgcatctgcaaggatgcagtggggaattcctgactgacgggtctaccactggacattctgaggtttcttcctccgtgccacatcctgggtcaaccctggattgtctgatgatatagttcttgatgctgataactggggtgctagggtatctcctctgcacaccttagtcatgactcaggtggggcttgagcactttctctacgcaccttctctacaaccctggtgggctgggacactccctcttaatgccttagtcagtgcctggtgggaccatagatgttgcagggtgtttggaatttggacagagatcctggtggaaaagggactagatgaaccataaagaggagccagtgcttgctggggacagaagatggagggttagaaattcagtctgtggagcagtcttggagagaaattggcaggcacccagtacctcccttggtcgaaggctgctccagggtagtacagttctctggccagccggtcttgccaggcaagtgcctgagccctgaggaagcaagaaggctctctacctgcagtcagagtctgctctgggagaaagtacacagtgcgttgtgatcccctttaatctctctattttctgtttgtagaaagtccatgagatgctgaagaaggggtgggatgctgaaggttctcccttccgaggccagcgattcgaccctgccatgttcaacatctccccgggggctgtgcagttttaatgaccagaaggaaaggaaaccctcgccggtggggagccagagccttatcctcggctgcccttcttggctccctgcattccagggacttgctcgtcttgtttacccctagccatcctttctttcaagggtgaaccaggccttccaccctgaccttgcatctccagactgttccagagaaggtgcggggccagctgctatgtggtggccgctgtggctgacactgagtgaaggtgtttgaaatgcaggagaggatatcccagcaaattgggatcacatgcttttgtctccacagcaaccagccactgcgggcagcatgtctttcctcccctgctctctgcttgctgttgttttgacgctattctgcttgcatgtcttctggttgggatgtggagttgttgctggactctcaggcgaagctgaagtcattgaagtgtgtgaagctctgtgcttgcatgagggcaagcaaggaatggctgtgcctgaggctgctctgggaaactccttgccccttgacctcttttgagagcattcacgtggtcttcttgctcatccccttataaatgtgctttgcctgcctcagcctcatggtcagagcagtggagactggagccctgtttgcacgttctagttgttcggagaaagcctaggttctgggctcaggtccagatgcagcggggattctgttctctgaccgtggcgaccttgctttggttcttgttgaagtgaaccaagcccggccaccacgcatggcatgctgtgcttggctccccataagacgtcctctttgggtgcacggtgtcaaagtgtgggcaggagtggagagctggtgccctcaggaggagaccacagcatgtccatcagctcagcagagctcgacagccacaagtcctgagaagctttgaccttgaagggcttctgggagaggaggaatttctgcatggggcgtgaaggcacactgtcccaccacaactgaaccagaagagagtgaagactcccctcttcccatcctctgtgccaggtgccagactgtgctccttggaacttatggcccaatcttacctgttctccagggactggtcactgcctcaggacccccaagcctatgccctgagccatggctgctgactgactccagccaaggtgcaaagacgagattatgagacaggtcctcaggcctgtgttccaagtactcacaggggctctgggtgcccatcgccgggagtatggttcagctgccaccggcactgtccatttgcctgtctgtcaagctcagagcatggataagccacacagcagggcagtgcaccctggcaccatgcacggccagcaagaatcaaggcccgcagatgctaagagggcctattgtcaggggaaggtccccgctcctgcacactctctatggatacttgggttgtgggggctctcttggagagtaagtttgtggtttgtttctggtttacagtggtggctgacaccccttgtaagaaagcattcctgggaagtcttctgtgggtccaaacatgttgctccgatcatcacaggagagcaaaaggccctagataccccctttggaatgtgagagtcttgttgtctgatatttgccactgagctggtgaagcccctctaaagagatctcgaccctggggagcagaattcttgtcatctatgaggggtcctgagaaagacttgtcattttttttcctggagttcttcccattgaggtcctaggatttgcacaccactgtcccacaagagctttcctgcctaatgaaaggaggtcttgtggtgtgtgtctcctctcttctctatagttcccgagttggcccccattgcagcccccaccctgtgggtagtcttccagaagtgatgcagtggtgtgagatgccctacaccttgttatttgggagactttgagagtcattcacttccatggtgactagtgtttgttttgcctgattttatattctgtgttgcatttctccccactccctgccctgctttaataaacagcaaaccaatatctaggaagaatgactgagggatagtattgggtattggccccatggcaggaacagccacttgcatctggtcccggtgccacactgcggtgcttggtgtggttgtggagcctgtccctgcgcgccttgctcccgttgagccacgctgtctggtgggtgattctctgccctgagccaccaccctggactggcccagtctccagagctggcacaccctgcctgttttctctttttagacacaacagccgcagtttggccagccactaagtcccaccagctgaggtccgaggaaagcggggtgactcatttcccttgtccagggcccgaggagagtgaggtgtccagcctgcaaagctattccagctccttggtgttggtttgcaataaattggtatttaagcagt

SEQ ID NO: 345 - DNA, 2543 bp, Homo sapiens
caatacagtggagtgatgtaacctggagtgctggggagggggctttgaatggaactgggtagcaggggctatgaagaatgatgcccagtggctcaaggcaggaaaggaggccagtgtggtgggggccaggtggtcccaggtaggggatgcagataaggctgggggtcgctgggttttccctaaggatgcagtgggatcccagaccttgcgggctttgagtcccagtccagatctcaggttctgtcctgatggggccctgactcatatggactggcaaagcttccgggatttggaatctcaggatctgcccagcccttgtgcctggacacagcacataagtgcgtccactggtctctctcttccactgccttctgtcagtagaagccaccaatcgagaaacagggagttttgatgttacactggtctgctctggagttttatatttattagactgaattgcactttttatcttcttaagaaggactaaaaaagctgcgaggcctggcaggggatcagggaggatgagtgtcctgagcagagaggtagggttaccaggtatttctgtttgccttgaactggtcacatagccccagtgcccctcagcagagagacagggtgaatgaaggagctggtgtagtcagtcctagaggagacacacagatgcctctgagaaagccggttgcagatgacacacgcccaggctcagtgcaggtgacctgtgggcatggaaagtagtacaattcagggatgtttgcttatcgcttattatgtatttataatggtgtcgtatggaatattttattgaaaaggccagaaaggtcttctttacccacgtgtttctggctctgccctgggtgaatggagtgcccgcatctctccctcttagctgggaccacacaggagatacttgcatgcctgtcccttcactgctagtgagagagtacagatggtgagaaaagacaccagtcgtggaccatgtgcggtggcttatgcctgtaatcccagcactttgagaggctgaggcgggcagatcacttgaggtcaggagttcgagaccagcctggccaacatggtgaaaccccatctctaccaaaaaaaagacaccagccgtacgtctaggactgacacattgtcattatcatggacgctaatcacaaggtgtcgtgtgcagtggcgtgcaggtggtgtgcacgcagatctgcgaacagcccacctgcacgcaccagcatacagatgagctcaaagatcgctttcctagggcaccgtcacaagcactgcaacctgtgtccagctgcacaaaagggctgagagagtggccgcggctctgatggagaagggaagactgagtgttggggaccatgtggctctggtctacccaccaggggtggacctcattgccgcgttctatggctgcttgtactgtggctgcgtgcctgtcaccgtgcggcccccgcaccctcagaacctcggcaccacactgcccaccgtcaagatgatcgtggaggtcggcaagtctgcatgcgtcctcaccacgcaggctgtcacacggctgctcaggtccaaggaggctgctgctgccgtggacatcaggacctggcccaccatcctagacacagatgacatcccaaaaaagaagatagcaagcgttttcaggcccccctcccccgatgtcctcgcatacttggacttcagcgtgtcaaccactgggatattagcgggagtgaagatgtcgcacgcggccacaagcgccttatgccgctccataaagctgcagtgtgagctgtacccctcgcggcagatcgccatctgcctcgacccctactgtggccttggttttgccctgtggtgtctgtgcagtgtctactcgggacaccaatcagtgctggtgcccccgctggagctggagagcaacgtgtccctgtggctgtcggccgtcagccagtacaaggcccgcgtcaccttctgctcctactctgtgatggagatgtgcaccaagggcctaggcgcacagacgggtgtcctcaggatgaagggggtgaacctgtcatgtgtgcgcacgtgcatggtggtcgccgaggagcggcccaggattgcgctgacccagtccttctccaagctcttcaaggacctgggcctgccggcccgcgccgtaagcaccacgttcgggtgcagggtcaacgtggccatctgcctccaggtgaggtgcctggggcctgcggttctcgaaagctggctgttggcagcatggagacccagtttcccagttgttaatgtgccgttttgtagccgcctgatctatttctccttctctgggcctttgatatctcatttccatgtaacattttagcttcaagggttttatttttaaagatgttctattctagttggagaaaggcttatttggaaaaaaaacacattgtttttgaacagtgactaataactgtaagactctctaagttagatataaaacacagctaagttcttaaagcaagattgaacttactgttttaagatatctagcaatattaaattgaaacattaat

SEQ ID NO: 346 - DNA, 2557 bp, Homo sapiens
ctgatatttcagggagtttaacaatatgataatagttgtgtcccagaggtagacttttgtaaacagatttaaatttaaccttgaccttgtttttaacacattttattttacttactttttgaaaatgttcattttctccaacatcatacaatgcaatgaagctaacataacttggcttaggtagtcccttaccttggaaatgctaaataaattatattttaagtaaatttggtggactttgtgataaagctgttaaggtagttggttggatattcttttgaagcaaggctttttttattcccaaagatttctttagcaaaatttgcacattttaaataaagcagccgggaattcttatgtaggggcttcctgcattggcgaaaacagcacatgtctaacaaatttaaaggcttttttttttcagtgcatcagtacatccatcttttcacaaccatctgttatccggcagtaccatctcttatttccagcaagctttccacatgcgtgcaacttactgccgtttccaataagggtaatcaatcaatacaaccctttcagctctcaaactttaaaataaattgccttttaatgagactttaaaagtcatcactattagcagattatacatcatagttttccaaccagtacctaatgtatgttgcattagaatattaatttgttcatcccaatggtaaaataaaaaaacagctgaggtcttcatgaggtcattctaatggagctgaaagtgttcctttagcaatatttctgtcgtttcatgtattgttctgtggtcatgatgtcaacatctttttcatccctaagaagaagaaacgctagagagtcggatggctgaggaagagaaacctgctgctcttcctgagaaagagtgtggggctgctaagtcctcagaccaacccaagggcctcagtaagggccaaatggagtctagtgcggaggcccaaatagttcccgaagagagtgccccagcaggggccccacatgagaaaagtgtaaaagaggtcaaggaggtgtctccagaagtaaaaaccccttcctctgctggggaaggtgtgtccttctcaggatttgcatgtgttttgttgcaaatgatctctccagtggcttaccaacctgatgcctttccaacgctatttcgctatttcatcgctgggtcttatgataacaagtccactgttgtaggcttaatgtgcagagagtgtggcttgcgcaagtgctgtgtggcagctggttttccagtgctgcagctgatttctggttttcctttgccatgatacaatacgctttgcagccaggctgatgatgctatgtgagcttctttttttattttatttttttacccgccccccctcatctcaaatgtttgccagtcacattgctaatacatgtatatttttgtttttattttggggacagcaattcatatgcttttatttcaaatcgtacagttggattttggcacatagaggcttaaatggtggaatcgtttttgtttgcaaccgaaatgtgctatattttttatgcttcaatgaatactggtttgattttcttgacctcctgctgatgcttctcatatcattttctccccatggcagccagcccttctgatcatccccatatctcttgagttttcattcatctaacctttattagaagttcatcaagtatttttttttctattgttacaacaggacacataagtatataaggtaatgatgatccatacacttgctcttttagagatgattgaattttattatttttccccaaatcttttccagataactacatttagctctaacgaccacagtgaactactttgaccttaaaacacaagtgggacaataaagccttttggattgttgaataaataaaagtaaaaatgtgttatctaatttctgtgaagcacctctaaagccaatactggccaatgcttcaccagttagtcatgctccaaggattgaggtcatgaccatgggaataaagttatttcaatagttgactcttttgaaaagtttgttactcacatgacttcccagtatcaacagtgtaattcagattttcttatatctaccgtacggactaagtaatgattaggaatttaaatttttaaatatgtaatagaaactggcttgtaaattcttaagtcatatcatataaaattgatagcaaatatttacttatatttctgaaatttatcctcagatgaattctaaaaatttatgccagtaacctgtggatgcctaaagaattggccctgacatttgttaatcaagttaactgcaactattaacattatatcattgtgcattacttggccctctgcccatagcctaccaattcatttttaaatgataaaaccaatgaaaatgttcagtataaatcaattctttatctatatttagtccttactatatgttcttttgtaccctaacattagctgcttactcaatattcattagcttataacttttatgtatagaaggcacttgaatttgtttcttctgtaatacacatcacataatgtttaggagagacc

SEQ ID NO: 347 - DNA, 3578 bp, Homo sapiens
actgcaaacgtcaagtggtctccgccttccctgggttcggagcttcacttgctcttgagctctgcggtccggcggatttcgcggggcccaggggatggcggggagtgagatttggccagggtcatttcacactgccgggcctgcagccacgcacgcagctgctggcccggctgaggctggcggctagggagaggcgccagggggtcgcgcacaggaaggtgcaagttctctcctgttgccctgagtgcccactcccaggccctctgtatgagtgacacttcagtctgccatggaacctggccctgctctggcctggctcctgctcctgagcctgctggcggattgtctgaaagctgctcagtcccgagacttcacagtgaaagacattatctacctccatccttcaaccacaccatatcctggtggatttaaatgtttcacctgtgaaaaggcagcagacaattatgagtgcaaccgatgggctccagacatctactgccctcgagtgaccagatactgctacactcagcacacaatggaagtcacaggaaacagtatctcagtcaccaaacgctgtgtcccactggaagagtgcttatccactggctgcagagactccgagcatgaaggccacaaggtctgcacttcttgttgtgaaggaaatatctgtaacttgccactgccccgaaatgaaactgatgccacatttgccacgacgtcacctataaatcagacaaatgggcacccacgctgtatgtcagtgatagtgtcctgcttgtggttgtggttagggctcatgttatagtggctcagtggctccatgtgttaatagcgatccatggggatctcgatggtccacagacctgcatgagtcattggcctgacagtaattacacatgtgagacacaacactcttggaggtcatcacagccaagcattgccacttaccatgaggaataaatgttgcttcattgtagccattttgagtctaaccgagactcatcaaagccttctgtcagtacagcccaagttccataccataaacgtttgttttcattccaagaagtagttctgcatttatcgagatctggggttcttaatttggaagaatacatgcatgagatgcagtaggtcctgagactgtaagatattaggagtatgttataggggcatgtatagatgtgggcttttcaggagaaaagtaaccattggtttaaatataatcatgagttcatttgtagctttagaattttaaaacattgactccaaactgaatggactatttccttggaaattctgactgagtccctggaagagtagtaattccaacaattccagccatttgttcaattaattttcccaacattcttctcccagtgctgggaatcacatttcctctgttctgtgcagaagacaaaaaggcaatcataaaagtttgttatatttgtgggggtgcctggaggaggattttcctcaacttaatggagccactgtccataaagtggctgttatcccttcatataattggtgagatcagccttctccttgacttggcacctaattatgcttcatgagatcctagattccacctgagtcaattgtgtccagagccccaaaccaggatggagttgttttccccagatatggggttctattcagccatagataatctagacagaggatttcagaatgaaaggaaaaatgtgtggagattagtcctagttcattctgagggccgactaagtggctcagccagcttcttactccatctgcagttcatactgccaaagagctcccacttccaaatccccagtgactttatggagaagattctgcattaaattgtctttcgaatgatggggaagcaaggcataatatgcgatgatgaggagaaagtagaccagtgaggtgattgcaagactaacaaggagactcaatgggaagtttttctttcttttagatattgcttttgaagtagatggtaaaatttttgtcatccttcttgtattttttgtaccccaagttacaatttttcttcttccttgtaaataatttaaacagtatttatttttgtaaggcataactagaaactaaaatatattctaaaaaattcattattctgaacaaagtgatcaaattagaatacatatttttcaacagtggtagagcttttaatatatgtttattgaaagttatctataatacttgcaccagtgttgaaaaaagttaacatgtaggcaagagcaatatgtttgtctcaaggatttttccatggtttcctcagtgatggtgtcctggaattattcaggtggtgaccatcactggtctaagtttgtgtgcagggttttcagacgtgtttttgtgaaacttggtagaaccatggctaataaagaggacagtgttgtcagggtccatctgccctccatagaaaaatgtctctggctcataaaatgagactccctcagggactaaatatgaactgacagcagtaactctgatacagaataatctaaattgcatcaaatggccttaattcagagtttgttaggcttatcagtatgttgcttttaattggggtgggaaagtagagggagagaaagcaagacatttattaagcacctcgtatgtgccaggcactatgctaagcactttacataagttaggattaatccctgcaagaatcctataaagaatgttactagcatttacacttcccaaatgaaggtaccaaagctcaaacgcaatgttgtgaagctgtttccttcagatttaggttatgtgggatgatgtgggattgaagaggaaagaaaggtgggattatccccctaggaagactttcaggcctgacttcataggaattcatccatcttatcatgtggagtttatctcaccctgctgttgcaggatgctatttgcatgtgtccccaggtgatgttttttctttggggagtaggggtttggcttcctcattcatccctcttgctaaaagaggagatagttgatgttgcatctaaagatgctataagacaatgaaagtttgatgttgtacatacctacaagtaccatttttgtgcatgattacactccactgacatcttccaagtactgcatgtgattgaataagaaacaagaaagtgaccacaccaaagcctccctggctggtgtacagggatcaggtccacagtggtgcagattcaaccaccacccagggagtgcttgcagactctgcatagatgttgctgcatgcgtcccatgtgcctgtcagaatggcagtgtttaattctcttgaaagaaagttatttgctcactatccccagcctcaaggagccaaggaagagtcattcacatggaaggtccgggactggtcagccactctgacttttctaccacattaaattctccattacatctcactattggtaatggcttaagtgtaaagagccatgatgtgtatattaagctatgtgccacatatttatttttagactctccacagcattcatgtcaatatgggattaatgcctaaactttgtaaatattgtacagtttgtaaatcaatgaataaaggttttgagtgt

SEQ ID NO: 348 - DNA, 6040 bp, Homo sapiens
atgaaggtattcaagagacgatatttttacttgacccaacttcctgacggttcatatattctcaattcctataaagatgagaaaaattcaaaagaatcgaaaggttgcatctacttggacgcctgcattgatgttgttcagtgccccaaaatgcgccgtcatgcttttgaactcaagatgttagataaatatagccattatctggctgctgaaactgagcaggaaatggaggaatggttgataactttgaaaaagattattcagatcaacaccgacagtttagttcaagaaaaaaaggagacggtagaaacagcacaagatgatgaaactagcagccaaggaaaagccgagaacatcatggcaagtttggaaaggagcatgcatccggaactgatgaagtatggaagagaaactgaacaactaaacaaactcagtagaggagatggaagacagaatctcttttcttttgattcagaagttcagaggttggacttttcaggaattgaacctgatataaagccatttgaagaaaaatgcaataaacgtttcctggtgaattgccatgatttaactttcaatatcttgggccaaattggagacaatgcaaaaggaccacccacaaatgttgagcccttttttatcaatcttgccttatttgatgtaaagaacaattgtaagatttcagcagactttcatgtagacctgaatcccccatctgtccgtgaaatgctgtggggctcttcaacccaactggccagtgacggtagcccaaagggctcttcacccgaatcttacattcatggaattgccgaatctcagttacgctacatacaacagggaattttctcagtgacgaatccacatcctgaaatttttctagttgccagaattgaaaaggtactacagggaaacattacacactgtgcagaaccctatatcaaaaattctgatccagtaaagacggcccagaaggtgcacaggacagctaaacaagtgtatagccgccttggacaatacagaatgcccttcgcttgggctgccagacccattttcaaagatactcaaggctctcttgatctggatgggagattttctcctctgtataaacaagacagtagcaagctttcaagtgaagacattctcaagttgctctcagaatataagaagccagaaaagaccaaactgcagattattcctgggcagctaaacatcacagtagaatgtgttcctgtggatttatcaaattgtattacttcttcatatgtgcccttgaagccttttgaaaagaattgccaaaatattactgtggaggttgaagagtttgttccagaaatgacaaaatattgttatccatttactatttacaaaaaccatctgtatgtatatcccctgcaattaaaatacgatagccagaaaacatttgccaaggcaaggaacattgcagtctgtgtggaattccgggattcagatgaaagtgacgctagtgccctaaagtgtatttatggaaaacctgcagggtctgtttttaccacaaatgcttatgctgttgtctcgcatcacaaccaaaatccagagttctatgatgagattaaaattgagcttcccattcacctacatcaaaaacatcgtttgcttttcactttttatcatgtaagttgtgaaattaacacaaagggaacaaccaaaaagcaagacacagttgaaactccagttgggtttgcctgggtacctttgctgaaagatggtagaatcatcacatttgagcagcagctgccagtttccgccaatcttcccccaggctacttgaatctgaatgatgcagaatcaagaaggcaatgtaacgtggatattaaatgggtagatggtgcaaagcctttgttgaagattaaaagccacttagaatctaccatttacactcaagatctgcatgtgcacaaattcttccatcattgccagctgattcagtcaggctcgaaagaagttccaggggagctcattaaatatttaaagtgtttgcatgccatggagatccaagtcatgatacagtttctacctgtaattcttatgcaactcttccgagttctcacaaatatgacccatgaagatgacgttcctatcaactgcaccatggttctcttacatattgtatcaaagtgccatgaagaaggcttggatagttatctaagatcattcataaagtatagcttccgacctgaaaaaccgagtgctcctcaggcccagctgatacatgaaaccctggctactacgatgatagcaatattgaaacagtctgcagattttttatcaataaacaaattgctaaagtactcatggtttttctttgaaataattgcaaagtcaatggccacatacttgttggaagagaataagattaagcttccccgaggccagagatttcccgagacatatcatcatgtcttacattcactgcttcttgcaataattccccatgtgactattcggtatgcggagattcccgatgagtccagaaatgtgaactatagtttggctagcttcctgaagcgctgtttgacactaatggatagaggatttattttcaatttaataaatgactatatatctggattcagccccaaagatcctaaggttctggctgaatacaagtttgaatttctgcaaacaatttgcaatcacgaacattacattcctctgaacttgccaatggcatttgcaaaacctaaactgcagcgggttcaagatttttttcatttgcggtggaccgtttgacttcagtagattcaaatcttgaatacagtttatcagatgagtattgcaagcatcacttcttggttgatctacttctgagggaaacttccattgctcttcaggacaattatgagatcagatatacagctatctctgttataaagaatcttttgataaaacatgcatttgacacaagataccagcacaagaaccaacaagccaaaatagcacaattgtacctcccctttgttggactacttttggaaaatatacagcgattagcaggtcgagataccttgtattcttgtgcagccatgcctaattctgcatccagagatgagtttccatgtggctttacttcacctgccaatagagggagtctgagcactgacaaagacaccgcttatgggtcttttcaaaatggacatggaattaagagagaagattcaagaggttccctcatcccagaaggagcaacaggatttccagatcagggcaacactggtgaaaatacccgacagagttctacaaggagtagtgtatcccagtataaccgcctggatcagtatgaaatcagaagcctcctgatgtgctacctgtatatagtaaaaatgatttcagaagatactctcttaacttactggaataaagtatcacctcaggagctcataaacattcttatacttttagaagtatgcttgtttcactttagatatatggggaaaagaaacatagcaagggtgcatgatgcctggctgtcaaaacacttcggaatagaccgaaaatcgcaaaccatgcctgctcttcgaaacagatcaggagtaatgcaggcccggcttcagcatcttagtagcctagaaagttcatttacacttaatcacagttctacaacaactgaagcagacattttccaccaggcacttcttgaaggcaatacagctactgaagtttccctaacagtactagacaccatatcatttttcactcagtgcttcaagacccaacttttaaataatgatggccataacccattaatgaaaaaagtgtttgatatacatcttgcttttcttaaaaatggacaatctgaagtgtcgctgaaacatgtatttgcctcactgagagctttcatcagtaagtttccttcagcatttttcaaaggaagagtaaacatgtgtgctgcattttgctatgaggttttaaagtgctgcacatcgaagattagctcaaccaggaatgaagcatctgcacttttgtatcttttgatgagaaacaactttgagtataccaaaaggaaaacctttttgaggacacatctacagataataattgctgtaagccaactgatagctgatgtagcactaagcggaggatcaagatttcaggagtctttattcattatcaataattttgcaaatagtgacagacctatgaaggcaactgcctttcccgcagaagtcaaagacttgaccaagagaatccgcactgttcttatggccactgcccaaatgaaggagcatgagaaagaccctgaaatgctaattgatctccagtatagcttagccaagtcctatgcaagcaccccagagctcaggaaaacctggcttgatagcatggccaagattcatgtaaaaaatggagatttttcagaggctgcgatgtgttatgtccatgtagcagctctagttgcagagtttcttcatcgaaaaaaattatttcctaacggatgttcagcgttcaagaaaattactcccaatatagatgaagaaggagcaatgaaagaagatgctgggatgatggatgtccattatagtgaagaggtcttgctggagttgctagaacaatgtgtggatggcttatggaaggcagaacgttatgaaataatttctgagatttccaagttgatcgttccaatttatgagaaacgtcgtgagtttgagaaacttactcaagtttatagaactcttcatggagcttacacaaaaattctggaagttatgcatacaaaaaagagacttttaggcactttcttcagagttgccttttatggccaatctttttttgaagaagaagatggaaaggagtacatctataaagaaccaaagctcactggcctctcagaaatttccttgagacttgttaaactttatggtgaaaagtttggtacggagaatgtcaaaataattcaggattcagacaaggtaaatgccaaagagcttgatccaaaatatgctcatatacaagttacttatgtgaagccttactttgatgacaaagaactcacagaaaggaagaccgagtttgaaagaaatcataatatcagcggatttgtttttgaggccccttacactttatcaggcaaaaaacagggctgtatagaagaacagtgcaaacgccgtacaatcttgacaacttcaaactcgtttccttacgtgaagaagaggattcctattaactgtgaacagcagattaatttaaaaccaattgatgttgccactgatgaaataaaagataaaactgcagagctgcaaaagctttgctcctctactgacgtggacatgattcagctccaacttaaattgcagggctgtgtttctgtgcaggtcaatgctggtccattagcatatgcaagagctttcttaaatgacagccaagctagcaagtatccacctaagaaagtgagtgagttgaaagacatgtttaggaaatttatacaagcatgcagcattgcacttgaactaaatgagcggctaattaaagaagatcaagttgagtaccatgaagggctaaagtcaaatttcagagacatggtaaaagaattatctgacattatccatgagcagatattacaagaagacacaatgcattctccctggatgagcaacacattacatgtattttgtgcaattagtggtacatcaagtgaccgaggttatggttccccaagatacgctgaagtgtgaggaaatgcagatgtacgtgacaatgagactgacctttctcaggaatatttggagctgtgcaaatgttaaaatttaaagatttgatatacatggagtgtttcttctcgacaccaaaattttcatgtgttccaacagggtgcttacatatttgtaaataagcaacttgaaagtgcctggaagattgcaccactgtgcttggtttgtacttttttaggtaaatctatatgctgaaaagtagagctcaaaaacagtagttcaatttgcttaattattgcttaaaataatggtactatgtaaaattgtataatggaatacaataaaaggtaaaactt

SEQ ID NO: 349 - DNA, 3521 bp, Homo sapiens
tgcagggaggcaggaattgcatcaggacctagccacaagggaataaaggagcagctactccctcccggtgcagtgccctgcaggtgtcagctgttacctgtgctgctcctgtgtcacaaaggatgagcttcttcaactgtctgaataatcctgggtcccagagcaggcatgatacccttcacaatatcgcaagaagagggagtaaatgcttacccctagccaggcctctctgtcagtgtgtgtatatgggagagggcatttaaaaccctattggttttttttgcctcagtacacaaaacatttttcaatgatgatacccagatacaattatcttaccactgaggggacaagtttctaccctcctcctaagggattctgaaagccagcaggcatgatttctaaaggagctttaagcaggagcaaagcttagctgaccatacgtgtgtgtgtctctcaaaggcggcatactggggtcttggtgtgcaacctgggaacagtgttcacagatctccaatgccagttgttctcatttaaggaaaagtcattacccagagtccaggaatgtcaggcccctgcaagggattttcctatggcctgtctttcctatggcctctctttgttagcttttgctgcagcagtgcttcatcacaaacagccccagaatttcagggatgtttaatcagctgttgctcagccctgatgtctatgtgttggctgatcttggctgcgtttggctgatcgcactgctgcttttggctgggcccactcagtcatgagggatcagctgaactagaacagggcatggccggagcagttctgcttcatgcgtatctcgctcctcttggggccagcaagttagcctgaatacattcttcttatggcagtgtcataaagagggcaaggccagcccaaacactttccaaacctttgattatgttctgtctgctgacatctcactggccaaagcaagttaaatggctaagcccaaagtcgggtgtggggatgcactttccaacatggaggcgatggggagggagagaatattttaaacaatggtctaatctaccacgcctaccaatgtgcacaatggctgcaaggatccagtgctgtagcgggcacacagagcctagctaccgtgcctggcacatagcaggagcttgtaatgatgccaggaagactgccaattcctttttcttttccttctctcctcctgcaggctttcaccagttctcaggatgcccatagggatgggtgaagcctgcctggcctgtggtgctttccagtggccgtcatctcattagggccccacagtggcattaggatgcacctctcggcggtgttcaacgccctcctggtgtcggtgctggcagcggtcctgtggaagcatgtgcggctgcgtgagcatgcagccacactggaggaggagctggccctcagccgacaggccacagagccagccccagcactgaggatcgactacccgaaggcactgcagatcctgatggagggcggcacacacatggtgtgcacgggccgcacgcacacagaccgcatctgccgcttcaagtggctctgctactccaacgaggctgaggagttcatcttcttccatggcaacacctctgtcatgctgcccaacctgggctcccggcgcttccagccagccctgctcgacctatccaccgtggaggaccacaacactcagtacttcaacttcgtggagctgcctgctgctgccctgcgcttcatgcccaagccggtgttcgtgccagacgtggccctcatcgccaaccgcttcaaccccgacaacctcatgcacgtctttcatgacgacctgctgccactcttctacaccctgcggcagtttcccggcctggcccacgaggcacggctcttcttcatggagggctggggcgagggtgcacacttcgacctctacaagctgctcagccccaagcagcctctcctgcgggcacagctgaagaccctgggccggctgctgtgcttctcccatgcttttgtgggcctctccaagatcactacctggtaccagtatggctttgtgcagccccagggcccgaaggccaacatcctcgtctcaggcaatgagatccggcagtttgcacggttcatgacagaaaagctgaacgtgagccacacaggagtccccctaggcgaggagtacattctggtctttagccgaacccagaacagactcattctgaatgaggcagagctgctgctggcactggcccaggagttccagatgaagacagtgacagtgtccctggaggaccacacctttgctgatgtcgtgcggctggtcagcaatgcctccatgctggtcagcatgcatggggcccagctggtcaccaccctcttcctgccccgtggggcaactgtggtagagctcttcccatatgctgtcaatcccgaccactacactccctataagacgctggccatgctgcctggcatggacctccagtatgtagcctggcggaacatgatgccagagaacacagtcacacaccctgagcggccctgggatcaggggggcatcacccatctggaccgggctgagcaagcccgtatcctgcaaagccgtgaggtcccacggcatctctgttgccggaaccccgagtggctcttccgaatctaccaggacaccaaggtggacatcccatccctcattcaaaccatacggcgcgtggtgaagggccggccaggaccacggaagcagaagtggacagtcggcctatatccaggcaaggtgcgggaggcacggtgccaggcgtcagtgcatggcgcctccgaggcccgcctcactgtctcctggcagatcccatggaaccttaaatacctgaaggtgagggaggtgaagtacgaggtgtggctgcaggagcagggggagaacacctacgtgccttacatcctggctctgcagaaccacaccttcactgagaacatcaagcccttcaccacctacctggtgtgggtccgctgcatcttcaacaagatcctcctgggaccctttgcagatgtgctggtgtgcaacacgtagcgagcaggccacagcctggcctcgggaaggtggctcctgcagttcagcgtccctgggcccattaatcccactgtggagacttctgggaactatttattgagcaggcctgtgcctccacatcatcttgttgtctctggggtgtggtgtcacagcactcctctttgccctagagataagggacctgacttccccttctcccatcctgaacatttgtacccctggagaagttccttagcagggaggaggaagaggagaggaggaagcaaagaatcacaaggaacctctggctaggtgatcctgatgtttcctactgagtttttctggtatccagatttctggaaaccgagtaatcatgtactgtttgattgggtggttcatctgcttccatcccagtgaaatttacctgtagcccagtgaagggtgtgtttggaacattcattaaatgattctaagcatc

SEQ ID NO: 350 - DNA, 4708 bp, Homo sapiens
gtttgcagaccagaatttgaaatggagttgtttgaggagaccattgtgtgtcttcgtgaaaccgattgtgtggaacctatcagggctgtggaagttttagcgaatgccttttcccagagcccagcattgtggattccgagaagtggcatgtgtgtctcagtgacttccagtgatgcctgccactctgaagagatgaaggagtgtcctggcaagacctggaatcccagctgtagcacctgtggagagatgtgatttagatttggatttggggtatctgtgaggaagagtcccagagtttttcatcctgaagggggcaactcttgggcagtggtccaacagttggccataaatgtgaagctggggcgctgtgctgaccagggcatccagcgttaagacgactgcctaactttggccacatgcgttgttttttgggttccgtttcgtatcagggcatgctggctaaaagatgggagccagcaacattctcttgggctccatcatttatatgagggttggcaatgccatctgtaccctctgtgaactcccactgctgttcactcagttaatctaagggacaccaaggggtctgcgggaggatgacctcacaagggactgaggacatgggagaccaccctcctgtgggtagaatacaccagagggcccaggcttgactctgtcctgtgttaaggaggcatcggtagttttgctgagcttgtcaggtgtttataatggacagttggggattggggtcctaggcttaggtctttgagagcctctgtgtccaggagagcccagtaggcatccagccatttactgctttaatagggtagcatgaggctgagagggatagtttcttgcatccaaagcccttaggcaccttatgtccatcctaagtgggccagagactccagggctgcatagagcttgccagagcttctataatgaaggggtctctgagggcaccaacaggagtgcccatggattttaaggtttgattatagaggttgtttatggagggtgccccatttaaagcaagctgatttgtaagcagcagcaagaagattaagtaaaatttgtaaatgaggactacattgccatcagaacctcgaaagtatctaaagatgttggacttgtatgtccttaatgagtgtgacaatgagtttcctcatttgtgctcctggagaaggcggatgtggtgaagaccctgtctgcagacattgtgtgccatggcaaagccgtggagctccctgtgggtggcctgcaaaggtgtatgtgcccctcagggcagaaggcaaacggcagccaagaagctgtgcaagtagacacttaatgggacatgttagccaaatctgtaagagcaaaatattggccagttatttattgtgtagaattaataattttaataataatggaaattgggtaatggatgggactgcagcaataaggttgtagtaatccaccatgaggcacacttttttttttccaggtttaaggataggaaagattgggctgttcaatggagaaacaagggtataatcacccctttattaattagtaagttttaatccttgaatacctcatattaactgttttaactggaggtccatggggcatcattttatcaagctagtttataactgccaaagactgactttaattttaatttattatttgttttattagagtgtctgtgttcaatatgggatattagggcgttgggtactatgaccacaggaaatttagacaggctacagttaaagtgaagcataccttacccatccaccccccattttatatttagttgcctttttaaaaagattataggggtacaatgtttagatttagtgggatctccaggtataactgtaatttgagccccagtgttaagactatgaagctttgtcaatgggtacattttagcaaatgttacaattaatttagaacctaagttatggagacacaaaagccaataggcacccttttatgttttggttaaatgtttcagtatatacatcttatttatttgtaatattagtatataatttgttgtatacatttttagtgtataagcattggatttctaattggatcagattagggaccttccgtttagctgcatatgtacatatacatgtacaatttattatatatttgcgttaaaatagcctatctgcatgtgtatatatgtgtgtatgtgtatgtatatgcactcacacgcataaatacacagtctatttagttacctttaatgttttttcccttgtacctaggctttttctcgctttttcctttttttctgattttgtggcaatttagttggaaggaggcggtcccagcatgttgacaggcagggtgttcagagtgcccaggcacactggtggggggtggttacaggctcacgtagctcaggggcttctgcaggtctcaggggagtgggaacaaagtgtcccaccccttccccttttcctcaaacctcaagccactggtctctatggatagatcctttgcatcccaccggattgaggaatgagtcacaacagctgcaaggctcttaaagcaacatttaaactttttggcggctgtcatttctgtgaggagggtgcctctcaccagccgcatggccggaggatccctgcagcgctttggagaccaacacccagatcctttgcccaggagtgcgattaattcctcactggatgctgggggagggcccctcaggtgagcagcccaccactgacttcagcgttgctggctcggttatcagactctcatccaacacaagctcacagggaaagccgttccttgctccttgtggagggagctaccgtcattgccctgagaccaccagccaagaaagtaggtatgtccaggtagggaattcagagggacccagtgcatccaattatacaattatacccagaaggtcctgtgtaggggactgcgattgacatcaccctagtctgcagcaccaaggactgaatgagctcagtcctcttataatttaggctggactgtcacagacactggcagacacagcatacgtggtgcagccaaagtgcaaacatgccagcagcggccatgctccccagggtgggggtccagttagtaagccacgcgcagccaagaggcgaggcatgccctgtgccacacacggactcaccctgctcactgtgcccgtggtatcgaaatgtacccacgtttaattcataaaggagaggctgctgtcattgaaagaaaagtttgttacttgcatttctggagaaaaggagcgcaccaggccacgcagggccacaggaggaggacgcaccagagtggtcaggaggcagaactaggcgagcagctttccactgtgtctccatggcaaaggcgaagatgggcgggggcagagtgtaggattggcaggtttgaatgtcttgggcagtagctacaggggtggtctccagctgcctggtgcctggccctgggtgatcagggtgaggggatactgccttctgcagtggaagagtcaaatcgaggagatggactctgagttggttagtgtgcaaaggtgcactcccaagggacccctttgctatctctaagaattggcctgccctgggaagggcagtctctccccagtcagtgaggtccccaagatgtgaaaacattatacattataaaaaagcatgattaatataagctcattctagcatttcaggttacagcttctagaagaggtttgtagtctcaaatgagtaggtttttcctctagagaggggcgggcctggaccttcaagcaccccttggtgtgtttaggagctcaggagcagaagcacctgcctgcagccctgcagctaaggaagttctctcagtcactcagagcagggaggggctgagagagtcatgtgaggctcccggggtactacgacagccctcgaggtgaaggattggccctgatcataatagagaaccctgaggaagtttactgtcatgagtctcggctggttggcgcatgtgacctttgaaggatgaagatggagtttgcaacatgagtatctctaaccttttgcttttcagggatcattttcaaaaattgcattggggccttcgttatttaccatagtattttcactttcatagttttgtcacctttttgtactgtgaacagttcaaccagtgaccgacttctctctcatgctgtttaccccacacacaatttcccactcaattctgaaaataagaacctgttaataggttggaaagctgtgtactctattcatatattgttctttcatgctagtggagagtggtgtcattagcatcttaattttagagttgtgaaatgattttaccaattaggaattgaatgtgtattttttttctgtttaataagaagagcaaatttgaataaataagctggtgtagataaacttaataatcatgctttttcttgtttggagataggtgatgtgttgtcatatcctgtgatacaggtcactcatctggccttctgtttctgaagtttaagtctggtttgaatatgtaataatactactcagcatttcttgttgcctaagtgagacgaaacttaaatgttatgatatttacttcatgtattcttgtactgttcatttcaattaattggtattgtatatctaatatgtgatatttgaactgaataaaacttacagtgttgtaaatgttctttaataaataatcacacctaagt

SEQ ID NO: 351 - DNA, 3541 bp, Homo sapiens
atcatgtggacttgtggcttattttatttgagaagttgtaatttgttcgtttggccagtggcgaccccttcaagctggcttctgtgtcctttggtatgtccccatcattcttggagcatgttcttactttctaatacaaaaagacattccatgctcatctttgtatttcctctgcactaactctgcaaggtgctttttctctaagatctggtctcttttagcagaaaatggtatttagaaaccaagatctgggcagtaggtatgctcattgtttggtgccattgctgttcccaagccctctcatggaacagagctagggaacaaacatgaatgcatgtgcatgcacacacacacacaccccactcatacacacacacctatacatctctgtatctacacataccgaaagctgtaggagtttataccagtacttccaattccaaccttattctagttttcaccctttccaaatttgtaattctctgactataagaaatctggctcctgctctttccctgctgccactgaattgtatagaggcggagtctcgggtgcattcaagatccggcttcactcgtaacccactgccatggccgaggaaggcagtgctgctggaggtgtaatggacattaatactgttttacaggaggtgctgaagaccgccctcatccatgatggcctagcatatgaaatttgcaaagctgccaaagcctcagacaagtgccaagcccatctttgtgtgctgtgtgtgcttgcatccaactgtgatgagcctatgtatgtcaagttggtggaggccctttgtgctgaacaccaaatcaacctaattaaggttgatgaccagaaactaggggaatcggtaggcctctgtaaaactgacagagaggggaaaccgtgtaaagtggttggttgaagttgtatagtagttacgaactatggcaaggagtctcaggccaaggatgtcattgaagagtacttcaaatgcaagaaatgaacaagtaaatctttggcacacacacacacacacacacacacacaaaagaaagaaaaaataacctcaaaaataaccaatctattgctgcctcaattcacagtcccctccctgctgccctcagacattctcctcaggctccacactgcagcccaggaaagaagcccttcaccaaacgaggccaaatatttctttgtgggcagtgttccttctgacatcactgaggaggaaatgaggaaactgtgagaaatatgggaaggcaatttcacagaaagagagtttaaataaattaacaaaaaggaaaaatgaaaaaattaaaaacgacaacaaaaaagaaatatgggaaggcaggtgaggtcttcataaggatgaaggctttggctttatgcacttggaagcacgaaccctagtggagattgccaaagtgggtctggacagtatgcagctgtgcgcaccctgcctgccatagtgcatcccttacagtctgaaaccttctaacaaacttttggaagaagacttttctttggccaggtggagagggctgtagtcattgtggatgatcaaggaaggcccttagggaaaggcattgttgagttctcaggacagccagttgctcagaaagctcaggacagatgcagtgagggcttcttcctgttaaccacgtttcctcatcctgttactgtgtagcccataggctaattaggtgacaaagaaggacttccagagaagctggttgtaaagaaccagcaatttcacaaggagtgagaacagccaccccagtgtgcacagcatggcttttgaatataagtatgccatgcactagagggtactcattgagatggagaagcagcagcaggacgaagtggactgcaatatcaaggaggctcatgagaagctggagatggagatggaggttgctcgccttcatcaatgccaggtcatgctaatgaggcaggatttgatgaggtgtcaagaagagctgtggaggatggaaaagctgaacaaccaagagatgcaaaaacgacggcaactggagcccatgcgagaggagtgcaggcactaggaggaagcaatgcactggtaatggcaggaaagattcactggaaccttctctgatatgagacagcaggagatacagatgggccagatggctgtgggaggtgctataggcataacggaggcaccatgccccctgcttctgtgccagctggcagcccagctcctccagaacctgaacctatgatgctagattgaccccaccaacaacggaatgctttggccaagctgctgcaacggaaggaattggggcaattggcggaactcctcctgcattgaattgtgcaactcctggagctgaatttactccaaacacacgttgctgatactaataaagctgcagtgtctagtttctcaaaacctttaaaagggccctttttggactagccagaattctaccctagaaaaatgttaagagattcctcccaatagttaggtctaccctacctatactactgtagggagtattttggaggaagagggcaagggaggagtggtatttaacaaaccagttctgtgtggtatattgtttaactgatgagttctctgtggtgcattactgaggtctcaaatgtgactgttgaagacctgggggaactacagtgaaatgaatccagttagagacccattaatcttgatcgttctttttttctccatcctgtttcatttgctttcttatccatacactccccaaccccacagacactgccacatacaccacaaaacacaacctcctccaatgaccttcgccccactgctccattcactcccaggtgagaattcaggcaaatgtccacagaggtcacaaacaatgtacgtatagttcttttatatccgatatattatcccttcttgtcctaaggaagacattctctcttagagactttcatttcagtgtatcttttttaaaaatcttgtgttaacttgcctcaatctttttcttggataaggacaaccaggaatggccgttttgtgtctatgatgttgctgttcacaacttttcttgataggcctagtacaatcttggaaacagagttgctgtatgctgaaggtctgagagtagctcttagccttgcctatcttagatagtagttatgctgtgcatatttaattgatgtactatgtttgatttgttgctgatactttaaatttgaagtttttctgagaaatggagcagcaatgcagcatcaacttgttaaattacatgttaagccttgaaaaaaaaaggagatcacatcagtaatcccagcacattgggaggccgaggcaggcagatcacgaggtcaagagatcaaaaccatcctgtccaacatgttgaaaccccgtctctactaaaaatacaaaaattagctgggcattgtggcacgtgcctgtagtcccagctacttgggaggctgaggcaagagaatcacttgaacccggaagacagaggttgcagtgagcagagatcgcgccactgcactccagcctggtgagagagcgagactcagtctc

SEQ ID NO: 352 - DNA, 3886 bp, Homo sapiens
gctagtggagcggaagatggcggcggcggcggcggccgctgcagccgggacttcagttgggctgaggcggcgatgttctcggtcctctcgtacgggcggctggtggcccgcgccgtgctcggcggcctctcgcagaccgaccccagggccggcggcggcggcggcggcgactacggactggtgacggccggctgcggcttcgggaaggacttccgtaagggcctcctcaagaagggcgcgtgctacggggacgacgcgtgcttcgtggcccggcaccgttccgcggacgtgctcggggttgcagatggtgtaggaggctggagagactatggagttgatccatctcaattctcagggactttaatgcggacgtgtgaacgtttagtaaaagaaggacggttcgtacctagtaatcccattggaattctcaccacaagctactgtgagttgctgcaaaataaagtccctttgctcggtagcagcaccgcctgcattgtggtgctggacagaaccagccaccgcttacacacagcaaacctgggcgattcaggcttcctggttgtcaggggtggtgaagtcgtgcaccgatcagatgagcagcagcattacttcaacactccattccagctctcaatcgctccccctgaagccgagggagtcgtcttgagcgacagtccggatgctgctgatagcacgtctttcgatgtccagctaggagacattatcctgacggcaacagatggactctttgacaacatgcctgattatatgattcttcaggagctaaaaaagttaaagaattcaaattatgagagtatacaacagactgccagaagcattgctgagcaagctcatgagctggcctatgacccaaattatatgtcaccttttgcacagtttgcatgtgacaatggattgaatgtgagaggtggaaagccagatgacatcaccgtccttctttcaatagtggctgagtatacagactagctgaggtgtcaagtcctgcctttcctttcatcatcccaaatttcccctgccgtgtgtgctgatcctgctggcaggaccacatttctttgccactgatctcaatggccagtgatgtaagtcttttgcctgtcttcttgagactcgttgagatctttgttgagaaccactactatcattcactagctcatatctgccggcagcaattgaagagatccaatatttgaagattggccttcatttctcgatgttctttccatgatggggatggaggtgttcagtgccaccgtggctgttacttttcaaagtagttgaagtattgaaaatgagtaatgttggtaaagtgaattcaaaatcctagtatgctaaagggatggtacaagtctaacacaaattgtacgtaatgatacatctactagaaacatacattattcatcaaaagaaatgttacatgtgtactccacaggcatagtctttgttatgatgattggtgtggctttatgtctttgttataaactcctatttttcaggggcttatgattctgctctaaaacattgctctgggttatacagttttgatcccaaaagcttttttgttacaaatcgggagaaaaatccattttagttctatggatggaaatatttcatgcttttaaaaagatgtttgtgttcctgtggttaaagttttggcagtttattgattagtccaaatcacaggctaaggcctgatctccaggaggggtaggggagacactttaccagtatttttttatggaaataatactcaaggttgtaaaacccctcaaagcctagaaatttaattgttatggctgaaattcctcctagttgtctgatagaatgcccctgaatgggaactctaggtcccaaggcctgaagggttgagaacagacagctgtaactttgaattttgttggctttcagtggtcatgctacctacccatactcgtactctcagaccttttattagtagccttgctttctatagagcatgcaccaaatccagtgagtccatgtggagagagcactgtgtgcgcagcggcagcagcacagacgtccatgaggaaaactcccagtgatgatctgacatttacaactaccccacatggaaatttaggggtttctgaatcaagcttaatgtttacagtttccaaatagccattttgcagtgtatagtttccttacaaaactaccccgcattcagttttcacattatctgcaagctgaaacttatttttaagttttgtgtacaagttgactgctgtaaagatatatatttttgggtcagtttttttccttcattaacttggtggtagaaaaaaatatatacttagaaatccttaaattaaagccatgttttatatataagtcaggtaacattggtgtatagatgagaatgcaattaaacctgatgagaatctacttgagaatatagaaagtctttctctaaaggagatactgactccctggtttattgcattaaaatttatgtttgaggttacctcaacttgttttaaaagattttgttttgtgaatttgtactgtatatttgagtaactgtcaggcttttatttaaaattgtttaacatgtaccatgtacatgtcattactatatttcaatgcatcatgcttgtaacaggcatttcatttataataagaatgagttattcatttgtaagccgttcagtaatttatctactactcctaaattggcataatgttagataatctattttgaatcacctttaattacatgtcagaatgccttaactaccctaacttgacaaaacagaattctttggtagacgcggtgggggcggggtggggggtctggacggagtctctatttaaggagaaatcatcatgctatgataaaacacagaagcatgagtggcaagtggcggggtatttattttgcacaaactatttgcagtctctgtgtatttaaaaagtaaagaaagttgcatccagaagggttttgttagaatgaatacatttatattaggactgacaacttcagctcttttgtttaggttttcaattatttttggtaagagtatgtagccttatgatctggatatattttgcattcattttccaacgcctacatttaattcctggtaagagcagtgctcgtcaagtttctggtttttctctgctctcatttaacccgtcaaacacaatctttgtaaagctagattggtggtgttttatacaacttatttactcagcttacctttttgagaaacgattgttagaaattgacgatgtgtttgttccagtgatactgaaagtagtgggggcaagaattgagtttcacagtggaattggctttggatctggcctatagattagtgacataaaatattttctctattttcccctgttctttttgtgttatgcacttaattttatgactgccgggggggtcagctggagtgctgcttaacaagtatctctcctactctcagtggtcagaggctgtgttggacccatagtagaattttccaggtcacagacccaagcttccatgggttgttactgtgctgtaccacttggtgggtctgattctgaacctgatgtgtgtgttaattatattttaagcaacacacacacacacacacgcctcatgtaatggacttttataacaaaagaaaaaatttggatttctaatttacaaatggcaaattatttatccctctctggatgcaccaaagaccagtaaagtttatagcttttccatctatatttataaagcaatactgtattataaaaatcaatatttttatcacatgcttgaaatttttattttgttgttttaaaatgtgcactctaaacatatcagaaccttatttcttcctatgaacttaagctgcctgcgcac

SEQ ID NO: 353 - DNA, 3636 bp, Homo sapiens
gtaactgccacagctccatgcaacatgaggcttgacatagctgggaagaaaaggcctttttttttgtctctgagatgaagtctctcttgtcgcccaggctggagtgcagtggcgtgatctcggctcactgcaacctctgtctcctgagttcaagcgattctcttgcctcagcctcccatgtagctgggattacaggcgcccaccatcaaacctggctgatttctagtagagacagggtttcaccatgttggccaggttggtctctaactcctgacctcaggcgatccgcctgcctcggcctctcaaagtgctgggattacaggcatgagccaccacgtacagccggaaaaggccttttagatcaaaatatccaataatgtccaaacgtgtctgcctagagagtataggtgaattaaatggggaagatagaaactaatgctttgtgaactggggcttccactagaacagagaggtcctgtgtaacctgcatagagcaaggctcagagaggtgtccaacagaatgggttcacaattttttagtctctcttaggtaggtttttcaaattagaccttcatttttagagttgatatgttacgctattatactgagtatatcaggcacattaaatccaaatggaagaatagcattccagagcttaataccaatggtcagggattagctagcattttggattatacccactagtgctttccattttaagatgatctgacatttgttagggatagacacccaagagacacccaagttttgtgctcttcttactggcacatttcaaggttatcctctcactttatttctagaaatagtcatttaatttgcatatttgtgacttatctttgttttaaaagcattccttctgaagtttcaagaagcacttactagaatcatgctttgagaaaaactgactaggatagaatctttccacctaaaattagggactggcttcaatgcccagaatttttagattgatatgccaataattccagtaacaagttttattatggtttttaaatcctgtcctaaagagcagaaaagtccaaaaggtaaatagccaaactctttcccacttaatttttatgattttgtgtctgtgttttaagaggaaacaaatccacttacttctcattcacattaaaatgaaaatgttcataaaaactgtttaatgctcaagaagccttcatgagccttttagagccttttgacatggttccatttgctgtttaaaatgcagaactgagttttgggaagaattaactcttgagaggcgaaatggttcgagtagggctgtcagaaagccatactctatgagaggaaaagactttccacaattccagtattacgaaggaccctggtcagtgagggaattgtggcctgggattttgtggtttcttaaaggtctgtacacaatttctcagcgtggtcctggtagattgaaatgtagtagtaccacgaaagcagagcagatttccaacaacattttccagcatgctcttgaaattttaacaaacttggccttttcacttcttgagggattttcagctaatctgtttttcagtaccatattaataagcatcatacagaattattaaacttgaggtatgtgtttggttttaaggtccaactgggatattagccacctcagagtccaaatccatgccagtgttgggttctgtatccagtgtaacaaaaacagccttgaacaagaaaactctggaggcagaattcaacagcccgtcccccccaacacctgagccaggtgaagggccccgtaaattggaaggatgcacaagttccaaggttacgtttcagtaagtaacgatgctctttactaagtggtgtatagaagaatctgtaatgactaacttgtgtgtttctttgatttgtttcctttagagagattttgattggctcgccggtaaattctcttcttcttttcatttgatgggccagctttttcattctaggctcctagctaagagatctcattcagatccaaagcaagtaccatgtacaaagagaattacttcccctaaactggtttggtaatcaggttcttctacacaaataattgatctggatgatacagactctgcatcaggagacaatcagtctttcaagattaaatacatcgatcatccctcttaatggttcatgagcagcccaagaagatactagatctttcagagactacttagaagggcacgtttttacaaccttcttttctagtcttcagttaaagatgtgcctaatattgctctatcctgaaaatgaaaacatactatgtaaagagttatctgtatagacttgcttcagagtggcactttgattgtcaaagagttaatcctgctattgaatgtgtttcagacagatctagtggaggatcaatttgttttataacaatggcagctcttttttgaaattagtctacagttttgctttagttctcttgccaggatgtcagctagtttgtcacttaaagaaaaggaagaggtgagacaaatcagatcagccgaatattgtaatcatggttaattaaacctctgatttcctgtcctatcaagagagaaagaaccccttttttgtaactctagctgtcttagcttaaaaggtgaaacctggacaaatgaagttggaattcaatttggatctatttttgccaactggtattttcttcctctcttgcattctctcattgctactattaacttttttttctcttctggaatgaatggccttctttgctgatttacagttttatctaatttcactgtgtttaaaagcacattttctcctgtagtcatgtgtttcctttcttttgactagagtcatttgaacagttctaacagaaagatgatctatattcattctccatctttcctattaaatttgtttaacacctaatttgacatcaacaatctggctacatttgaaccaatatccagacacaaaagcaatttggctgagacaagttagtttctgataaatgcttcagtgtgtgtgtatagatttttctcctttaccattttacacagataatctgaatcagaaaatactgcaactccttcctccttttgtctgccttttgttctccaaaagtaagtggaaattacatttccaagaaaggaaatgaaataattgcaggcccaaggtctgcaaaatatgtgttgaattgacagtgaaaaggatccatgtgttgacagacacagttgttagatgccataaaggcagatgtgaagctcaatttatttctcatcttgcttgttcaatgactgcttaagagacacattccagtttaatttatctacttaaagctctaatacaaatactgtggactgctgtattaacttctaaactttgaaacctaatgctcgattattcggttcttgacattctttagctaaataaaataactgattccgtgtattttcatattgacagtaatttaccaaataagagcacctttctggaaaaatctgtttcttaagtataattagactatccagattgaatctgagaattctgtgtatgtataggtaattatttacccagactggcacacttcattcatttaatgtttaaaccttttaatgactaaaagaattttaacttaatgt

SEQ ID NO: 354 - DNA, 3782 bp, Homo sapiens
tgccatcatcatgaacactatcgacatgtacaacgtcacccgccccatcgagaagctgcagaacccaattgtgacccagttcttcccctctgtgatgctctggggcttcacagtgatactgcctctgattgtctacttctccgccttcctcgaggcccactggaccagatcaagtcagaatctggtcatggtgcacaagtgctacatctttctggtgttcatggtagtcattctgccctctatgggactgaccagtttggatgtctttctccgctggctctttgacatctactatctagagcaagcatccatcaggttccagtgtgtgttcctgccagacaacggcgccttctttgtcaactacgtgatcacggcagctttacttggcacaggcatggagctgctgcgtctggggtcactcttctgctacagcacccgcctcttcttctctagatcagagccagagagagtcaacatcagaaagaaccaggccatagacttccagtttgggcgtgagtatgcgtggatgatgaacgtgttcagcgtggtgatggcgtacagcatcacttgccccatcattgtgccttttgggttgctctacctgtgcatgaagcacttggcggatcgctataacatgtactactcctttgcacccaccaaactgaacgagcagatccacatggctgccgtctcccaggccatctttgcgccactcttgggtctgttctggatgctgttcttctccatcctgcggttgggttctctccacgccatcaccatcttttccctgtccaccctcctcattgccatggtgattgcctttgttggcatttttctggggaagcttcggatggttgccgactacgagcccgaggaggaggagatccagacagtgtttgacatggagccaagcagcacctcctccacgcccacctccctcctgtatgtggccaccgtgctgcaagaaccggagttgaatctgacccccgcctcctccccagccaggcacacctatggcaccatgaacaaccagccggaagagggagaagaagagagtggtctgaggggctttgcgagggagctagactcggcccagttccaggaagggctggaactggagggccagaaccagtaccactgaccgggacctgaggcctccactggcgacttgttgaggggtcaggggagggcctggcaaggggaggcaggagggtggcctggacctccccactacctcctgcagactttgagaagcctacagtggagacatccaccaccccagccatgggccatacgggggtcctgacctgctgcccggctggaactggggctgctcggcagtgctgaaggagcctgggaagggatgggaggatacaggcaagcacatgtcttgagagaggtggctggagccccggcacagagactgaacgctggggtcccttcctgggaccaagatggagaaggtgttcctaagggaggagacagaaggaggctgccgaaggctctgtggggtcatcaccactctgcatcagctgcccttaaaaggagcttctgctgctgctcctcctcccagccccggcccattcctcccctgcagtctgaggaggcaaaggtatgtgcacggggcacattgacaggacacggaggaccacctcatcacagggttccctgcatggggatctgtaaagagaaagtttctgcacccaccagagcaagagccaactgaaagcgtagacctgagaagaggtaactcagccccttcctgctcctctgccctcatcagatgtccccaggagcagcagggcagaggcccttctttctattcttacaagggtagctagagcgtgatcactcagggctcatcaaatgagactcgtgtgcgtttttcagaaggaaaccttggttagtccttgctgggtaacacaaagtggggtgagacgacagaagccgaattcatggaaggggggtcttctccccaaaactctgtgtggtgggaaaccagctatacctccccaagccccagggcctaaagagaagacccccgaagccaaagatgtggccacttaaaagcgtctcctgcctcctacccaactgagtgcctgggcccccagcttggccaagatgggcagtacgttagggtaagaaccccatgcttcaaacttaaggactgaccatcacctgcgtcccaagtaggacccttcctcccttctcggggctgcccctgcaccctgccttgaagaccacccaagcggcctccagtgtgggcctggtccagacattgcagatgcttcaaccgtgatgtcgccccaggcctgccaggggtgtggtggaggggaaggccacgtgctccagggagaagccctttctggagaagcaaggctgtcctcccagggctgccactaccagagacctgggggagctgaattccgaacagtgatggtgacactcagcacctttgccacagccggggggaaccggcttctgcctctgggatgggctctcatcaggaccaccgtgcagcccagccagggaggacatgagaagggccagtgggggcctcaatgaaccagaacaagccaagctgaatggggtctgtgtgctccagggccctcttcagccccctcccccaaaggtctgggtccctgccaccaacctactgaaggccggcccccggctcacctcacctgagcacctgcaccaggccccaggcacatggctgccctgaactcagatcacctagaccttgtccctgccccacctttgccccatcctagccccagaagctccaagcttcaccgcaggtgagaaattgtgctcaatgggcagaaactgctatacccccagggcatggcccacattttggcatgagggtgtctttccagagagcttgggttggctggagagaggctgtctttcccattccttgtccagctaggaataaaggggaaatggtcctagcctggcccctacacacccaggtcccacaggccccctccccactggaatttcaccaaccaacaaggggaaagtacgctgttacagcatagcggtcaggcccagcaggagcttggcacatgatggggaggtggccagctccaggccctgcccgaccccatcatgtgtatttggtgtatggggtgtgggggtcacaccagaagctggcctggggtctcttctttgctggacacagctccctggcccctgcccccagcccctgcagcccctgccggactgtggaagccacatatgggaaaagtcctggcagacaatgtggcgggatgactgggggcttctccctctgaacctgggtccagtgtagcctggctctgagagaaggtggtgagcatgtggagaaggttccatagtccactcttaggggaaccagcaaagcctcatggcagttggctccatctggacctccccccacctactgccatcccactcctctgccagccacttcccagccgccccaccccactccatccaccaaatcacctcctgacttaatcctttctggaaggagctgccgcccaggaaccggtattgcctagagcctccaggaggggccctcctcaggcctccagtggccccatgcccacctgcctgaccctccactgcccctggaagcaaagtgcctatcagcagcgttgcgtcctctggggcccccggtcgggggggagggggtgtgggctaaccttggccaccaccacaaaaggaatgtgccagaatgctgaaccttcttgttaatgctatgaccgtgccttgaataaacaagtcctccc

SEQ ID NO: 355 - DNA, 3953 bp, Homo sapiens
atacagggtttggttctgggcagaaaatccatgatcctgagactgcaggaggcttttcacaaagttctttgtcactcttaggagaagactgagtcagggaaaaggtgaaccctgcagactgtactagaagacaacgcgggagcacagaggagaccaggacccaattcccaggctgtgtgaccttggacacgttacagctcctctctgcatttcagggttttgtttttttttttttttttgatttttggtttgtttgtttgttttttgtctcgctctttcacccaggatgaagtgcagtggcatgatctcgactcactgcaacctctacctcctgggttcaagtgattctcctgcttcagcctccccagtagctgggactacaggcacgcaccaggatgccaggccaatttttgtatttttagtagagacggggtttcaccatggtggccaggctggtcttgaactcctgacctcaggtgatccacccccttcagcctcccaaagtgctaggattacaggtgtagccaccgtgcctggctgcatttcagtttatttttcagtaaaactggtcaaccatccacctcactgcactaccgtggaatgacttaaattttgcgagagcatttgggcccacagtcaccgcttgctgaagcagatgggatgcctggtccaaggtcacgattattaaagcagacacacggggcactttgacccacctgtagtacatttctttcacagcaaggcagtgcaaccggtagcacatcgggctcttttagatgctgctccagccttggtccggtggatcatgcttggtttagaagctgggttgtctttctcctgcccccagtcctgtctttgcttttatagtgcatcatacaccacgtagaaccgagccaggttcctgccatgtggacgctgttcctgcctgagagtctcttagaggaaggctgggaacactgtggaaagactgggcatctctgcaggcggagctgaatggatgtgaaacccctgtgggcatgtgcttccgagttcctcagcaggcatttgtgttttttggtagaaagtttgctttttgtttttttttttttttaagacaaggtctcattctgtcacccaggctagagtacagtggtgtgatcatagctcactgccgtccttgaactctcagactcacgtgagcctcctacctcagcctcctgagtagctgagactacaggcgcttgccgccacccctggctaatatttttattttttgcagagacaggggtctcactacattgcccaggctggtctcaaactcctggcctcgagcaatcctctcacagcctcccaaagtgctggtattacaggcgtgagccaccacacctaacaaaagtttgctttttatctaaaatgacccaggcattgtcactgtactgctatttttttaaaaaaattttgttgttttgttgttgttgtcgtcgttatatagatgagggcttcctgtgttgcccaggctggtttctgacgcctggcctcgcctccttatacaccaggacagcaggactgagccaccacactacccaactgcttttatctcagtgaatgaaaatgatacttgcctggaggcttcccctcatctacccccatgtttctctatttattcctcagttaagtgggcagaccaacatccacctcagcaaaaacttcttcctgacgaatcgcgccagggagcgctcagacaccttcatcaacctccgggaggtgctcaaccgcttcaagctgccgccaggagagtacattctcgtgccttccaccttcgaacccaacaaggatggggatttctgcatccgggtcttttctgaaaagaaagctgactaccaagctgtcgatgatgaaatcgaggccaatcttgaagagttcgacatcagcgaggatgacattgatgatggattcaggagactgtttgcccagttggcaggagaggatgcggagatctctgcctttgagctgcagaccatcctgagaagggttctagcaaagcgccaagatatcaagtcagatggcttcagcatcgagacatgcaaaattatggttgacatgctagattcggacgggagtggcaagctggggctgaaggagttctacattctctggacgaagattcaaaaataccaagtaagatcccagagatgcgggtggatctgtgttgggaaacattctgttcatatgctttaagatgcagcaactcctgcacagagtggagaaacatttccaaggggattgggattttacccataatgaagctcagagtgagtaaagatggggctgaggaaatgcaaacaaaaaaccaaccaggacttcgcaggtgaaatggcctattcccttcctcctgattattgggatcatctaaaggccaccatcaagggtttcctgaaaagggtttttgacagctaaagtacaaaaattatataagacaagaacatggacctatgggcgttggctggctgatttgatgggcatatttacaaaccagctcacagacagaagcaaaatactattagttatttaaggcagaaacataagtgattcttccacggccaaactagaggcacagagctggaaaaacttcatccccactcagcacatactagggaggtaacttgccagctttgctttgggtcatagttcttacagctaacttatgtgttccagaaaatttaccgagaaatcgacgttgacaggtctggtaccatgaattcctatgaaatgcggaaggcattagaagaagcaggtttcaagatgccctgtcaactccaccaagtcatcgttgctcggtttgcagatgaccagctcatcatcgattttgataattttgttcggtgtttggttcggctggaaacgctattcaagatatttaagcagctggatcccgagaatactggaacaatagagctcgaccttatctcttggctctgtttctcagtactttgaagttataactaatctgcctgaagacttctcatgatggaaaatcagccaaggactaagcttccatagaaatacactttgtatctggacctcaaaattatgggaacatttacttaaacggatgatcatagctgaaaataatgatactgtcaatttgagatagcagaagtttcacacatcaaagtaaaagatttgcatatcattatactaaatgcaaatgagtcgcttaacccttgacaaggtcaaagaaagctttaaatctgtaaatagtatacactttttacttttacacactttcctgttcatagcaatattaaatcaggaaaaaaaaatgcagggaggtatttaacagctgagcaaaaacattgagtcgctctcaaaggacacgaggcccttggcagggaatatttaaagcaacttcaagtttaaaatgcagctgttgattctaccaaacaacagtccaagattaccatttcccatgagccaactgggaaacatggtatatcatgaagtaatcttgtcaaggcatttggagagtccaggagagaagactcacctctgtcgcttgggttaaacaagagacaggttttgtagaatattgattggtaatagtaaatcgttctccttacaatcaagttcttgaccctattcggccttatacatctggtcttacaaagaccaaagggatcctgcgcttgatcaactgaaccagtatgccaaaaccaggcatccaatttgtaaaccaattatgataaaggacaaaataagctgtttgccacctcaaaactttatgaacttcaccaccactagtgtctgtccatggagttagaggggacatcacttagaagttcttatagaaaggacacaagtttgtttcctggctttaccttgggaaaatgctagcaacattatagaaattttgccttgttgccttatcttcttccaaatgtactgttaaataaaaataaagggttaccccatgc

SEQ ID NO: 356 - DNA, 4537 bp, Homo sapiens
catcaccgtggtcgccaaggatggcggtgggaggcttcatggggctgatgtggtgttctcagccaccaccacggtcacggtcaatgtggaggatgttcaggacatggcccctgtcttcgtgggcacaccctactatggctatgtgtacgaggacacccttccgggctcggaggtactgaaggtggtcgccatggatggagaccggggcaaacccaatcgaattctctacagccttgtaaatgggaacgatggagcctttgaaattaatgagacatctggagccatctccatcactcagagcccggcccagctccagagagaggtgtatgagctgcatgtacaggtgactgaaatgagccctgcggggagcccagctgcccaggccaccgtcccagtcaccatcaggattgtggacctcaacaaccacccgccaacattctatggagagagcggaccccaaaacaggtttgagctgtccatgaatgagcacccaccccagggagagatcctgcggggcctcaagatcaccgtcaatgactccgaccagggagccaatgccaaattcaacttgcagctggtgggacccaggggcatcttccgagtggttccacagacagtcctgaatgaagcccaagtcacaatcattgtggagaactcagctgccattgactttgaaaagtccaaagtattaaccttcaaggctgtggatccagatacaggaccctggggcgaagtgaaatattccacctatgggactggggcagacctcttcctgatccacccatccactgggcttatctacacccagccctgggctagcctggacgctgaggccactgccaggtacaacttctatgtgaaggcagaggacatggaaggcaagtacagcgtagctgaggtgtttatcacactgctggatgtcaatgaccacccccctcagtttggaaagagcgttcagaagaagacgatggtgctagggaccccagtgaaaattgaggccatagacgaggatgcagaggaacccaacaacctggtggactattccatcacccatgcagagcccgccaacgtgttcgacatcaattcccacacgggggagatctggctcaagaattccatccgctccctggatgccctgcacaacatcacacctggaagggactgcctatggtccctagaggtgcaggccaaggaccggggctccccatccttcagcaccacagccttactcaagattgacatcacagatgctgagaccctctcccggagccccatggctgccttcctgatacagaccaaggacaaccccatgaaggccgtgggtgtgctggccggcaccatggccaccgtcgtggccatcactgtcctcatctccaccgccaccttctggcgcaacaagaagtctaacatggtcctgccaatgcggcgggtgctccgcaagcggcccagccctgcgccccgcaccatccgcattgagtggctcaagtccaagagcaccaaagccgctaccaagttcatgctcaaagagaaacctcccaatgagaactgtaacaacaacagcccagaaagctctctgctcccgagagctccggctctccctccaccacccagcgtggcgcccagcactggcgcagcccagtggaccgtgcctaccgtctctggctctctcactccgcagccgacccaacccccgccaaaacccaaaactatgggaagccccgtccagtcaactctgatctctgagctcaagcaaaagtttgagaagaagagtgtgcacaacaaggcttacttctagtgtgtgccctatgaccccccatctttcctccgcccctgacccccaccaccctgctgctcggactatgctccccttcctctgctccttaaggtcactgacccctgttttgcacaatggtataatccccactgtcctcatctctaccgccaccttctggcgcaacaagaagttgagctctgacagggctctagtcagggccttgggcaagacattgggctctaggatgcaattggcaaatacgtccccgttactcaaatccttggcactactacaatgccctccattcttcagggctgagaattgacgagaagccagctcacccatcccagacctcacagtccctcaggttctactgggatctcatcatcatccttagtcaagcagcagggccctggccacgtggagcaacactgactagaatctggatcctgacgcctgcagctgagagcaggagcaggaaaaggaggctcagcactgtctcaggctggaggtcagcgaacctcgtgggctgtaggaaagcaaatgtaggtaaggggagagcaaggatgcacagaaaacacactgactgtgggactgtgccaggatgcatttggaaagatagagcattctgtctgggcagagactgtggaccctggtatgcccacgtgggacagaggacacagaggtggaagattgatcttgccaagagtgagggcagatgtctccagccaggactgccctgagccgcaaaatgtcaaagctggagctatagaggtagccctaaaggcaactagaagagcatcagggctgctctctgaggagctgccccaccagccatccttgaagagacaattcagggcagttgatgaatatcagggctgagatgtggggagacttccgtttttatccagctcttttgctcacatcgcgtaaccttgggaaagctgtttaaagttgctgatcatcctcttcctcatctgtaaatgaagaaagtaggccctgtctacctcacatgcaggtctagggtgaggattgaagaaaatagtggtgatgagggctttaaccaagtgcaaagcggcatgaatgcaaagtatttttctgcagcccagttctgtgggtgcagctcttccagaaagtattaggagcctcacatctactctgccaagcgccccagcaggcactgtgctgggcttaggggctaccactggatgatggcattgccgtgactcacacacctctacttctgttcttccctcactccatccccgctaccgtcctggccagctaccgtcagagagaaccagagctccaagtctttaatttgccaagatgaagaaaatgagttctcaaggagggaatgctttgcttgaggccacacagcaggttggtagcaaagatcttgtctagccagggcagcccttatcagcttgtgacaaccttccccaggacagaagtcatacaaggcctctggggttaatacaaataggttgtgccctgctttaaggaacctgctatcaggaaatctacatgtgtgcacagagagagaaaagtagaacagttctttgcatttggctctacttactaacaacccctctagaatacattggtgatttcatttaaagagattgtatgcatttgtggctttcctgatttctgagtctgtgtttggaggtgttactgagatgtgccagtgtgcagaatccttgctggggtttctacagtccccaacgtgaacagtattaagcaagaggtggactcgagcaatccaggagcccagactgagcaaataagtactttccagcctgtgtttcaggagaggactgtgctggatcatgcttgccctccacagggaatacagcatccttacagcttgcatgcaatcaacctcttttgtaaatggaaaataaagtctgttacccaaaggccatgctgatcccctgctccctgctttcatttatgtttgctgacctgtggagaccagtctttctgacacacagtgaagctcaacttgcctcctggctgcttcagcaggtggatccattcttcgacccccagatgtgactctaaagaaggctgaaaatttttgtccaaattgccatgcagatatcttgaacagcaggacatttgcaggccttgtctactggacttttctcccaaacaggacaagcccaggcagggctgcatggagaggaatggaacctggagctagaattaattgcccactctcccaccctaccagtgcagcccggcaagggcaggaattgggaggcctagggtgggcatgaaagcttgggaagcactgtcgtctctcagacaggcgtcctaaagacctctaggctggaagcttgggcttgcaagtggatccgggaccgagggtggtctcttggacaaccccaggaacttggaccaaggcagagccaatcttgcaaactggccatggatggggaagtgcccggtagccagcatgagccacactaggaaagaggaggagggtgcagccaaacttaaggcaccggcaagtgttgtcagcactggaggagaccccgccagtggggtgaggccagccaagtccctgtgttacgaatggtgggccaaggggctgtctgctcggtcccagtaggacaggcagagctccaggctggcaccatggtaggcctccagggaaagagctgggaggcaggaatggcacactgggcaggcttgcccattcctggccctgagaatggagctgtagcctcatggacaataaatggatgtgacacc

SEQ ID NO: 357 - DNA, 3758 bp, Homo sapiens
caaagtctggaaacatccgaaatctgaaacacatttggtcccgagcattttggataagggatctgcagcccatactgcattttcaaaggcttttcagccacggggaatgcttccagtcctcctctgttgctcccttccacaaacatccagctcaacgagtattctattcatcagaagcagaattaaagatcagaccctatgctctttttttttttttgagacagagtctgcctctgtcacccaggctggagtgcagtggcgctatctcggctcactgcaacctttgcctcctgggttcaagtgattctcctgcctcagcctcccaagtggctgggattacaggcgcccgccaccacgcctggctaatttttgtatttctagtagagatgaggtttcccccatgttggtcaggctggtctcaaactcctgacctcgtgatccatccacctcggcctcccagggtgctgggattacagacatgagccaccgtgcccggcgccttatacgatttctgcagacaacataggcagaggctgagagagtcagagaacacgtttgagcctgggtccctgtcttagtgaataggagatctcgagcagcaagttcctccacctctctgggtcttttatcttcttcatctgtaaaatggatatataagagtggtacttacctcatagactattgtaagaattaaacagggtactctatgtacagacttagcacagtgcttccatgtaatagtgttggacaaatattagctattaaaatatcctcaccatttaaactttaaaaaaaaaaaaatctgtgcccaggctgccgtgcagtagcatggctcactgcagccttgaactcctgggcccagaaggtcctcctgcctcagcctcatgagtagcgaggactataggcatgtgtcaccaggccattttttatagaaatggaactcgctgtgttgcccaggcttgtcttgaactcctgggctcaagtgatccatcctcctcagcctcccaaagtgctgggattacaggtgtgtgccattgcacccggcttccccgtttgaactttcaaagctaatcatgctgtgtggtatgaggttgaggggaaaaagggatgccccaaattaatgaaactaaatcttccagatgctttcgccagcgccgtgcgtgttctgtgttctttctgcggtcccatcctgggtatgacagtgaattttaggctgggctgtgccttcggctgtgcagggcctcctgcttagaggccctttgtctgacctttggtgacacagcagtagcagcgctcagggtctgtagtgggcgtgtgggtggccagggcaagccctgcacatgtgcctcagggagcattggctggcccgggtgagcccacccatttgtgagttgctgaggccaccgtgcctgcggccggcgtcctggcatggctgagccgggccatctgctgccttgtggtctctgcctctgcctttccaactctcacttgtcctcctgctcccgcgtgaagagggggaggggaggagttgggaacacgtcctcatgctcggcttctggctggcagtcatgatgggggacagggaacctgtgctgctcacaggtgtcaggaggggcttcctgggccatgcttgggaggagctgggaagctggcgtatgtgtggggggcagagccctctgccacacaggtttcagaaatccttttgcagacggcagtgagaacttgagacttcagtgagagtgttgtcagcctggcgttagtgttgaagagctgggtcgggaagttgcccacccaagaggcaacttgagccatgtaaaagtagtgcgtggtttatggggtgtcgggtcttgcgtgtgcctctgggcctttgggtaaagatggggtgcacccgtgagagcagtggtagatcaggtctgtgagccacccttactcctggggaatggctcagaggactggtgggcgtgaggcatgaccctggtttcttgccatgcggtctaggaacagggacttttgacttcccatcagctctcctctttgaaagcacccttgaccctgaacgattttgcatgtctgtaatttgaatgtcgtgtggttacaggacccggtcagcccaaggagcaggggtccagcagctctgcggaggcatctggaacagaggaggaggaggaagtgcccagtttcaccatggggcgatgacaatgtttgccacagcctctgcctggaacctggctcgtgctgtgaccagaagggaaaggcggctgtttggctctttctcccccgcaaggacccgctgacccgctggatggagagcaaaggagacccctcccgagccgctcacagtcctgtatttggcaggtttgggagcctgaggggccatctccctgacactcagaggcactgccttgcagacaccatccgtgctcctggtaaagggggacagagagcctcaccttgccacatatttgaacagtgatgagtttggggctggtttctgggaagggaacgtttatttagtaaagagcagaacacccttgcgttttgttgggacatgtggaccgtgagtcgcaaacactctggagaaggctgagatgccaccattcccacggggactgaagacacattacgtggacctggtcccaggctcagtgaggagatggcctcagctgtggggctggtccatgttgcccactcactccagtgggaagtggggaccacgccatagagggtctgctcccactgcagctcccggtgctctcgtgttctgggaaggcctgggtgtgtgcacaaggaggcccgggccagggacttcaccaggggctgggtcacaagggcacagggtgtgtggaaagcgctgtgggggaagagccggtcaccggagagtgagcaggcggagactccaagctgggctgagccagagcagaaggcgagggattcccagccggacgggggttctctcaccaacagctgtgatttcatcccgaagtggaagggggtctaaacagaacaggctgagagaggcgggactgggtcaagtgggtggagctcctccttgcatgactgcaactgtcggggctttccgccggctcacagcagttggggccagcggggagaagagaggcggaactgctgtgtcctcatgtggcgcagcctcaaactggcatccaggcactgggcccgtgcagagaaggcacctgcagagagcagggcagcccggcgcaggggcatgcgcctagaatcccagctactcggaaggccaaggcaggaggaccgcttgagtccagggattcaaggccaacctgggcaatagagcgagaccctgtctcttaaaaaacgatgatgatgaacacagaggacggggcactgtgctgggagccagggggcctgggaggagccgagaccagccttttacctcggggttttgaggccaacagggacgacagagacagtttctagttagagccttggctccatttttggatgattcagccccgagttcctgagtctattttatgccccttacgtactttgatagaactaaggaaatagtggttttgagtgaagggaaaggaaacccagaaacattttacgttgcttttacttctgtagtgtagattgccccggcccctctctgagccctgtagcatctgtgatagcttctgtcccttcatcggttcatgtcacagggattttctttcccaggaagcggacacggagagtcagccctaataaatgagcacatgccctggctgtacattttg

SEQ ID NO: 358 - DNA, 4042 bp, Homo sapiens
ggttaaacggaactctttgactgctagtctagacaaactcctgaaggaagcaactggaacttcaccctctcccttgcaagccaagttggcgcccgttatcactggaaccaactctaagctggaagaggggagattttttggaaaagggatagaacagagtcacaatacttcagctgataagagagaaatactagctccttttccagtgagagatgaaacttttggaaatacagctctcctcaagaaagctgaaagtggtgagtgccagctaagcacacagaatttgattcaggtggctgcagaagattctcatccattggatccaacttcccagctttccagaaagggttcttttggggatgtggccagccctccccaagatatgctttttccccagggtgctcatcttgttccccaggctagggtacacccttctcaaatggaaatttcggagactgtagagaaagtcattcttccacccagacctgtattgaatgatgtaagtgctgcattacagaagctgtgtggagaagtatggttaagttatccagctggaagggaagtaggtcctggagaagtgaacccagaatttcctgaagcagtacagccagtatgtagccccctaaatcctccaggagtgatatcaccatgggctacgatggacaccatagttccagacaggaaggatttttattcctccaatgtagttcctgataaaactcatgaagttggatcttatttagctgcccaaatgtctccatcagaccagacgcttagctcatttgcttccattgttgcccaatatggcaaaggcctccctcaggaagtggaagaaattgtgagggaaacaattgttcaacccaaatcagagttcctcgaattcagtgctggcttagaaaaactactgaaggaagaaactgaaaccttcccctcaaaatatgaaagtgatacagggaatctttctccatcaaagttaataggtagtacagaggagcccaggcgagccacttctgaatgccatcctgaggaattaaaagaaacagtagaaaaggccgaggctccattaataactgagagtgcttttgatgctggttttgagaaacttcttaaagaaataactgaagctcctccttatcagccccaggtgtcagtgagagaagaaactcacgagaaggagtcctcacagtcagagcagaccaggttcttggggacagtgccccatttttacagggcagcctcacagacctctgaaatgaaggataaaagtaatggtttggaatctcaagtcaaccaatgtgataaaatgttgggaggagacgcacttgtgactgatttattggtagatttttgtggttccagaagtggagttgagatccctagaaccccacaactttatgtggctcatgaaatagggaccattaaaactgtaacccccccagaggacagggacagtgaaagtggggttgcagggggacaagggactcttcaggaacctggctttggagaggcttctgaagcaattagtgtgtccagaaataggcaacccattcctctcctgatgaacaaagaaaactctacaaaaacaagtaaagttgaactgactctagcatcgccatatatgaaacaagagaaagaggaagaaaaagaaggtttctctgagtctgatttttcagatggaaacaccagttctaatgcagagagctggagaaatccttccagttcagaagaagaacccagtcctgttttgaaaactttggaaaggagtgccgctaggaaaatgccttccaaaagtctagaagacatttcatcagattcatcaaatcaagcaaaagtagataatcagccagaagaattagtgcgtagtgctgaagatgtttccacagtgcctacacaacctgataatccattttctcaccctgacaaactcaaaaggatgagcaagtctgttccagcatttctccaagatgagagtgatgacagagaaacagatacagcatcagaaagcagttaccagctcagcagacacaagaagagcccgagctctttaaccaatcttagcagctcctctggcatgacgtccttgtcttctgtgagtggcagtgtgatgagtgtttatagtggagactttggcaatctggaagttaaaggaaatattcagtttgcaattgaatatgtggagtcactgaaggagttgcatgtttttgtggcccagtgtaaggacttagcagcagcggatgtaaaaaaacagcgttcagacccatatgtaaaggcctatttgctaccagacaaaggcaaaatgggcaagaagaaaacactcgtagtgaagaaaaccttgaatcctgtgtataacgaaatactgcggtataaaattgaaaaacaaatcttaaagacacagaaattgaacctgtccatttggcatcgggatacatttaagcgcaatagtttcctaggggaggtggaacttgatttggaaacatgggactgggataacaaacagaataaacaattgagatggtaccctctgaagcggaagacagcaccagttgcccttgaagcagaaaacagaggtgaaatgaaactagctctccagtatgtcccagagccagtccctggtaaaaagcttcctacaactggagaagtgcacatctgggtgaaggaatgccttgatctaccactgctaaggggaagtcatctaaattcttttgttaaatgtaccatccttccagatacaagtaggaaaagtcgccagaagacaagagctgtagggaaaaccaccaaccctatcttcaaccacactatggtgtatgatgggttcaggcctgaagatctgatggaagcctgtgtagagcttactgtctgggaccattacaaattaaccaaccaatttttgggaggtcttcgtattggctttggaacaggtaaaagttatgggactgaagtggactggatggactctacttcagaggaagttgctctctgggagaagatggtaaactcccccaatacttggattgaagcaacactgcctctcagaatgcttttgattgccaagatttccaaatgagcccaaattccactggctcctccactgaaaactactaaaccggtggaatctgatcttgaaaatctgagtaggtggacaaatatcctcactttctatctattgcacctaaggaatactacacagcatgtaaaagtcaatctgcatgtgcttctttgattacaaggcccaagggatttaaatataacaaaatgtgtaatttgtgactctaatattaaataagatatttgaacaagctaggaaaattgaatttctgctgctgcttcaaagaaaaagctgccccagagcattaaacatggggtattgttaagaagcaaaatgttcttgtttgccatcatgtgtttcacaccacaattctgtgccacagttaagagggtctggtacccttgcaggacctttgtaggttgtgggaaaaagtcgcagaaagatactcaaagtggagcagggaatggagacagacatcagtgatgataaaaaaaaaaaatggaccttaagaaactatttactctgtaatctctaataaaatatggaattccatattagggcaatgagactgaaactactggtgtttttctgccttgagaaaacaaacagttaaaacaagcctcaaatgtattttagtgccacccactggccataggtacaattcagttgttggcttgttttgacttaattctaaaataggtctcaagcctgtatttttatgagtttatttttttaaaaccctgcatatatatgattgtttttcttataactttactatatgaaagcagcataagagtagtcacaaacatgttttgcaacaaagttttaattagaatgtaagttgctcagttatactgttcttcttatgtatgtaaaattttcgtattttgtaaaaacccttagaataaattatcatttgatttaaattgtattagaaaattagcgtgacttctcattttaaataaaatattttaggaattctaaacatctaaaaag

SEQ ID NO: 359 - DNA, 3365 bp, Homo sapiens
tattctcattttagggaggaaactgaggcacaaagcgattcagtgacaggcctgagctcgcccagcgaatgatgacagggtgtggactgggacctgtggttggtcccagcccagcctctgaccactctgctctattgcccctaggctgcaagtgcagctgcaggttggcctgctcctgcctcctctccttgcctgggcctttgggcctgctccaccttcccctggagcgctgtcctccctctgcctgctggcggtctaggcactgctgcagccccactgagaggtcctcttccaggacacaccttgggcaccttggttggaattcttttccctatgactttccctcagaggaggagacaccttcagatgtgctctgcctccttactgaacagcctggaggacaggccagtctccagttcctattgggagcccctgaggccatgctcagcctcggctcaccttccctgagccgagttgctgtcagagttccagggaggaaaagaccagggaggctggagcgggcaggagtggcttcctggaggcagagggtctgagctctgggggaggaggatggcattccatggcctgtcccaacaggggctcttgcccctccctgtttctggtgcaagcagagggtctcggacccaggccagcaaggcagctcccggggttggaatcttccttcgctcccaactccatcctttctggaaaccaggaagctggggccagtgtccagcactgcctctggcagcctggcctctgctctcttctgagaagccttcagggaagttgactgcccattcctgccatctgtccccagctgctggaatgcccttcctggcgtctgccctgagcctctccagctgctgggaacttctgtgaatgtgtcctctgtgcagggcactgggccaggagctgggactgggaggtgagagagaccagaccttggctttgaggagctgagggtttgatgggagagaccgatgtagaaacctggaacctggcacggccaaacaggcagctggagctgggcctctggaccccaagagctggggtcaagacccaatggctgtggaggccctgtgttgccttggcaaccttcttccctctctgggcctcagtttccccatctgtacaatgtaaaatcagcaggctagctgatctctgagagtgtttccatatttgataacccatgaattgtatttcaaaacaagaggcccgtgcctgatccagtgtttgcaaggtgatgcctcgtgatgcctcagacccttggtgttcctcaggacactgataggcatctcttgaaggacatttgggaaacactgctttctgcttcctctttttagagatgtaagggtgggacgtggtggttcgcgcctgtggtcccagtactttgggaggccagggtgggaggattgcttgagtccaggagctggagaccagcctggacaacatagtgagacccccgtttccattgttattattattactattattatttgagactggctctgttgcccaggctggagtgcagtggcgtgatctgggctcactgccacttccacctcctgtgcccaagcggttctcctccctcagcctcctgagtaggtgggacactgccggcgcatgccaccatgcccggctagttttttgtatttttagtggagacggggtttcaccatgttggccaggctggtcttgaactcctgacctcgggtgatttgcctgcctcggcctcccggagtgctgggattacaggtgtgagccactgcgcctggccaccattatttaaaacaaattttttttaaactgtttaagtaaaagagatgcattgcctctaagcatgctaaaagttctaaattctgcagttaaaaactgctctttaaaatatttaatatgaatctttaatttattattctattatttttaccacctattaacatcttgtagagtttttgatggaaaccagtttcaccctgttctggagaggacatagttgcctgaggtggatgtggaggcaccatggcccctgagtgagatgtgcatgttccttactttggggtcaccctgccttggtttccaactccgttcagacctgtttgacgtgtaccaggtgactactcagtgtcaggccagggaagcagctgaatagaatatggcactgacccccagttccctgtgttcccatgccttcagagttctcattgtcctcctgcattgtccctgctggggtgtggacttgagggctgggtccttcccacctcctccgtggtgcctgttacataggagtgacgtcagcagatgaagggcttgcatggaagagaatgtgtgcaggcagcatgtggggagggagtgagcatgcgctcctgagttaagacagtccaggtttaaaaaaacattgttagagatggtgtctcgaactcttgggctcaggtgatccttccgcctcaccctcctgagtagctgggactataggtgtgtgccaccgtgcctggctctagctccaggtttgaatcctgacacctccatttattagctgtgtgtccttggcaaatgagttaaggtctctgagtctcagcttccttccaggttgtggtgaggattaaagcagataaggtatgtaaacacttaagacagggtctggcacatgacggaacccagtaaatggtagctattgttaccagcagcttggggatctgccgccaaggtggctgttggttgaccttgggtttagagtagtcattgcttcttctttttttttttttctagacggagtctcactctttcactctgttgcctaggcttgagtgcagtggtgtggtcttggctcactgcaacatttggctcccgggttcaagaccaggctggtcaacatggtaagacccggtctctactacaaaaaattggctgggcgtggtggtgcgcgcctgtaatcccagctgctagggaggcggaggcaggagaatcgcttggacctgggaggtggaggttgcagtgagccgagatcatgccactgcactccagcctaggtgacagagagagactctgtctcaaaaaaaaaaaccaacaaacaacaacaacaacaaaacattaaaaaagccgggcgcggtggctcaggcctgtactcccagcactttgggaggccgaggcgggtgggtcacctggggtcaggagttcgagaccaggctggccacatggcgagatcccgtctcttctacaaaaaattagccgggcttgcgcctgtaatcccggctactagggaggttgaggtgggagggtcgcttgggcccgggaggcagaggttgcagtgagccgggattgcaccactgcactccagcctgggtgacagagtgagatgctgtctc

SEQ ID NO: 360 - DNA, 4025 bp, Homo sapiens
atttgaaaaaaaaattagaaactgcgcaaccacaggaaaaccgcctggcaaagattcaaagtgtaggcaaaaacctgcagagagtgaacagagtcctcatgggcccaaggagcatccaggaaaggcacttcaaaaaggtgggaaagcacagcactaggaaagaacaggatgcccaggcatttgtggacaatgctgccaaaggaaaaaggcttgagggtccagccccaagggagctggaacagcctcacatagtgcaggggcctgagaaggtagtgggaaacaccatctacaccaagccttcattcacccaagagcataaggcagcagtctcctctgtgctgaaacccttctccatgggcgtgccttctgcctctagccctgcaaaagccctacctcaggtcagagacagatcgaaagacttagcctacaccattttaattttagaaatggcaatggctagagtgaaaaacatgaaggctgctaaaccaatcacacattccagaaaaaaatagcgcttttataaaactcactccattgtggcccacagaacacccaaggccaaaaagattagaaagtttagaaagggcagttatctcaacagaccgatgctcgcaaagaggccgctgttctctgcagcaaagagcctcatacattcgcaagggattttttcatccttaggagacctgagtcctcaagaaaaccctcttctggaagtagttgctccttcagaacgttttacagaaaacactaatgtaaaagacacaactaatgtaaaagacacaaaagagatgtgttcaaagacacatctctgaaaacacaaactacaatcatcctcctgaggcagtttccgctgggactgcattcaacttagaaccaactgttaaacaaactgagacaaaatgggaatacaacaatgtgggcattgacttgtcccctgagcccaaaagcttcaattacccattgctctcgtccccaggtgatcagcttgaaattcagctaaccgagcagctacggtccctcatccccaacgaggatgtgagaaagttcatgtctcatgttatctggaccttgaaaatggaatgttcagaaacacatgtgcaagggagctgtgccaagctcatgtcgcgaacaggcctcctgatgaagcttctcagcgagcagcaggaagcaaaggcattgaatgtagaatgggatacggaccaacaaaaaacaaattatattaatgagaacatggaacagaatgagcagaaagagcagaagtcaagtgagctcatgaaagaagttccaggatatgactataagaacaaactcatcttcgcaatatctgtgactgtcatactaataattttgattataattttttgttttatagaggtaaagacaataattaattcaggttttcaaaatacaatcctgtgtttgtgtggattcagaatccacaaactgaaaaccaacgtcactttcccacttgacattcttcttctgtcatttaaggctgaggtgtgctttgttcttttactgcaatgtatattccaggattgttaaaggatcctcgcttccaggaggtctctgtgaaataaaaccaagttaatcccactagactattttaagaagttaagttgatataatagcaaaatttctcccacccaaaactatgtcaacaattggatgtactcactgagtcaccccttactctgccactaatttatttccttgttgcttaaatgatgagagacatataatctccaccctcacggagttgtcatcaccctggagaggaagaagacagccaaaagagagaagtattgtcttgtagacttactagattcacatagtatcatccttctccagtgtgtaaggtgttgtctaaataggtccagttaaagaactacagggtagccatttttaaaaaaaaattttggccacgttttcaaattcacaggggagggggaatgtctcatactccagccctcctgagcctaggccctctgtgagatgtgtcaccatttcttggacaccatatgagacattccccctcggattagagatgctcaacctgcatcaacaaatctaaagcctgcatctggctaccctggggcgagtcctgtttacagtgcctattcctggagctcgcctctttttgccttttgtttgattatgtgatgtattacttttcccagcaggccagtgctagcatactggaagagggatttaataagctggcacccttgatgctatgctcctaatccaaccttatttgcctcattggccatttccattatggtggcagccctccattccagccacagcagcccctcagcgtcccccagtcacactgtccccattgctgctcatctgtgcctttgtccatctacaatgcccttatttcactctgcctgtgggagtcctgtgaatctctccaaagccaactcagttcatctttctgcttgaaaccttccctgaataggccaggtgcggtggctcacgcctgtaatcccagcactttgggaggccaaggcaggcggatcacaaggtcaggagatcgagaccatcctggctaacacagaccattctctactaaaaatgcaaaaaattagctgggtgtggtggcgggcgtgtgtcgtcccagctacttgtgaggctgaagcaggaaaatggcatgaacctgggaggtggagcatgcagccagccaagatcgggccgctgcactccagcctgggggacagagcgagactctgcctcaaaaaaaaaaaaaaaagaaacttccctgaatattccagccctcctgagcctagtccctttgtgagatttgtccccatttcttggacaccatataagagacttcagaggctgaagtgggaggattgcttgagcctgggaggtcgaggatgcagtgagctgtggtcataccactgcactctagcctgggcaacagagcgagaccttgtctcaaaaacagccaccaccaaaaactatcttgggatttgaataggattaccttaaatttgtagattaatttgagaattgacatctgtacgacattctagaacatggtatttcatgtcatgtattcatttcttgttaatgtctttcagaagagttttagggtttccatcatatagatcttacacgtcttttgttagataacagatctttgtatttttgttcctaaatacttcagacatttgtattgccattgtaaatgggatctttcttccattttctagttagttattggtggtacatctgaaaagcatttgaggtttgtgtgctgctctcttgattttgtttctagccaccgtactgaattctcatattacttccagtaaaatcttagttgattctcttaggcttctttggctaacatttattattttatatgcaaataattatagttttgtctcttccttttcaatacttacactctttccttcctttcctttcttttttttttctttctcagggccttgttgtcacccagactggagagcaatggtgtgatctagctcactgtaacctcaaactcctgggcttaagggatcctcctgcctcagcttcctgagtggctgggactacaggcaggcagtgaattttaaaacttttggtgtagagacaagatcttgctatgttgcccaggctggttttcctgccactttagagcaggtttcctttttttcatacttttaagaggtttttattaggaattgtccattgaatgttagctaaaacagtcaataaaatgcgttaagtaccagctacatgcaagaccctaagttagatacagtcagccctcttcatcagcaggtccacatcttcagattcaactagataaggctgaatatttgaagaaaaaaacaataaaaatacaattagaaagtacagtataacaactgttgccatgatacaatatctatacattttattagtgatgacctaaagttcatgggaccaggcacggtgactcacacttgtaatcccaacactttgggaggccaacctgggcagcatagtgagaccttgtcttt

SEQ ID NO: 361 - DNA, 3845 bp, Homo sapiens
tttcatgttctttagaccggtttttctcagaataatgtctacatacatacctcttctaatgtgtgacatgaatttaatatctttctgttacccactgtgaatgttaggctgttttcaaattatccacaaattattcttgtaatcacccaatatttttatgtgggtcctctcttacccattatggattaagatagtttaacaaatttaacaatgaggattaaatgagaaggcaaactgttaacttctcagctgtcagaatttgggtggaagggaataatggaagcctcttttgtgatccgcctgacctgctgtcatgtatggtactggggctgctgcatcttgagctatcagggctgacctgtggaatgattctagcacttgctctgccaccttgccagaagttcgtttcctgctttttacacatgtgtagcacttctctgctaaaattgaatggttttaaactaatgtatttttagcttaagaggtgttggtcagttaattattgaattttttttttttcttttttaattctgtcttgccaaggcctctctgggtttcagggcccaagagaaaacagtggaagaaaggattcagaatttgggcaagggtgaagtaactgttcatgcaagttaaaaatacctaagtaaagtttttgaagataaaattgtggtttcagaataatgctgattgttggagactgtaagaatcaggtgcacttgattttgcatataagcaaatggtaaatctatcagagtcctaaaacagacaagcatgaactcttcccattgctggaactaagtgcccacagtgtcagacaaaatggacattgaacttggattctgtgatacacagggcacttgatgcttaaatgaagatggaaaggttagcaatacctgggtgtcagttagaatttgagaattctatatgtttacatatttaaatgtgcatcttgatctggtgggcttcccatgtggagacttgcactctaattaactaagaagaatattgccttgttggatctcagtccacgtgcttgcactgcgatggcaatggcctcttcctcaaaatactaatttgtgtgccaatttgtttaaaattatttgaaggcagttcagcctaatctcagtgttctctttctggggtagatgagatggattcttaatatttctgggagtactttttaatgagagaattgtcaaatttggaaagatttattgagccttaggttacatggacagttaagcttaagtaaactgtatattgattatcaaacacaagctgtaattggaaaagttgagaggaaaagcatgagatcacaaattagggggaaaaaagaaaagggatttttaaatttggtgtattaaattcattgtccaagggggaaaatgaataatgtttcattagattccttatatgcaaaagtatttattttgaacatgtgtcctaaaatatatgcactaactgatgtgattaaaattgtccaagaaataaacttgagcataacatactttgtgtgcaccacagtaagctattctgcattgaagtggtcttttataactaaggcctggactttgctccaacagagtcgtggtcttctgaatagtgacttaaggagttttgtttgcttaagtcagataatagcacattcacagggaaacaaagagagttggtggatagaattttctgactattaatttttcttccatgaaattttattatgcctttggcactttctgccactcttacagcatatcacaagatatctgtttagcagaagattatgtagttactttaattttaatataaaagtagcttgtgatacattaccaagagatctctgattctttagtaagtttgagaacacctattctacagagatgataggtacttagaaatgaagactttaaagtacattttaatctaatataggccagtaattgggggaaggggctttgagcagtacaattttaagatgattttgagggttgtatttctttatcatttaaaaatatcctaaagtcagtaatttatatgaaggaaactcattcattattgaaggtattaaaaatagccatcatctgtattaggtagcagttttggaggatcatctttttcttttgctataaagccctattaatgaagaatacttccagtagagttaatagctgtagcttacctagtgtgttaatgaagtgtgtttatttatgtgacttgataccagtagtcataatagagactgaagaggtatgcgttaagcacgcctacttctatgcagtaaacaggctgcagctgcctagattagattcttagaaatgtcatattttgaattgttttatttcttgtaggggaagctttgtcccacttcattcatttgcatgccataggaattacatattggttatcattacgtatctaacaagattcagaaacaaaaatcttggacttttcacatccgaaatatgtcagctcttaataaatgtgtggtgcttaagtctacatatggcatccatagttgatctagagtatggatatgagtgtgttgaccagttatcagtaggtggacaaatatttgggcatctacagatgagactatgcactaagtgtggactgagtcctaaagaagcttatagtcaggtgttgtttaaaacattatcagaattcttaaacccaaggaatttaattttatttggtatttcttaagcctaaaatgaaccaagagaaagatgattttagaaagtacttgtagtgaaagatgattttagaaagtacttgtagtgcatgtgtggcttctgacttttgggatggcaccattttataatagtttcaaaatttagcttttgaaattctcaacattttatggtagaagactttggacctcaagtataaaattatacgtttataatttttttaaaatttaaattataagtattgtgaattcacactctcaggctattgtctgacttgatctacgtctcataaagcctgtacctgagtggagtggaaggtggagtcttaggttaatcagttactgactctaccctcaccctctttcaattgaggtaaactttgctgtttttctttttcataaagcattctcaaattgttgagtttattgctgaaaaaaatctccatgactttacagatagaattacaaactaaatgatgtcttgtatttagaagcagagtacagacctaacgaactgttagattctccaccatcacttagggtttgcccagaagcaacaccagagaattacagacagcgcgcttttgctgaactgtccattttggtggttgtgtttttcagtcaaatataagcaggatgggcgatagagatatatttatatatagatacatattctatatatctaatgcctaaatatgggtattaaagggaaaatttttaaagtctgattaaatccaatatgacatgaaattaaatatatggattagtaaggaaaaatgttaaaaagtagagaggataccaagaagattaaactggactagccttatttgcaagtgaaggatctggtgctgctttcagatgtttatcttttatttttttcccttaagctttaatcttcgtcattgtcttaaagtcaactggtgtttcttgttcattgactttggtacgatggtgctttgcaaggatgtatttatgttataatggccaacatttggtcagcccttgtccacttattcacttccctccttttgtaaaataagtgctttaattataaactgtataaaaataccttgtataaaccccttttttgattattacaataaataagctgaattgtaacaaatgaaatttgatttttgtaataaaacagtggaaaagt

SEQ ID NO: 362 - DNA, 3765 bp, Homo sapiens
tgcttcctcaaagcattctgtaatcagaatgtaaaagctcattagcatcatcagctagatgttttatcacactgtctcctggttttttcatttagcttcaagaccagccagccttgatagtggcagaacatccactagcaatagcaataataatgcttcactacatgaagtcaaaggtatgctgtaggtaaatttattaatgcgctctatccatttccagtatttaaaggtgggagatgggatgaagtttctggggtaaagcatgaaatccaaatcatctatgtttggaacatagttgtttggaacattttatacttttcacattgtaatacaaatgtatttcaatgtatacaaatgtaaaaacaggagcagttatttagtttcactttttcatcttcacagataaaagtcttatagtaatatttatacttcaaaattatctatatgtccttattttactgacattttgtctttgacatgaaaatgattgtccttcattttcttatgacgcatggacactcacattactcatattttagaaatatgtttggcttaatttatccacaaaataaggggaaggattttgtgtttaatttgagaaacaactatttgtgtatatatatattgaacaagaactatatgaatgcatttggctcatataaggaattatttcaagattttttttcttaatttttaaatgtgcattccaaggtgaggtatttaagtaaatgtctggaaaccttgactgatacctttttcttaaagatatactgcctactcagattctggaagttgtttgtttgtttgttttgagacggagtctcactctgtcgcccaggctggagtgcagtggtgtgatctcagctcactgtaacctccacctcccaggttcaagccattctcctgtctcagcctcccaagtagctggaacggcaggtgccaacgaccaccacacccagctaattttttgtatttttagtggagacagggtttcaccatgttaaccaggctggtcttgaactcctgacctcaggtgatccacctgccttggcctcccaaagtgctgggattacaggtgtgagccaccttgcccagcctggaaggttttttgtttttttgtgttttttttttttttttgagacgggttctcgctgtgtcacccaggctgagtgcagtggtactatctcaaatcactgcaacttctgcctcccagactcaagcgatcctaccacgtcagcctcccacgtaactgggactacagagacccatgccaccatgcccagctagtttttttgtatttttgttagagacagggtttctaacatgttgcccaggcttgtctcgaactcctgtgctcaagtgaggcacctcatccagcctctgaattatttgaccaatatatcatagttactctctgtactccagaattgtcaggttacaaggaatgcatttgttttgttcctttttggattataaaattattttgtctcagttgtaattttattttatcaattaatgctatgacattattacagtgatctgaaatacctaattttgaggtgggtttctttttttaatttttatcatgtttttcagatttctttgttcctttcccactcccactacttcatttgactagccttaaaagaaataaattatttaaaaatgtttttacatccagtagaaaaatgtagtctgaaaataggattttttttttctgatttgaaaatttaagaaactcttacttttgtaaaatgttacataacttgagccaaattctttcgtggcccactttactctctgtgactgggaaacaatggaaagttgcattttctgttttgatgtacagtttgttcgtgatcaaaacaaatccgtactcttaaggaacaccatagatttgagggagtttaattctagaactagctaattttcattttatatagttgcttaatgtcaactgagtcttttaaggttatataggcaccatatcaacagaggacagcaacaacaataagatgatcaagacatttaaaaaagaataaagcactacatatttgattgtatacttttactgaaatgttgtaagtaattgcttcatatctttatttaactttccttatgtgtatgctatttaaatttttttaaatgtttaaagttatccatgcaggatgaacagagaggccttcaagtagtaatgaggacttcttagataagcaaataattaaaatagaattttctgcatttagaacagtttttggtcttaacatactgaaataatataaaattcaccgcgcctggcctgcaaggcattttataactatttgaacctgaattttaaaaaatatattattcacttatttattcattcatttactcaaaaaatatattgaatgctttgtatgaggctctgtttaggctctgagtatgatagtaaaagcaagtctttgcccttatggagcttacaatagttgtcagtttgacaaaataaggaagcaggctatggcagacaattgttagactgataaaagattgacatggtttactaagcatttctaaataaagcttgaaagtaaatttggctgttcatataattagcacacagtcaacaaatgttattactcatgaagtattaatctcaattctattattgaaatctcaacaccccatttactccaaaagcaggtgcagttaataaccaaagcaggccacaaagccacagcagtggagaatttagcctgcttcatgaccatgaggcttggtccagcagtggtagcagtccaatccagtacttgaaaagacagaccagatcaagcccagtgctccagcacaaaatatctgaaacactggagagtcgacatcacaagatcaaaactggttcccctggaagtgaagttgttactctacaacagtttttggaagaaagcaataagcttacctcagtacagataaagtcctcaagtcaagagaatcttttagatgaagtaatgaaaagtttgtctgtctcttctgactttttgggaaaagacaaaccagttagctgtggtctggccaggtcagtaagtggaaaaaccccaggggacttctatgatagacggacaactaagcctgagtttttgagacctggtcctcgaaaaactgaagatacctacttcattagttctgcgggaaaacctacaccaggcactcaaggaaaaataaaattagtaaaagaatcttctctgtcacgacaatcaaaagatagtaacccttatgcaactttacctcgtgcaagcagcgtgatctcaactgccgaaggaactacacgaaggacaagcatccatgattttttgaccaaggacagtagactgcctatatcagttgattcaccaccagctgctgctgacagcaacaccactgcagcatctaatgtggacaaagtacaagaaagcagaaattcaaaaagcaggtctagggagcaacaaagctcctaattctattacccactacatgacatgtgggccaagtgagagaaaagtgtccttcagtttctcagtatgaagcctttatttctgaagtaacaagacacctagcaactataggaatcatttttaaaaatctttaaggagacttttaacagtccttcgtgaatagagcaggcaagaaatacaaaccttcattccttgaatcaaggagcactactggattcaactgccaaaattttttaaaggttttaggacttactataccttgtactgttaagatctactgaataaaggacgttctctc

SEQ ID NO: 363 - DNA, 4462 bp, Homo sapiens
gcttcgcaggtaagcccgccgggcgggcggcgaccccccggccggcccctcggggcagagaggagaaccctgggggagggggtgctgcaggaggaccctggagagagctcggccctggagtgggggacgacttggagaaggaggatttcgggggagcatcgtgaggagaggacttggagggaggatcctgcagaaggccagcttcctgctgtgttccctgcacccaccgatctcacacgcagccctaggacagacgtccactggcctgagttgggtctggggccaacacggagcaggtgggggtagagcagctctgctctcctggaggaaagttgaatggctggaaccaagatgacagatggaggctggcaggcaaacacgggaggcctcctcactccaagaggggagtcagcctggggacagttcttctccaggccctgctgctcccatcagctgcaacacaggagaggtaggcttctccggaaaagctcccacggtcctggatcccgctccaccttctagaagctcccagcgttacttcctgggctggcctgcacatcgttgcgctactcccgtccaaggggggacatattcggtgaccgactcagaacgcagcctgcttcccgggtggccagtggctcagcagtctcggtgcctgagcctgctccctccgcccggcggctgggcaggtggctgaatgcgggctggaggccttccctgagaagacggttatccatgctgtacatggaagtgaccagctcggcacctgaggagacacaccgcggccgatgacaggcgcagagcaggacgtggtgaggtcctcatacctaggaatgcagaacaagggcaagaaactcggtgcccgcctggcatctgccctgcaccagtggcctccaggaagttctccaccaaggatgttccccaggcactctgtgctcgccttcaccagcgtcctgtgaggtctttcacactgatggggaagcctttctaaagggtattagggggctggggggctgggggtgctgagtaccaagggtcccaggaagagacaggccaggcttatgggctgggcatccagagatcgccctgacgccagctccaggtggagttaggagggcactcttgtcccgacgcatttacagaccactccctcttcttgttcccctcgactctgagagtgtggtggggtagctgtggaacctgactgcttgcctgaaggttgggcagcgtggctagaaattgcggcccagacctgggatctcacccacacctctatgagacgtcctgaaggaaaccatcgactgagcggagaggcttcgccttgcccgcctcctcccaggaaggaagagcggaagaggcgtcgccagccaccgagactgccagccaccaccccctcccagactctctgtccccaccccagaccagggtcaccttcttcctgcactgggggtggggtgcggtaggtttcgcaatccagactgtggggtgggggtgggagcaggtgtgtgtaaatgagcagctcgtcaggagtcactgagaaggaggcagatggagctggtacccagcaggtctcctctcataagcgtcaaccctcgcctgggcgggctgggggatcctcagcaccccagctctgagccaggggtctgcaacccgggcaccagcgatgggccctcatgcacacagggcgccgagcggggccggaggcaagagtgacttcagacaggaacccgacgccacagccggtgacgcggaccctgggtcagccagcacgatgggccgctggggagaggagggctggaggcagagagtgtaagtgtgcagccttcatcagcttatttttagtcgcgttatgtaagtggcttcatctcaacgtcacatgggggggggtctcagatttaattacaggatgacagcctttgcttttcaagcaagctgttctcctggcaagccaggcgaaggattggggagttttgctaaacagaaggagccctttctgaggtgaccacccgtcaaaacttgaacccgcttccacctccgtctccctcttcccgaccagcctcacccagcctcggctgaatgtggcctgagagtagccacttgtccgcaatcacagggacgttttatgcctgtcaagggagcttcctctctcctcttcctccccctcccaccttctgcctggcagctttgccttctctccaagagaagggtccacccaatcagaactcctcttccttttcattcctggattaaagcacttgtaatcagtaaccagaaagttccagagcgggagagaccggaaagcactggagtgctatcggacgggtgtctggggcagagccaggagggcgagcctcttctctccccgcctgcccttgctcacttccccctccatgccaggtgctgtgggagcagctgggcctggccggggtcggcgggtgaagctatccgcatggtgtctggagcaccgtttctttgcttcctggatgggctggatgggctcccgtgttcttcaccaatggcagcgttaccagcaccaatggcagcgttaccagcaagaaggcaaaggcaggagcacatcgagggtgggagccagggctgtggggtcaggagtcccgctccttgccgcgggaagcctggctcagccacctccagcacacttcggctttgtccagcataaaaggcagagcgacgttttcactgcaggctgtttcccaccagggcaagtgggacagggcgagtgctgacgtctgcaggcatggtgtgcatttaggggtgggcggcaccgagggggcatcatttggcataggcgggcccgggggccactgggctagatgactggctggttgctgggggcaggtgtcacagcctctctgagcaccctctaagtggaggacagaacattgttgggaggagtccaggcataaagtgacataaacagcgcagagaatgggaccagcgcacctgagaggtgatcattagcctcagcaactggatgggacattccgaagagctcccagccaacacagatggtcactccagaggctgacatttaaaaggaaggggcccggccgggcacagtggctcacgcctgtaatcacaacactttgggaggctgaggcgggcagatcaactggggtcaggagttcaaaaccagcctggccaacatggtgaaaccgcatctctgctgaaaatacaaaaaattagccaggcatggtggtgggcacctgtaatcccagctactcaggaggctgaggtaggaggatcgcttgaacccaggaagtagaggttgcagtgagccgagattgtgccattgcactccagcctgggcgacaagcgaaacttcgtctcaaaataaataaaagtaaggggcacagggagggggccccagctcgtgccccttctgtgtgggctgcacatggtgacttccttccagagagcacagagtgggaggtaggcaaggcgtctccacagtggagagcccgacccactgtctcagcccagaggtcaaggctggcaccatcaccgagaggtcacacgggcagatgtgacagggcgcttcaccactgggctcttcctcccagacccataacccttgtcttagtattagaaaaacactggcagaccgggcgcagtggcttacacctgtgatcgcagcattttgggaggccgaggtgggaagattgttcgagagcagtctgggcaacatggtgagaccccatctctacaaaaaaaaatttttttttaattagctaggcgtgatggcacatgcctgtggtcctagccactagaggctgaggtgggaggatcactggagcccaggaggtcaaggctgcagtgagctgtgatcacaccactgcactccagccttggcgacaaaccaagaccctgtctcgaaaagaaaagaaaagaaacattaggcaaatcccaacagggggacactctacagaaaaaccgaccagccctcctgaaaacttccctagtcatcaaaaccaaggaaagtgggctgggcgcggtggctcacaccttaatcccagcactttggaaggctgaggcgggcagatcgcaaggtcaggagtttgagaccagcctagccaacatggtgaaatctcatctctaaaaatacaaaaattagccgggcgtggtggcgggcgcctgtggtcccagctactcgggaggctgaggcaggagaattgcttgaacccaggaggcgggggttgcagtgagctgagatcatgccactgcattctggcctgggtgacagaatgagactctgtctcaaaataaaaaaaaccaaaaaccaaaaaacaaccaagcgaagtctgagaaactgtcacagcctagaggaacctggagacagctgatccctaaatgtcacgtgggatcctgggtggggtcctgggagagaaagaagacattggagggaaactgaggaaatatgaataaagtatgggctttagttaat

SEQ ID NO: 364 - DNA, 6124 bp, Homo sapiens
tcaccagacttgccctttttgacaattgtcttgatcatagttagttggacaacttgtggagcactagccatacttctttcttatctttactatgtgtttaaggttgttcatctgcaagccagcttaacaacttttaagaatagccagcctgtgaatcccaaacactctagaagaagtgaaaagaaatccaatcatcataaagactcctcaatacaccatcttcgtttatctgccaacgatgctgaagatagccttcgcatgcacagtactgtgattaacttactaacatggattgtattactcagcatgccttctctaatttattggctaaagaatcttagtaaattgttgaagactacttcacaatttccacttcctctggctgttggtgtgattgcttttgggtcagcacatttatataggcttccatgctttgtcttcattcctcttttactccatgcattatgcaactttatgtaagattggacttaaggaatgatgaagataatttatgtgtttagggccagtgataagagggaacacacagatccatcagtatggacagcaagatcctttggagaagacaagtctatttttacaatattgaaaataggaaattagttttgtaatgtttgagggaagtagttgaagcatggttttgttttgtggtgtggaatccatgtagtaatcatttttgaaaaattcatgaagggatatatggtgatcactatcattgaggactcctgtgcatataaaatagtctgttttatcaactgtacgagaagtctgatatgagagatttagtagatgcagcattatttgcagtctcactgcaagcattctactcatttcatcaaactttttttcacaaaagtaggttattttgaatttgctatagtttacctattaagaaataagtctttaaataactgatgaaatttatagctgtttggtttctcaaaggttaaatagccacagaaagcctttggttagtttttggcagccaccatgaacaaagtggatcttgtcttcttacatctatgaaaatagagctttgaatggtaaggagatatgttttcttggtaaccaatgcaagattgatgggtggaaacatgattcaaacttacacaatttttcttgctatttttcaaatatgaatcttactatatattctcggtgaacatcaggagactattaaagaggtctgctgttaaatgtaaagaaaaaatgctcgtagctatttgcttcctggtattggagcagttcagttgtttagtttataccattggattcaattcattgcaccatggttgccaaaagtgcctgaggtcataatggattgttaaaataactaaattccagtggttggaaactctaggtttgtaccattttttctgctgtgggaaaaaacaacaacaacaacatgatcaaggtaacatcacatttgatgtataatattatactattaatggaatatcagtagacaactgttaacccattagtagcatgagtataaacagtacacctgaataaattggagacattagccactaggtttaacagtggaatcttgatttgcctaggtgacttctgggattactgtttgacaaataagagtaacattttatttcatttcagaatttacgtcacctttagctacaagagtaggaagaaggtaatcggcaaggcagaagagtatactctttgccttaggatagcgtaaactcaggctgagacatacccggcttatagagttcttctagatgtgtagactgtaaatgcccaaatcctctcaactaaagttttagtgattccacaaagcctctcatgtaaatttccagtgattccaccattgcacttgtgaatatgtatccttgttagtacccagggatgtcctcgagcaccagttttattttatctgccattgcatctggattccattacagcctctcagctgttactgcctgtggacagttacttctgcttactgcctgtagagagttacctaacttctcttctcagttcttcctcaggtcctggctattttggcctcagttgaagggagtcttgctctcatctctgagggttttaagtttgtttgatcccattgttgtcttttctagctttgagcatgtttttcagtattcatattttaacttactgagaacattaaagggaaatgataaactcgtggtggggatatggcagacaggtgcttgtttgtttgagagaagtagcagaagagataaaatacaaagtgctatatgtttcagctggagaggaaagagagagaatttattagattatatacttgtcccatggcataccacgtatatgtttaaatagggacacatctccctatgtttaactatacttataaacaactttgatacacattgcgtcttttattctgtcatctgatattttagtgtatctcaagttacagattacatgtgtccttaaactatttctgaatttggacttagttccatatacagaaagaactttagaaaattcattaatttggatcttctattgatagccataaatattatgtttatgtattctaaaacctctttgtttagttagtactgttcatgaatgtaacaagcttcaatttctcatttgtgagtagtacatttgctttttgtttgtttgtttgtttgtttttgagatggagtctcacgctgtcaccaggctggagtgcagtggcgcgatttcagctcactgcaacctccacctcccaggtgcaagtgatgcccctgcctcagcctcccgagtagctgggactacagacacccgccaccacacctggctaatttttgtatttttagtagagacggggtttcaccatgttggctaggctggtctcaaactcttgacctcgtgatttgcccgcctctgcctccccaaagtgctgggattacaggcgtgagccaccacgcccagccgtacatttactttttaaagcagcagactaggtacactaattctcactcaaatattttcatgggaatgtagttatcaccaagtcctaaagtattatttatgccaaaaaaaatttcattttaaggactacaaaaatgattctaattaaacattttataatcaatagtaggttgggtctttagccattatatgtgtatatatacagacacatatgtatacacttacattttgacagggtcttcattgagtcttgatgcgctttaaacccagctggctaccagagatgcgaaggtgggctctttgaagattagcaaaatggacgtttctgtcacttgagaaaaggaaagttctttgcctttaaattacacagttttcatcatgcccacaatctatattattggctggttaaacagcactgccctattagcaatgttaacaaaaatgaaattatttattggcggttatagattatctaattcaggaaatttctgagctcaacttttacagcaactgttatgccttctaatttagcaattgagttatgagtaagttttgtgcttaactcctagaccctattgttgataaccagatcaaatatagtctgtacagaggaaaacactgggaacatttagtatttctaaagcctcctttggagttactactgattgtaatttggaactgataataggtagagattgctaacactgttttttttcctggatcttttttatgccagaaattaaacaggttctgctaactcttttttttctcttggttatcaccagaatgaaaatatttaaagtgatgactctagaaaagccatctgtgcctggttaacattgagtttgagtctcttcaatatatattgatcatgtattgattaatctttattttttcatattttggctagacaaattcagatctatataatggaataccccttcttgagtgaactatactactaatctacatgattatatagtaaggaaaaaagaagaaataactgtaataggcatagtgtttgttgttggttgtcttgtcattcatgtgatactactcatttccaaaattcacacaaacttacatgaggtggattatttgttttgttcattatttagttcctatatgttttttctttagaaacagagtctcattctgtcacccaggctggagtccaatggggcggtcatagttcactgcagccttgaactctttggctcatgtgatcctcccatctcagcctcccacagcaggtgagactacaggtacatgccactgtgcctgactttttaatttttttgtagagacgaggtttcagtttgttgcccaagctgatcttgaactcctggtttcaagcgatcctcccacctcggcctcccaaagtagtgggatttcaggcatgaccacctggcctagttcctatacttttcttaattcttcagacttctcacatttagtatagtgcattcatttcatcttgctgtttattagcaccctttgtggccaagggaaataaaaggtggtaaaattcagttttcagtttagttcttgaaagctctgggaaatggaggaaacacaaaactatgaattaaactagggctgttgatttctgaacccccagataaatcagttgacccacattttcattttaggtgttaggtccaaattagcataatgtcttgcattattattaggttcagtgtgaaactttacagtgctgcatttgaagtttagtaactggttattattaatcatttgggaaaaatgaaaatgtgttgggactttctatgactaggcatttgttgattatttttcatgattgctttttgttttctcattgtgtaggatttgtgaacttgtatattacaggaaacaagatactttgtaaaatttactggggaaaatccatttggagtgcatgacatttgccaggataagaaagcagtaatatgtttgtattataaaattacaccctgccagaaaactttctttcctagtaaggtaaatgtagaagggacttttacagcatagtaagttgattaggagccaaaattttattccagtttttttttgaactaagaatgttttaaattctgtaatgaacttttatgtttacccattactcatgcattctttcacaatatgtttaatagcctgaggaaataggaaagctgtgaagctactaccattctttacttttaataagaataataggaaagaaaagtcaggtcagtaatccaaatccaaatatgtatactgcaaatgctcaagaagtcacattttttgataaattgtattgagtacagaagaacttatatgaatttattatctgttaataacttagttttgacaacagaataacatttggaaattgtgagaataatcaagctgtttttccattaacagtgtaaattcataacatgtccttcaaaaggtgatattctaagctgtcttaattgtctacggttgataacttttaaataaagtacaggactttctgaaagtgtttggcatgttatgctgccaaaaacaatctgtgttttgaaataccaattaatcagttaatttctgaagactttgtataggacttgatatatgagtcagaatctgtctgtactcattctgtacattgtaactttgaacacttatgaaaaactgtatctgttggtgtgttttgattagttagtgtagatttgtttgcgtatttgaattccgattttagtttaggaagactaaaagtagccatttttgtaaagttcatatgctattttttaatgtcatttttgtttttaatatttatacaatagtgatgttactagtaaaaaatgtttatagataacacgtagagctattaactgttcaaaagcctacatgataggcatattttgtatttcgtgttgcactcgttctgtttcatattggactttttacatcccttttttagcaaaaaaaagagacacatttgaattctctttagcataaagctgtgcattggaaactatgtgactgtatccatacggttagcaaaatactctttgccaccaaaggtaaatgaaactgtaaaatacctctggatatttgtgccaatgaacttttcttagcatattaggattaaagcaaaaataatcttttcagtatgtttcatctaggacttacaataaatgtttaaaccatg

SEQ ID NO: 365 - DNA, 3709 bp, Homo sapiens
atctgtgggcttccgtgctagtctcagcacctgggttttatattcagcagtatctatggggagttcgaaaacatgcaggctgccacatgtctggaggtcatacaggcaatccagaaagtgtaaagagattccttcctcaaatttcaagggatgtgttccaacctttcaggctacaattcactctacaagttttaataacatatttctgcatttatttttttctggtatcctcaatccagtttgaagggtatcagctttgctagcgtgatacatcatttgggattttaaaaatggtattgctaatatctgagtataaattttatttctaatattaaaaactttccaaattacacaaaagctgtgatcctcataagttttgtctctagaataaaattatgtgacattcctaatgcatgcattttgttttttgtgtatttgttttttaaactaagaaccttgatgatgcactgaaactatttgacatagcctcatttcaaaggcagtcacatagagttctgctatctaaataaattaaagctgatatcacacaacatttcagttgggtaagcttgcaggcaatgcttgtctgggccacatatttataatgtctaatgtctttattggatgttgtttatctccttcttgaacacgatttgttcccccatcaaagtggaaacatgtcagtatgttcacaattttataagtgcatatactctatgtgtatatgtatgtacattcacatctttacgtctataagtagtaaaatattttttccaggagtgggtgtactttaatttcctttgtgtttttctatgtttcaaaattatctacaatgattaaccagaaaagcaataattatcatacataaaatagaactcttaaagaatatctttcctaggctcgggccaagaaaaaaatatcatattatttttggccagagactaccagaattaagaaattaaagagaaggattttgcagaataacctcaaaggtagtctcaaaatccacaattatactaactgaacacagagaaagagagagagtatacatcacctacctatgtcatgtgtttttctttttctctttgtaaaccagattgaaaaggaagatcaggccaaccccaaagaagaagtgaccaaggaggagtttaaactgaatgaacaacctcggctcctggactcattgcttcacaacccatctacccctggatgaagttatctggcttcaaatattatgcaggggcaaacacctgctgatgtggcaactgctgatgctcatggtccccatggcatgggggcctcagggcagcctgcctggaggtgagcagggctatctctgtgtgttgtactccagtcagggggttccagcagcacccgcaggctctagagctcaatgcacagttctttttgtttcacctgcagtcctttcttctccaggatatgcacaggcctccagggtctttcatggctcagggtcagggtggctcaagtgccaacccacatgttgtcctccaaatattcccttctatccctggcatgctgttgctgagctcaacttttaatttttgactttctcctttgtaattaatctctatctgggtttctctctttctctgtgccatttggtttccttaattagttccctgtgccagcccatagtcagagccataattggctctggggaagatccaagttattttctgagtaagatattaggcttccatatgatccagagatgcaaagaaatccctagagagtgtaggagttgtctaaatccatgtgtcagatgtagccaacgaattatgtcagaagcagagagaaaaggcctgaaaagcagctctctcccactcctcaggcccttgtctccaaccttacatgaggctttttgaacatctcctcctggcccagctggggtgagagcaagtcctcgaaggcactgcctttgagccttgctcagcccatctgaactatcccaactctagaattgactgctttcgaattgtgtgaccttgggaatgttatctggcttcaaccacaatgccctacccccagctcctctcccaaatgatcctagatacagggctgcttccccccgaccctaccccacctcgggacacaggctcatggcctcatggcacttcaccaccagaagtggtgctcagagttcctatttccacatctaaccccctaattcctgggaaagtctgaggcctggtccccccagtgctttccctggctggcctctccacattttcatctgatggtggagtgagatcaggaaaaataggacaggagctttgccttgggggagaagagagttaagtgtggaaaggggtgagttataggaggttaagcagtccaagatttctctctctgtgtaggaggccatttcctgatgtgaggggtctgaacccaattatgatgggacagggttgggcattgacttcccatctcttctctctgtttttctcccactatctgtagcccaaaactcttatggaggactttgatctttagtataggctattggtcagggccataggaactaaccccgatcctcactccaccaggatctaccacatcccctacacacaaacacatgctgtggggagggagttttcccctgggtcaagttgaggatccttagatcaccttgtgctcctgtggactggtgtgtgcgtgtgtgtgtgtgtgtgtgtgtgtgtgtgtgtgtgtgtgtgtgtatgttgggaaacttagctttcagagaatgtctatgggctctcattttctctctcacacaaaaatactcgggacttctccaagtccctgaggagcctgaccactgaagctgatcatgagatgactgtatgctgacacacccccttcaggggcctggccttgacttagggctgcactgtatcctcagcaacggccttgcaggagccccttttggactgctttccctattcagcccagagttggggtggtgggagaagaggggttggagtgaatccatctctattcaaattccagctgggattactctaggagtcttcctggcttgttttgggctcaaacttagctacattgtttattggctcccaaagtcgggattgaagagtgaaaagatgcaggcaatgaatccttctgcacactcctccccaacctttccagcgcttttctacttaggaggccagtggaagggaggagaggccatgccctagcccacaggggacaaggttcattgttcttccaggcttggttcactctgcttttgattcagaagctctttccctacccagcaagactacactttcttgccttctttctattttttctttttgtgcgtataaatggtatgttgtgatatattctcagtgcttgtgcccaccttggaactctgttcttgctcttcattccgcatgtgatactctggtccaagatcttggccaggtgccttctgctcaaatatcgtctcagaggtgcttcccttgaaaactcggtgctgtttccatagttactctatttgatcactctaagtttggttgtcttcatagcacttgtcaccctctggaactattctattcatttatttacttgtttaatgcttggctcttttcccctcctaacgtaaactccatgattgccaacacctgtttacttactacagttccccctccccccacattcctgacactagtaagaaccaataaacacttgttgacgg

SEQ ID NO: 366 - DNA, 3708 bp, Homo sapiens
actcacacacgtggcgggcagggctgcgcggcgttccgaggagcctcgaccagaagcagcaggaaaaatgcgcgcagagttgagatgaccagcgagtagcggaaaggggaagggacggtacggggaaaggcatgcgatgggagcgggctggcttctagttttccttcctttctcctccaataactcaccaaggaaatctcactgagaagacgggggaaatgaaaggaaatgggggagcagtgtccacgagccgctaaagcctccacaggagacggagcaccgtacctgcagctagctccccggtcccgcccccgcgcattggactctgcgcctgtgcctgcggcggccagcgtgcctccgctccacgcccttccccgagcggcctcgcgcagggcacgtgactctcctttctcactgtagcctatccgagcactccgatctcctcaggctcctcccctccctcgtctccctggcggcgctggccttgcgtcctcgtggtctcagccgctcgctccgcccacgccgcgattggggcctgctcacaaaaaccttattgggtgacgcctgcgcaccagctgcgctttgccgtctctactaggatttttcttttttccccagatacacagaaatagaaaagagcacagtttttaaggggacatcattttcaccccgttaactttcaaaggcacgtaaaaacagtggcttccaaatgagcttctctagcagaaggcgctgcagaaagagggaagaggggagacctagtttgcggtgctgcctgccacttcctcgttgcctagtaacggtttccacggcaaccgcacagtcaacgacgcttagcaatccggagagaaatagggtgttttcttcccgagagaggactgctaagagggggttaaagggggacgatgtgaaggagagaacctgtggtccttcagaaggcgaagaagaaagaaaggggaagcagtgaagaaagggacggagatactgggacagggagaaaaaagttgtggagagtagcttttaaggagtcatttggtggccatggatccaacgtgctcttctgagtgcatttataacctcatacccagtgacttgaaggagcctccccagcctcctaggtatgtggataagcaaagactatcacttgaaacaagaatggggaatactcagtattaattaagcatacatatactggaatttttaataataaataaaatgtatttttgcctcgatgaagtagccttggaggataacttgttagagaaaaggtcgaaatatctaggtattcagcatctcacagttttacagagagggcagtctggcgctgtgagatgaccattttattatattacacttaacctcttattaatacggtatgtgattattgtgtaatttaattatatgtgatatacagcatagtatgaagtttcatgttgaaaagaaaaaaatcacaattctattatcttgtttaaggatacttgatgtttggtttcaggagttcggtgttgtatttctaactgcactactccctctctaatgggataggataggacttttcccccaagatttttatgaaatataaatttacatttgcttttgagcctcaggtttttgatcagtgaaacgaaatatctaccactattaggcagtttctaaggactttttcagatctaatggtttaaatggaaggaagaattggtggatagataatgaaccaaaaaatatgtaattgagttgaaattttacataggtcttagaacctcttaaattctccaaatctcaaaaacgtgcaaaggaagcacttcagttactcccatctgtagggacttcttagaacttacttaaatctgtggggagcaaagaaagtagtggagaaaatctcatttctcctaggacttgaaatgtttcctgtcttttaccatcatccttgtccgtatgcaagtcaaaaccacatttgaaaaggactggactaaaaatcgggcctagcaattaattgtctttgtgaactttagaataaagtttcatttgtttactgatctgtgagataaatgtaccagataatatccaaggccccttttagatctaatggtcaattatttttactagtattagggtaatagcttcaacaagtaggcagcttcttcaattttaagtatctggtttaaattagagcagtaactgtattacatctccattagcatatcaacatctagagactggaaagaggaatgtaaagtaagttatggcacagttgcagaatttattttcaaattttctattgttgcaccaacttttggtttcaaattcctgcatattacatgagataaaactcctctataacagattggtagattgtatttctatagaatattgaatttgagagttattttattaggtaggtattctgttctttggcaaattaaaaagctttactgcatctagacgattttttttttcaaaaaaaatttataggaacagtctttattcatttggcaagcattaatggagcccctattatgtgtataatattgcactagtatatctgttcttggtgctgttggagtgatagcacagacttcttggttttactatgaagaaatgagtagaagaaagatttatgattagaggaaatagaggcacccaaatgtgatgccaaaagaatcatttctgttaggttaaagtcaatttacactggcaagattctgacaactgcctggcttttgatctcccacgcctcagagtttaccgtctttttggggaactgaaatatgaacactaaaatttatcattgaaaaccataatgagagatgaagatactaaatgagaacttagaagatgaatgtatgtgaccaaaatcggatgaaaggcacttttctgcagttgaactattggctgagacttaagttatgaaagcctcagagtcaatgggaagtcatgattcagttttcaaaatttgagttactcatgatgcataagatggtttccaagattttcaccaaatctgtcacccttttttttttaattacttttttttcaagacggagtttcactctttttgcccaggctggagtgcaatggcgccatcttggctcactgcagcttctgcctcctgggttcaagcgattctcctgcctcagcctcccgagtagctgggattacaggtccctgctaccatgcctggctaattttgtatttttagtagggatggggtttcaccatggtggccaggctggtcttgacctcctgacctccagtaatccacccacctctgcctcccaaagtgctatgattataggcgtgagccaccacgcctggcctatcaccctttattgatgtctgcagttattgaatatctccagtcatcccctctttccattttgtttaaagcaatattccagttatggtctgaacagtccatgaaaccattatctcctttccataattcttggcacaatattttcatccattcagcctaagcttccataagcattttgacagtcatgtccaactattggctcacactaaaataccctgtatggattttgactaaggttggtctctcccatcctctaattatgtagctgattcttttttatctcaactcattaatctatggagatagttttgcatttgaatcttttatacattctgttaaccattctttttgtgtcatttgcaaatttaataaatatgtcttttatatctctt

SEQ ID NO: 367 - DNA, 3724 bp, Homo sapiens
aaagaaactataaatgcctccccatacccttcctagggcaaggctgccacagcgtcccacatggccccacatgcagccttaccagcttcctcgggccgcccatgtgccatgggtgacagtgggtgtctcaggaaggcctcccacccatggctgcacagctagaacctcccccagcacatggggacgtgcttccagcccgtctttcaagaatagaaaacacatctcatggcagaagggcagacggtggggcgcagtgaggctgagcagtgtgtatggagaggaggtccactggcctcgcctggcctcagtccccgccctccctctcatcggctcatttctcaccctggtgtccttaaaagtcacactggctttggagggttgtcgtggggccgagatggggcgatgtgtgtggaagagccgagccgacatccaagccgaggcctggcctgggagcctcaggacccgggaggtctcctttctggctccagacgctggtgaccaatggccactgctcaccttccctggggagttttaacaaaactgtggcttgagtgcttgtcacaaatctcctaaaggccttcgtttctggactgacatttcagtgctttcagctgtcatttctgggaaacaaaatggtttggcctcaccatcctgttaataggatccgttttcatgacagattactcctgttctcaccggcgactccccattgctagacaggcagctgatcttcctacagatttctgttttgcaaagagagcagcataggccggtgttgagagaggtgggggccagaccacctcagtccaatcctggcttctccactctggagctgtgggaccttgggaacgtttcatgctttctctgtcctgagtttcctcgtgtatcaaatgggtacactaaggcccacttcacagagagtcataaggattaaatgagttgttagaaggcattgagcccctggcacttggcagtgctgggtaagtgtttttttagtatgaacagtagtttcagaggaggaagtcttctgagtccaacactgagcactcagtgtgtcacctcctgcccagcctgtggttacatgatctcggtgagtcttcccgtggcccattctacaggtgaggaaactacagctccgagaagcatgagctacttgccttccttcagcagataccgcaggatgcctgctgcacctggcactgccggcagccgggccacgccatcccccgcaacaggcgggtttggacccttgactgtgccgctctaccaccggcttccctcttaagatggagacaccctgtaccccactcgcatcttcccaacagagctttacaaaatccccctccttgtctagtcacgccttagaggcacggccctgagatcccgatgacacattcataacaggtgacaggtccgacatgtttacttcttactagcccaaagaggtcttcaaagcaaatcgcatcataacagtcacccgctcctgcctctttagggctgaccagggtcgcctcctggactgcgtggtgcgatggggaagcctcactgaagggaagatcagggcgcacctgggggaggttctggaagctgtccggtacctgcacaactgcaggatagcacacctggacctaaaggttggtgaggccccgggcaggtgaaggggggtctgagcacaccggcttggccatgcgggacacagagccccctctgaagccaggccaggagcccccaagtgactagggacaaaaagggtgggtggggcagcgcagacactgattgctaatctctctctctctaagcgtttgcgttcagtgatgcacacggtcaggagcacactgggtaaaacgccggagccctcccagccttccacgactttcagaaagtccccatgagttttgcccggtgggtgtggcgggtgcagtggtagcttaggcgggaaagagagcattccccttggtgctgggagggaaaatgaacacccagcttcataaagcagcctggtttcattaggctacttggcacttagatctccaaagagagctgccctgtgtggatctgggtcccagctccgctgtgtcatctcttcctcctcaccctcggctgccagctgagtggtccggcctgctttgcacatgcatggcttgtcctagttgacatcctagattccttccacctcaccatagagtcccgcccatcatcacgagtaagcttaagattggatggtctgaaaatgacagttgtattctgatttccagcctgagaatatcctggtggatgagagtttagccaagccaaccatcaaactggctgactttggagatgctgttcagctcaacacgacctactacatccaccagttactggggaaccctgaattcgcagcccctgaaatcatcctcgggaaccctgtctccctgacctcggatacgtggagtgttggagtgctcacatacgtacttcttagtggcgtgtcccccttcctggatgacagtgtggaagagacctgcctgaacatttgccgcttagactttagcttcccagatgactactttaaaggagtgagccagaaggccaaggagttcgtgtgcttcctcctgcaggaggaccccgccaagcgtccctcggctgcgctggccctccaggagcagtggctgcaggccggcaacggcagaagcacgggcgtcctcgacacgtccagactgacttccttcattgagcggcgcaaacaccagaatgatgttcgacctatccgtagcattaaaaactttctgcagagcaggcttctgcctagagtttgacctatccagaagttctttctcattctctttcacctgccaatcagctgttaatctgaattttcaagagaaaacaagcaaacataactgatcagctgccggtatgttcatcgtgtgaaattgcattccaagtgagctgtgctcagcagtgcttggacacagagctgcaagctgcgctggggtggaggaccgtcacttacactctgcccaaggcagaggtcgcattgctgtatcacagtattttattcaggtttctgcaaaaaaataaaaagataacttttttaaacaaacatgaatagaattttgcaaatttaacgttttcaagatttattcaaggaaacaaaatgcctatgttcaaccactggtgttaatgaacaaagatactgtgcgtctctggggaagacgcacctaggtggcggccactcccatggccttgtctagggctcagagaccactcggctctgagcttccaggcgcctcgtctgtgtgcatctcacgcccgacgtggcttctgaaacgtgcattcaacctcaaacttttgcataaaatagaatgaatcgttttgctctgatgaaatgtaggccttacttgtatataagactgttcctgccttcggtctgtcattttcccacctgcctcccctacccaccccccacccaccacctggggcttcctctgggggtccgagggtcttcccatcacatgaagacatcaggttgggtcctgccccactgcccctccccctgttcctgccccaagccgtcaatcagattgtggagcagtacacagtcagatgaaaatactgtaaatgcactcattgggggttttttggttttacttcatatcatgtacaatgttgtggctttaacattttatgcaactatttatgaagacctctgttgtacctgtaataaatatatagaaaaagc

SEQ ID NO: 368 - DNA, 3866 bp, Homo sapiens
tgcactccagcctgggtgacagagccagaccgtctctaaaaataataatagcaataacaaaataaaaataaatgtactgcacccaactatgacccaggagtggcatgggtttccgcagcgcagcggccgcgcctgggcgccccaagcaacacaaccagcgctgtcaggaggcgaataggagccaggacagagagctggggaggccactgctgtcaggcgagggataagaaggccgtccgcggcgtcactgacggggctgaaggaacaccaggagaagagtggcagacagctccggagccgcgctgcccgggcgacgccggaagatgggcctcccagcggtcttcctttcagccaatggccgcgagatgcgccgtccgagggtgccccgcgcggcacagggagggaacaagcagcccatcgggtgcaagaaagcactatctttctaggtgactatgcgaactaccagggaagtgtagctagggacaggcttctctgcccgcggttaacctaactcagtgccaccacgcctttaacctgaagccagggagcacggctgccctcagtaaagatggctgactggcgcggagaaaaagccggaagcagctgggctttgcagggagccgactgagcgctgcgggggcgtggcctggcggtggaggggcgtggccagccgccgtaacctgggtttgcgatctttgaggcgcccgcaccgcacccggtcccgactctgtggcttcctgggggcgggttcgccgtcggccccgcccccgcccaggtgtctccctttgggaagctgcccgccgagtctccgagatttgtccctggtggtcccgcggacccctcgtccctccgcagtctccggctggcagcgatggagggcgctggggagaacgccccggagtccagctcctctgcccctgggtccgaagagtctgccagggatccacaggtgccgcctccggaggaagaatcgggggactgcgcccggtccctggaggcggtccccaagaaactctgtgggtatttaagtaagttcggcggcaaagggcccatccggggctggaaatcccgctggttcttctacgacgaaaggaaatgtcagctgtattactcgcggaccgctcaggatgccaatcccttggacagcatcgacctctccagtgcagtgtttgactgtaaggcggacgctgaggaggggatcttcgaaatcaagactcccagccgggttattaccctgaagggcaagaagaggcagagctggaggagttcctgtgccctgtgaaaacaccccctgggctagtgggcgtggcagctgccttgcagcccttccctgcccttcagaatatttccctcaagcacctggggactgaaatacagaacacaatgcacaacatccgtggcaacaagcaggcccagggaacaggccatgaacctccaggggaagattctacacagagtggggagcctcagagggaggagcagccctcggcctctgacgccagcaccccagtgagagagccagaggattctccaaagcctgcacccaagccttctctgaccatcagtttcgctcagaaagccaagcgccagaacaacaccttcccattcttttctgaaggaatcacacggaaccgaactgcccaggagaaagtggcagccttggagcaacaggttctgatgctcaccaaggagttaaagtctcagaaggagctagtgaagatcctgcacaaggcactggaggccgcccagcaggagaagcgggcgtccagcgcatacctggcggcggctgaggacaaggaccggctggagctggtgcggcacaaagtgcggcagatcgcggagctgggccggcgggtggaggccctggagcaggagcgggagagcctggcgcacacagcgagcctgcgggagcagcaggtgcaggagctacagcagcacgtgcagctgcttatggacaagaaccacgccaagcagcaggtcatctgcaagctctctgagaaggtcacccaggacttcacgcacccccctgaccagtctcctttgcgccccgacgctgccaacagggacttcctgagccagcaggggaagatagagcacctgaaggatgacatggaagcttaccggacccagaactgcttcctcaactccgagatccaccaggtcacaaagatctggagaaaggtggctgagaaggagaaggcccttctgacgaagtgcgcctacctccaagccagaaactgccaggtggaaagcaagtacctggccggtctgagaaggctgcaggaggccctgggggacgaagccagcgagtgctcagagctgctgaggcagcttgtccaggaggcactgcagtgggaagctggggaggcctcatctgacagcatcgagctgagccccatcagtaagtatgatgagtacggcttcctgacggtgcccgactatgaggtggaagacctgaagctgctggccaagatccaggcgttggagtcacgatcccaccacctgctgggcctcgaggctgtggatcggccgctgagggagcgctgggctgccctgggcgatcttgtgccctcagccgagctcaagcagctactgcgggcaggagtaccccgtgaacaccggcctcgtgcctggaggtggctggtccacctccgtgtccagcacctgcacactccaggctgctaccaggaactgctgagccggggccaggcccgcgagcaccctgctgcccgccagattgagctggacctgaaccggaccttccccaacaacaaacacttcacctgccccacctccagcttccccgacaagctccgccgggtgctgctggccttctcctggcagaaccccaccatcggctactgccagggcctgaacaggctggcggccattgccctgctggtcctggaggaggaggagagcgccttctggtgcctggtggccattgtggagaccatcatgcccgctgattactactgcaacacgctgacggcatcccaggtggaccagcgggtgctccaggacctgctctcggagaagctgcccaggctgatggcccatctggggcagcaccacgtggatctctccctcgtcaccttcaactggttcctcgtggtctttgcggacagtctcattagcaacatcctccttcgggtctgggatgccttcctgtacgaggggacgaaggtggtgtttcgctatgccttggccattttcaagtacaacgagaaggagatcttgaggctacagaatggcctggaaatctaccagtacctgcgcttcttcaccaagaccatctccaacagccggaagctgatgaacatcgccttcaatgacatgaaccccttccgcatgaaacagctgcggcagctgcgcatggtccaccgggagcggctggaggctgagctgcgggagctggagcagcttaaggcagagtacctggagaggcgggcatcccggcgcagagctgtgtccgagggctgtgccagcgaggacgaggtggagggggaagcctgacttggccacctcccctccccacagccttcctcacccttggctggcagacccactggaggtcaggcacggaccagtggcccagccctgggtgtcccatcaccatgtgaccttggacatgtcccttcccctctctggccctcagtttccccactgggacattgtgtgctgcaaagccattggttgggctacttcttcataggcacttacttacccagggatgccaccctttcgtcacctcttccacagagcactttggcatgtaaacaagcaagagcactgcctctatagggtaacctggaacattctctaggttatatcaatataaaacaatgtaaatggtggaaatcatt

SEQ ID NO: 369 - DNA, 3581 bp, Homo sapiens
gtctctgtctctcctcctccctcctcctgctccgggcggagcccggcatgggggggccggcgcccggcaggccagtggatccgggacccagggagggccgccccccgggcctggtggcactgagcagggccccccagcccccacctcctgccccacgagatgaacctcctctaccgaaaaaccaagctggagtggaggcagcacaaggaagaggaggccaagaggagctccagtaaggaggtggcccccgctggctcggctgggcccgcggccggccaggggcctggggtccgcgtgcgggacatcgcctcgctgcggcgctccctcaggatgggtttcatgacgatgcccgcctcccaggagcacaccccgcacccctgccgcagcgccatggccccacgctccctctcctgccactcggtgggcagcatggacagtgtcgggggtggccctggcggggccagtgggggcctcacagaggacagcagcacccgaagaccccctgccaagccccggagacaccccagcaccaagctcagcatggtggggcctgggtctggggcagagacgccccccagcaagaaagcaggctcacagaagccaaccccagagggccgagagtccagccggaaggttcctccgcagaagcccaggcgaagccctaacacccagctctctgtctccttcgatgagtcctgccccccaggcccctctcctcgaggggggaacctgcctcttcagcgcctcactagggggtcccgagtagctggggaccctgatgtgggtgcccaggaagagcctgtgtacattgagatggtgggggacgtctttaggggaggaggacgaagtggaggaggcctggctgggccccctcttgggggtgggggcccgacccctccagcgggcgccgactcggactctgaagagagtgaggccatctatgaagagatgaagtacccgctgccggaagaggctggggaaggccgggccaatggccctccaccattgacggcaacatccccgccacaacagcctcacgcccttccgccccatgcccaccgccgcccagcttcagccctcccgagccggagggacgggacgcccaccaagaccactccttgtgaaatccccccgcccttccccaacctccttcagcaccggcctccactcctggccttcccccaagccaagtctgcttcccgaacccctggcgatggggtctcaaggctacctgtcctctgccactccaaggagccagccggctccaccccagctccccaagtgcctgcacgggagcgggagacgcctcccccaccgcctccacctcctgctgccaacctgctgctgctgggaccatcgggccgggcccggagccactcgacaccgttgccaccccagggctctggccagccccggggggagcgggagctccccaactcccacagcatgatctgccctaaggcggcgggggcgccggcagccccccctgccccggccgccttgctccccggcccccccaaggacaaggccgtgtcttacaccatggtgtactcggcggtcaaggtgaccacgcactctgtcctgccagctggtccacccctgggtgctggggagccaaagacggagaaggagatctcggtcctccatgggatgctgtgtaccagctcaaggccccctgtgccagggaagaccagcccccacggtggggccatgggcgcagcagctggggtcctccaccaccgcggctgcctggcctccccccacagccttccggacccaactgtaggccccctgaccccgctgtggacctacccagccacagcagctgggctcaagagaccccctgcctatgagagcctcaaggctgggggggtgctgaataagggctgtggtgtgggggccccatcccccatggtcaagatccagctgcaggagcaagggaccgatgggggtgcttttgccagcatctcctgtgcccacgtcatcgccagcgcagggacaccagaggaggaagaagaggaggtgggcgccgcgacatttggggcaggctgggccctgcagaggaaggtcctctatggagggagaaaagcaaaggagttggacaaggtcgaggacggtgcccgggcctggaatggcagtgccgagggtccaggcaaggtggagcgtgaggacaggggccctgggacatcggggatcccagtgagaagccagggggcagagggactgctggccaggatccaccatggagaccgaggagggagccgcaccgcgctgcccattccctgccagaccttccccgcctgccaccgcaatggagacttcacgggaggctaccgcctggggcgctccgcctccacctccggagtccggcaggtcgtgctccacacaccccggccctgcagccagcccagggatgccctgagccagccccaccccgcgctgccgctgcctctgcccctgccgccccagccggcccgcgagcgtgacgggaagctgctggaggtgatcgagcgcaagcgctgcgtgtgcaaggagatcaaggcgcgccaccgcccggaccgaggcctctgcaagcaggagagcatgcccatcctccccagctggcggcggggacccgagccccgcaagtccggcaccccgccctgccgccggcagcacacggtcctctgggacaccgccatctgaggcgggcgggggggtaccggggcgcctggacttgggagggggcgggcacgcctggctctcccgggagcctcgccttgagagacattgaaagactacgtgagagagtgccagggagaacccctgccctccaacctaccccccgggatggggagagtctgccaggcccattgggcttaggatgccaacagcgctgctgagaaacggaggaggaggagggtttgcttgaggttggggcgagagtcgctctggctgttcttcccgctgggcgctgtacacccctcctcctgaaccaagccagaggtcagcatggggaagggaggaaggaagggatgggaggaagaggggggtgggtgagctgaaagagagggactagagtgccagatggaggagctcttttctagagagccgggagttggggagggggtatttattttgttatttatttcagtctggagggcgattctgggcctttctgacctactcctgagctaggagtggagaatcagggccaagtttgcactctccccaatgccaatgcctaaaggccccgccgtccatgccaccccacagccaaggaggggtctgcatggggagtggaccgagagaagaaggggcccagggaagcagagggcccaagaccattcacagtatttacaatttgccagaatttggtagtcagtgtggcctgctctgaatcaggcatcttatttagttctggggtgagggtctagtgccagggatgggcaggatgatgggggaggaggagggaaattttagcgggtggggggggtgggcagggtatttatttaaattaaaaaacaaaacagaagagatgtcaggaacttttttttaattcctttcttttcagaataatatattaaaagactcatgatcct

SEQ ID NO: 370 - DNA, 3842 bp, Homo sapiens
ctagttactctgatgaagaggaaagagtgttaggcacttgagctcttggttacagggagacaacttactggcttttataactgacggtagggaaaaacagttcttttgtaagcatcctttataattctcgagctgtgacaggagtacagcctcctcacctgcctgaagccaaaggagaaggtggttctcctgagagctgggggcttgcctgcttcggttctctcctgagggtggctggtaagtctggtgttaccctagtgtggtctcatggccacttggcctcccttcctgtatgtgaccacaaaggagctcagaattagagagactgtagattacccactgctggctgctaacatgggcctaagagtcggtggggaagggagccaggcgcagtggctcacatctataatctcagcactttgggaggctgaggcgggtggatcacaaggatcaggagttcaagaccaacctggccaacatggtgaaaccccatctgtactaaaaatacaaaaattaggtgggcatggtaccacgcgcctgtaatcccagctactcgggaggctgaggcagagaatcacttgaacccgggaggcggagcttgcagtgagccgagatcgcgccactgcactccagcctgggcaacagagcgagactccatctcagaaaaaaaggaactggagggagggaccctcagacatcctgtccacaaggctgtcaagggggtttctggcctggcattcctccctagatctgacctacgctctccctgcagcattctctgccctctgacagggcctctgctggactgccaggttcccgtgtggtttggtggagaagattttggggtgggtagagtaagtagttggctctcagggattttgtctaagagaaagtgagatgggagaaatcgggactgacctggtcgtaactgaaggtaagctgtttgcagcatcccccttcctgggtgcaaattcaggtatcataagtctaacatggaatcggtctgctctcatatgtggcctggagataagggtattggaggtctcttggcaggaaggcctcattcacatctgaggggtggagagcgcgcaggcagcaggcagttgttcccaggtttgtcacaggccaaatggtaactttcatttggcccttgttgcccctgccccctcttcctccattgttagccatgtgctgtagctgaagccccaacggacctttcaggaagcttgtggaccatggaaagggccaaaaggaaaagccaaaaacaatcaatggggcagactgagtgagaccgagtcccaggtctgtgttcctgcctcctccagtttccaccttctgacccctagacctcctctcccctccagagtgttccaaactggcaagctgggtctggccttccttgccctggttgtacataagagccaccatggttgttgtaggcccagtgaggaaaagtggacttgctgggacatcaagccccaccggactgctccagcctgctgaggccacatcagggagatcctgctgcctgtcctttcgttccatctgctttactggagccctggagccctttggacagtgtatttattgacaccacctacattttcaaagagactcatttaaagtgacagtggaaaatccatgtccatttacttggacagtggaaaatccatgtactgaaccccaccctcaactcccaaactctgcggtggtgcatttgcacttctaattttgagggcctggtaatgacgccaaaaccaagggttggttctctgtgaggccaagcagttttgttctgtgccaagatggcagcccctacccctcagcccagccctgaggcccgtctccagccccccaaaatccttgcctggagggctagtcagtctctagatggccagtgctgagcctttagtagaactcccaagtaccgccgcagccgagagcctgtccttaactgcacagtgattcttctgccgggggtcaaagcacaaacctgggaggcagaaaccctggagctccttctgttacactacatggccctgaatatcaagtccagattccactgcccttttctggctattgggtgggagggtgctggggaagggcactggcacctactcacccccaagtgggcagagctcactccttcgggcccacttggtgttgcagtcaagagactcagttccaaaaaccttcagcagaggtcttccctcctcctggtatttcactggttgctctccagaagtcctcttcagaggaatgcttatcacacatgcttattctccgttttcccacttcaacagttacttcaggtttaaagtcctttttatctctgtaacctggtgacataaagccaggaacattttcccacaatccaccttagcataaaacataacaatttcattcatcagttgttattgtgtagaaccaatgaacatgttggtcatttgtctgtatttagtctttatttgtattgctatatttgagcattccaagattgcagagcatgagcgtgtgtatttgtgtgattctttaatttcagctgccttaggtttgagtaaaagatgtaaagaaagggatatctgcattacctccacctcctccacctccaccaccaccagcagctcccttgcctcctgcgagcaccgaggtacctgcccagctctcgtctcaggctgtgaatggcatgagccgaggggccttgctcagctccatccagaatttccaaaaaggaactttgaggaaagccaaaacctgtgatcacagtgctccgaagatcggctgaagcttcctgtttacacttggagggaaaagttcttttttattcctactcacccctaccccccaaactaccctcttcctgggaaagtaattgctgagccagtacagccacaaacagtactattttgcagatgctcatgtaagcagcttttcgagagaaataattctttaagcagaataaagttaggctggcattgctcccttaagatcttgctcctttattaaccctgtaaaggagtcttgtttatcctctaatggccaggcttttgggacagcagcatattgaaatattttcaccaactaaaggaaatagacagaaaaacaatgacaatattcaatcacagcagtaaatggcctttgtgttgcaatcccttctaccccatcagacagctcctagaaacattccttacagttcatttctctaaagcattttctgattcttagataactccaatttttgctacctttatcttagacattaacactatagcccaaagcatagttactttgctaaatcagaaagcaactgagttctttgttttctcctcaaatagaatggggaacgttcacaacattctcttaagttctaacaggaataccattgtggttatagaactcagggctgctaaagcaactactctagacccatagttctttttagttagatgtattgaaacagacaaaaatattaacatcagaaaaagctcttgccaattagaggatcttcttaatcctcagcaattaagtttggggtttgaggggggcaggtcattgttacaacagaagtaaatttggcatctatagaaatcaattatgatttttgaaagatttatctaaatatatcaatatagcatctctttaatgttagtcatttattagaaagatcctttatcctgatttgcttaaacctttcaataaattgcactttaaaggattataaataatccatttaaaaattcaagtacacacatcagtgttggttactatgcagagaatgtcattgtgtatagtttcatgtaatctgttatgtcagctgtattttttattaaaatcatgtcaag

SEQ ID NO: 371 - DNA, 3638 bp, Homo sapiens
aagctttcggggagatggtggaaatgaacggtttcttcccttcagaactggctacagaacccagtgcgggacccagtggggaccttgctcaaagaccatgaagagtctcaaggcactgacagcacagcatgaacccaagcggggcccttcaaggcaacggacgaccgcagggtcagaccctacccaagccggacttgcgactggcccagaggccccaggaaggaaccccctcgtggatgcctcctaagctgtccctgggctctgagactctgggctcaggccttggctctgctcctatgtcagattcgcagtgaggtgtcacgcgtctccctggggtggcacggggacaacagctgtgctccacctgtgagcactttacaacacgactgggcaggccagggcagacgctggcctcgctccttcccggacagctgcgggggagaacgcccctgtgtggtgcaggctgctgcgggggagaagacccccaagactcctcacctccaccccctgcacgtgggagccaggtccccaggcaggggcgacgggctgccagctgccccgtgtgagcagcctcgcctgcccactttggagccagaggaacagcaagcaggctccaggccacggccctcccggctctggttccctctgcttgtcccttggaggggcccatacggggcctgatgcccaggagcctgcggcccccttgtcctggatctactctgcgctggcttccaggagggaggacccccttcccccaccacgtctcatgccagcctcggcgcagctccggagagcgggaggcggaggctcagagcggtgcagccccaccgggccccagcccgttgcctccgcccccacctcaccccatccccagcagcaccacttccgctcaggcctggctgctggcaaaatctcggcacagagggaggagggggagaggaaaacgcatgattcctcctcaaaatggagtcagccgaaaaaagcgtgaatgcagagcccgaagagactcctgggggaggggagcccctgcagggccagccgagggccggcgcaatggcttatctgagggacaggcagaaggacggacccccacggtggaccccagctacgcaccgtgtcgtggtggggcgggaaggcgaaggtgtactcgtctgccagcagcctgcggtaggcgtagtcctcgtgcgcgcggctcccgtaagccccgtagtagtcgtactcgaggacctgggaagaaaagacgtggtcctcagcctgcctctttggcccctccccgcttccctccccagagcggggtcccgctgaggctgtgatggggtcaggcctggccctgccctcggagagccctgcactgagtgcccgtgtgttgtggacgcgggcagggggctcccatgaggtccaggcaaaacagaggcacaaaggaggccgcagggttgcctggtgggtctgagagcccagccagggcccaggaggctggaggaggagctggatgcacccaaggtggggaacgacagggagaggtggttacccaggacctcagccagggctgctccctggagccacggcaatcccaggcccagctcctgctctgggccagcccctgcgggaagcgtcttacactcctaccaggtgtgcccctttctacagatgaggaaagtgaggcgcagagaagttatatctcgcccaagggcacagacaagtcctggacctggcagtggcacgaagccaggcaggtgcgtgggctccagagtccagcttttctgccactgccttggcctccctgggatctgcccccatcagacaccccacagccccacagccccatgcccctccctggccgctgctcctgcagacaaccccccaccccgccacctgccctcctaactgccgacacggcacagctgtgaatgcaggtgcgggcaattcttaacctcccagggccgccagccccgcccgcccaagcctcacctcctcttcacacacaagtgggagccagtgtgaggttgtaagggagtcaggctttgctggcatctctgcatggagtacccccctccccagcagggacatcccacccactgcagccctgccaaggtgtcctggacacccaggctggctcccgggtgggggtgcaaaatctgcccatcttgggacctggggtgtgttcctgactctcctctcctcgcccagggacaggggagaggggcttccagggccagatctgactggaacacagtgggttgcacttcaagacagggtctgcccagacccctcctccccgcagggttcatgaggacggcatgtccctaggggccagcaggagaagagacgatgacctgcaaggccctgaccccagagccgtggccccgttagccagctctggctctcatctcccctcccgatgccctggagctctggagcctggcctgggctgtgggttgccatggggatggaaggtgggtgcaccagaggggactggtgagacgcagccccgggaaggggatttggatttctgtaaatctggatcaaatgctacccctcagctggccttaaggcctcgcgtcccctgctcccgagggtctgggtcccaggtttcacagcaggactgcctttgttcctctcactgaggacccaggtccctgggagtccccagaggacgcccagagtccaggccactgtgaaacctccactgggaaactgagcaccctgggtgcatcaacctgcccagtgcctgccctcctacggacataaaccaacagtcggagtggccaaaaatagatgcacagaattaggagacgctccattcctcctgcaacctgggggagtcttcttgctgtctccccaccgcaggacaccccttctgctctgcctacagcccttcccacttaggccatggaaggcctggccacagcggacgggtagtggggaggacgaggagtgggaattgcgtgaacggcacaaagaatgcactgagccttgggggcaagtcggcagggctcggcttcccgtgtgcagaataactgatcacgacagtggaaccacctggggaggcggggcacacggaggggcaaggacggggcacacggaggggcaagggggttgtcagggcagggcctcccagcagcacagcccagcaggcactactcaccggagctgggcctcggggatgaaaccatcccggtcgctcccagccatgccgctcctggaacacgcagccttgtccaaggagttcctgagcaggagtggggaacaggcatctgtcacgcatggcctgatacccctgcgcagggcagagagccacatccgccactttacacccaagggtgcggagagcaaggaggccctgactcttggaaccaggcctccagcccagtgtttgcagctaccctcactgcctcaccctgagaacccctatgtgtagaattaccacctgccccatctgccctcaccctgagaacccccatctatagaattaccacctgccccatctgccctcaccctgagaacccccatctatagaattaccacctgccccatctgccctcaccctgagaacccccatctatagaattaccacctgccctgatctgcccttaccacactactcctacctatctccccttttatactaataatcttat

SEQ ID NO: 372 - DNA, 3681 bp, Homo sapiens
gtaattgctgcggggaggacaggccagctctggaagaaaacaggtggacctgggtcccattaacctggacagacacctccaagatgagcatgagggggctgctggatctgttctcctttcacagctgtatcctgaagaatggcagtgagccggaagagccacaggattcggcaaagacggacacacagggatgggttctcactacgttgcccaggctggtctggaactcctagactcaagcggtcctcccacctcggcctcccagagcactgggattacagacatgagccaccgcacccggtcaggtgcagccgttggggactgcaaagctgttgatgcagaaggcctagtgcctggggatgcccacattgctggtgtctgccacattcaggatgcctgaggtccgggagccaggaagggtgaagtagtccctctgtcggccgctgttgaagcctgcctgggggtgtcatttggaacagggtcagcccacctgcgtcctcaccctccccaaggacccagggaggcccctgtgggttccccactcacctgggccgcaatgccccccaggccgtggtgggggctcccaccgctggccacccccatggtccactggatgtccttgtggtgaaacagcacccaggaggggccgctgcccagggccagcacctcctggaaggtgttcacctgcagggcaagcgccaggagccagggtgtcgtgggctggtccaggggcacccaggaccctcctcactgcccagtcctcaaccgagctccatctgcaccactaagctggctgcttccagctgtgccacctcctgggcccccatccacaccacatcccgggcccctacccatgccacatcccagacccccatccacgccacctcccaggcccctgtccacaccatgtccacagctgcctctgctggcacctgtgccagccttcctttcacatcccccagtctcgatttttctgctctgctctcatcccctctctctctccgtctctctccttttcctattctctgtctctccatctgatcatctcactcctctcgcttgctgtcttgcctcctctctctcgccatttctctccctgttcgtgtcttccctctttctcacccattttctctacctcgctgcatctccatgcttccgtctctctgtctctctcttcccgccccctctatctctccctcgttcccccatctccgtctctcctccgtggtgtctcctccttacccaggaatccaagcccttcttcccaaggggttgggccaaacagcctcagcctgggcccttctctgccacccgcttcctcacctggggaccaagtgccccgtaaaatggaatttggtcccacatggccaccagcagggcgcaaggggtgggcggggcatgggggaaggctgaggccaggtctcaggccacctgctgcggcagctctggctggcggctctgccggtaccacatctggcccctgctcagtgtggacccattggcccagaacgggactgcgaaggcctggcccatctcctggggaaatgcctccagtgtgaagagagccacaggctccccgaaggacaccagcccattggtgcagaactgggggaagtgaggaagggcaagacccgcaggggggtgttggcagggcagggggcagaagagggacagggcccgccccaggaagacagaggacgaagccagaaggagccaggagctatagatatagacaggctccgagtcaagagtggggtggggagaagagagagagcccagggaccgcacggtcagggccagggcactcacataggccgtcccgtgtgtggcttcgaagagcatgaagggctccagcagccgcagctcctcagagaagtcatcatcctctgcagggagggcctgatccccacactccagcccgtaggggtacaggagcgaggctggggacacgagaccactgaggctcccctcagagccccagggcagggctgtgtcccctcagtccccaagagaaagctccaggtcccctgagggactccagggtggggccatggctcctcagacccctggagccctccctgcctgtccacatggccctgtcctctctccaggttagggagcacatccattctcacctctgatctccttgctccaagtcacttggttctgtaggactgaggggaaggatgtcagctaagggctggggcccacgtggcacagtcgacccccttccagagtccccactcctactcacccaccagcagaagccacagtatccccatggtggctgcaggtgctgcgggccaggcgggcttataccagggcagaggtggggccagggtggggacggggcagctggagctcaccttccattgttcgagggtccagggggcctgggggtctcccagggatcctggttcccatccggtctgcctgaggctgggccaggtctggggttggtgggcagggcaagggaggaaagaggggatggaaatcttccagggctttcccagggggccgggttgccagaccctggaggaaccccccacccattagcagggctgggcacaagtcaagcgatccacagtgggaaagttgagccactgcttggtgaagggccgctgctgacagacagctgaacatgcagggagcctcttcccatggggccctgctggttctcttggagcaggttagagatgagcacacagcatccaggaacggagtgcatgtgcatcaagcagggccaagatgtgtggctggggagactcgtgggctgctggccagccccgggggcccaggggtgggcatctgcagggcatggctggggctgccatggtggatagtcaaggtcaggcatttaggagtgttactggacccagaaggggagattcgcctggagacgtgaacggggagacggggaggaggagcatacaggcaagggggctcgttactgtgcacctgtgagattcacggaccaccctggtggaggaggctcagagttaggcactggggactccatcttcaaagcagtgtcccaaaggggtgctccagaccctcaaaccccagacagccctttacctggtcaaaccacatgggacagagggtcacctgtgttcctggaccaaactgaggattaggctgctatttctcatggcccagtgatgagatgcagataaactgggagaacagggaggttttttttgtttttgtttttgtttttgtttttgttttttgagacggagtctcgccctatcgcccaggctggagtgcagtggcactgtctcggctcacggcaacctctgcctcccgggttcaagcgattctcctgcctcagcctcccaagtagttgggattaccaacacccaccaccatgcctggctaatttttgtattattagtggagacggggtttctccatgttggtcaggcttgtctcgaattcctgacctcgggtgatccgcctacctcggcctcccaaagtgctgggattacaggcatgagccaccgcacccagcgaaaagggagtttttatttctgtaactggttatagggcgaaagcctggaaattgtccccagaccaactcaaaattacaaagttttccagagcttatataccttctaagctatatgcctgtgtgtaagtgtagtttcttcagacccccaattaaacttgtttaatcct

SEQ ID NO: 373 - DNA, 4697 bp, Homo sapiens
ggatgacatgcttgaaatgagtcatgtgcctgaaaagtcattaacaaacaacagttccagagaaaagccaggaaaaactccccatggatttagagacagagctctcaccttcaacaggttactttttccttgtctcaggcttccttggaaaacaacctataactaactttctgggagtaaagcttcaggtggaagaacaattggatcaaacttggaaaacgtaagtggtcatttaaattgtcagtacccaaagatacaaaaaaatccaatatggggcacgcaaagctgctcctggagtggtttcccttttgcagtagaggcctcaacagtccttgaccagcttctcctgtggctgtgccattctttaccccacccctggttagcatcagtggagacacagccacttgaccttcagaccactgttggccctccctgggccgttttccttactggtcttttggatcaagacatttccatgttatatctaaatatttattcttgagttttaaacccaccggctaattcctgcttctctctcaagccttagctcatatgctgctccctccgagtgatcttccttgaccctcgactaggttggctcaaggttattggagctatgtgctctccccatatcatccagtacatcccctgttgtaacatgtattcatttattcattcaacaagtatttcctgcattgagtccctgcagtgtagcaggtactgttctagtgttgggactgtagtgggaataaaattaagtccctacccttgtgaggctagattctagcgcaaggacgatagaaaatacccaagtctatatttcaatatttggtagtaagtgctatggagggaaaaaggcaagataaagagacagatgctggggtgatgctgattgagatgggctaatcggaagccttctcaaggagatggcatttgaactgaggcttaaatgaaataaggggtgagcctcgccaagacttaggagatgtgtcccaggtcagggagacagcaaatggaaaagctgtgtgtgactgtcccccttggggtggtgggaaggttcttcattaaattcacagaggggttggtagtacctggcgtgcgaaagggatttaaacgtgtggaacagatggatgaagataatttacaaatcttgccccagacacagacgttggcatgtgtacctcttttatctggaatatcctcttttctttgttgcctacatagatgcccccagtttgtctactccattgaactttgcatgcttggagcccctggcctcagcacactcaatcgcacaagccagcctgcagcacctgtacagcaccatgggagtcccctgcagagctgcaactttgagagtgggtatagtgacgtaactcaggttcttcaagggatgaacactccaactttgaaaccactagcctgtaggtgtggacgaaaaggcagctgcatgttataaaacaatattactcatacttttggatcaagcttctttcagtcccatgggtagggaggaggggcaatttgctgaagcccactgcccttccagtactcacaagccaagggccctatgggatctgtttcacaggactcatgcttatggcagctgagcacatctgtcctgtatgtctgccagcagccacgtccctctcactcctgtgacgacagccttgactatatttagaaattccatttctgattgcatttcactgctgaatggtcctagaatcctttattgcccttgtcccatcacaagagacagccagccacagccacttttatctcaacaacatactgaatactgacagaacaaacaggcaagttgtagattcaccaggatttatacatatttgattttttattaccaatcaaaaataaattccatatatcgtttagcaaatatcattgttttgtgacaaaagacacaagagtcataacaacaaaactccccgagagtcaaactcataacgccaaaataaatcacaaaaatatacaaattaaaatattatgcaaaataaatacggcggctgtcacctgcctacccatttggatgccctttgcaaaggtctcccttacgtggaagacacagtgggtgggccagttccagggtatggctcatcccaggaaccagaggttgaaataggaagggaaaaattgcactgggaagaggaagtcatcagacaaacaatatttggaaataatgatgaccctctgtgagaagggatgatcaatgggccagggaagaggaggagggccagccagttggtagtaaccgtgtgcacagaggtcactgtggaggtgtgtgcacctgccccttttgcttcacatacccccaccaatgtcttttgctctacctggcagtcagggctgtcaggaatatagctctgccagcttccaaaaggacttgggagcaagctgctcctgtacaagactaagggctttcccccactagggaacaaaagtctggtgtcttttttccttacagttgagaacccatgggtgtcaccaccttctctccaggcttccaggagtcagttctatggctaggagacctcagactggccaggggtaggcatacttggtgcaagacaatccctggtcctaagagttaggatactctaggcacctggagagcagggcacttggggtgaggaaaggagtgaataaataataatcaggcggaaggcctgcagagtttcacctgccaggctctcgggacccagctcctgctgcacccagtggaaggaccaacatggaccttggtcccacagcctccccaaccctgggaagcctggagttttgcagcagggcctgattcagccccagggaagaggcgccagggcaggaattcacatgagggcagagctcttagtacagtactactaacttcagcaagggcaggatgacctctcacgctaggatcacacgtgtgagaaagaggggctgcaagctgcatgcctttaggaggagccctcctctcctgaggttccataagtgggtggataaggccaggtgagccttgccagccacagaggagaggacataaagaacctgcttccgtggcttcccacatgtcctcttgtctccacccccaagagggactgaagcttggggattcgaaataaggggtctgggaaaaaggcttcagtcaacaagtcagccttgactgtcattgtggggcgggggtggtactgactgctaacaacgcagatgctgatgactgacagttccttctggaaccaaaaggaagaacccagacaaatcacctccaacacagatgccctcccgccgagggagaacctttggtaaaagtgagggcagggcctggggagcaggggtgagcaatcaaaggcctgagaccctgcctaacacttgagtcagccctgtcacaaagggccagttgtccaaagggccagatgggaggcagggtggggatgtgtcctcagctgagtcccgactcaccaggagaggctgtcggcagagttctagatttctgggtacagcagttgacaacagatgtgctcctctgcatagctcagattatcatgtccctgatcacagctacccaggagctcgtggcctcagcgttgtcagataagctacagcgcaggtgctcaggcagctgatctccatgccattttgttctttgcttctgtgaagagctgtcttcctcccaacagataagcctccactggcaggctctgggatcccacctccggaggaggaggaggaggaggaagggagagctccctgaatcagggacacaagctggaaggccatggctgggaacagattatgtccgttgcttcccgggacaagaaacccttcctcttttatagtttttaggaaaaaaatattttttttttaaataaagttccttaaccctgtcttcccttcccaaaatgatatttaaaaaaaagtgatgagcctactttagaaattctctcagtaaaaaacagcctttgcttacggtagctggcccactgccccccctatccagggctggacagtgccacctcagagctactcagaggtccctggcagaggccagatcccccataggctgggggccatctggctgttcagtcagacaggctatctatccgtatcctttctggactaacaggttccctctcttcatgtgggcccactggggaggcccccgcagggtgggcagggggccccgggccctcctgtcagatggcattctcgtgggaggctttgtgcagcaaggagttacgctcgttgagaagagttgtggtctcgtccaccacaggcagctcagacttctcggccaagttctccatgtgggtggtgcacccgtctatgggaaactgagggctgttctccatgcgagaagccagcagcccgttctggtactgctgccgagtgatctgcatgaggaagggatgagttcatggagggaggggctgggaggcagaccctatcaccaggcctggagaaacagggccaggattgaggctgtgagttgagagagaacatgaccagtcagcgtctctggaagcccttacaaagaacaaggtgcacgaacaagagaagaaagcatctcagggctgggcacagtggctcacacctgtaatcccagcacttcaggaggctgaggcgggcaaatcgcttgagcccaggagtctcaagccaacttgggcaacacagtgagaccccatctctataagggg

SEQ ID NO: 374 - DNA, 3790 bp, Homo sapiens
taaggaaagcaagacgtcttgaagtatattttcttgagatgagtatgtcccatcactaccatgaagtgtgctcacccttccagcctcctctgccctcacccccggagttaaagtgggtaagagttggtttgttctgcagtctttggttggagtgttgtgaaagtggacccgcggtgccactagatggcacttggtgcctagccatggtgaatgaccagggcgaagttagtctcacagaataccagggctagaagacatcgtggagcccatggagtcccaccctccttcccccttccaccctgcgcaaaaggggacggcccagtgtgcacgccgtccggccatgcccacagccacagccacagctgaggagtggccgggcaggcagcaggctccccagccagggcttgacacgcccacagtcaggggcctccacatgcctggcctggctctggaagtcacgtcttagcttctgaacaccgtagcgggttatgaggaagtttaatgaagagcccggtcactgtggccatcttgtgtccccaactgcaggagacgccctgatgtggagtttgtacagctttgccaaaaaatggttttctattctcaaaagtgacccaagccaataaatagcattagtagcttctgtggggggatcccagagcccctgtatttattttccctgtgtttgtctctagtgtcctcctaaacagcctttcctgtgagtctttctcagaattgatatcttaatattgtctgttctaggtgttgcccaaattcagtgtcagtgaagttcttttcctgggcaatcttaacatctttactcttattgtctggaccttcaaaggtctttgtattttacacctgcgcccccaggctgctcacagtcggcttgctgcctgtcctgcctgtccggatcttgtctcctagtcctgaggagcggaggctgagaactcagtgctggtttgtaaatggtgaggggacttgggggcatcccagagtgctccctccaggcctgcttcttggttttgtttgatcactgcgttcttcaagggatgaatccagagccctccatgaggccaagcttgtccttcaatcatgtttcctctcagatgcgtccgtgatgcctcctaatgtggaactggttgtccattgtttgggcctatggccaagtcacccagctgtggaagcagaggtagaagacgaggccagccaggagggcgacttcagtcacagctcccatgcctcagctttgtacctgttttcaaaagcacaactgaggtgtgcgggctggagctgtcttgcagtgattctggccttctggctcatggttcagtccagcagcctggctgacccactatttctcctctgcttcagaggaaacccaggaaatgcccttactgccaggctgagtctccacccatgctggttggtgctggctaggctgagggggccaccacttttcctggctagaagctacttgacctttgatgtttgagttctgtaagtcttcgtgttctgacttactgcttcagagggattggcctgtcccctttccctttctcggctatgggaaggaaggattgctcattggttgccttcatcagttacagcatgagacggaattcatcattccttccgaaacccctgatatttaatatttaatatttaaaaacccaaattatcaaaccattaagaactcattactggttctcagcctcctccagtactagcctcagtgtggctgctgcataagtatctgtagcctgtctacctcctgcagtggggccgctcgcctcttccctgtctactgctcaggctctcccacttcgtggcatccatgtaaagtaggtggcagggcagagatgtcactctcattcaacagggaggatgtctgttgctcagagaggttgtcctgaggggctgggtgattcctgggcctacattcttcccgaggctccaggccgctgtctctggaagtaaaagagccttgtctgaccttaatgcaagcagtctgtttgaacccctgtaggctgcactcaggagacagaaggtgtctgggccatcctgggcggccggtcagcgttgctaggcaggctcggctgtctggccgggacttgggcctgggtggcttttgagaccagtgaagaagggagagccggcctcatgccgatgcggcttgtggcacggctgggatgtgagggaggactcagatctacacacagaaacccctcttctccccgccctcccccagctcctacctgcctcccacgcctcaggtgtggctgcctgtgggaccatcccccaacccctttcctcgcacctccttgtcctcacccagttcctgcagtgtctctgacccacgcctcccgcctcctggccgacttgcccaggaggtgtctctggctcacctccgtctgttcatcaccttcctccccagtgtttccacttatcttggatgttttagattgaaacagcctgattcccggaagaatcctcttcattcattgctagtgcttcccctcacctcccactctccacttcccagtttgcaaatgtggctttcgcccaccaagtgaaagcggactgagagcagcccttggggacggcccggtgcctggctgcaaggccgcgctggggctctgtcttggtgcacatggcttgaccggactttccctgcttcccaccacttccctcactcccagacctccctcattctttttgtctcttctttttgcctaaagccagtccttaacaccctattcttcctctgcaggtggcttgcagacttttccccacctttggggctcgtggtggtggagagggcagctggtgttaagaatgtaggttaccgggcatgacccggcagatgcttgcccagtagttctggaggaaggcccggcaatctgcaaatgagcgcattccccaggcagttcccatgcaggtgatccacggaccacatgttgagaaactgcagtcacccttagggccacaccgtccctctcctcactgtcccctctctgtagtgactggccctgaccttcaggagtgcactttccactctaccaggaagccctatgacatcctcaggctccccagacctgcagcttgcatggggcccctcccttcttccacacccaccctccgtatggtcccctgctctgccctcgtgctttgctggcccctgcccgctactcccactctcagacacccaggggtggtgggccctaactggctggcccctcccagcgctgccctctgccgtccagatgctgcagtgtggccagatttaccttccagtaacatacttctagtcacccctcctcctgcgaagtgatctgcagtggctgtttgaccagaccacaaagttcacatctcctgagcttagtgtccgtggctgtccacctcccagccatacttgactgtccccaaactctccctgcagccacatgtttcccatgacctgtgggctctgcagatggacctctctccgctagagatgcccttctcccaaatggcttccctcctggaaggcccagcctgagtcctcgtctcctttccagtgcttctgccagaagcatccccatgatgttgtgaccgcacagcactttgtgtctcgctttgagcacttgccactctggctggtgctgctgccactgattgtgtactgtcttgctgccctttctagactgtgagctcctcgtgggcagggaccgcctgtgttctctgtatttcccacggcgcctagcacagtgccttgcacttgataggtgcttaataaatgtctgctcaactg

SEQ ID NO: 375 - DNA, 4603 bp, Homo sapiens
catgaacacactcagaaataatgtttgaccaaatatctgggcaccctgtagcccagtcaagttgacacaaagtgtacagtcacagggtgaagggctgatggatgccatctctacagaggtctgggccttgtgttgggttcaccagagggtgtgctggcaggctggcagcgagggatcaggcctgggatgtctgtgcagtgggctagttactctcctctgtctggaccacagaggggaaggaagggcctctttctgcagcttccttggctgtttgggtctggccaccagtggtaagatggccctagtcctcccaggcaggccagtgggagccttaccactaggtggagtgaaatgaattggcttaggtggaaaagattcacaccagtgataatggttcattttcagctccatagaaaagtgaagccaggttctggtggggaggtagacgctgcaggcagccagggctgcagcttccgttctggactgcctccagcctggacgcagtggtttgccagctcctctgctactgccccaggtgacagttccccaccactggcatcccagccctcctcttcccaggtgctgctttcagctcctcccagctgctgctcaggtggaagggaaaaccatcagctccacacgctgcttgtgggctcgttacaggatttactgcacacagaattagccagtgcttatcaagttgagtcttttgtattaatatttcaaaaacagtgtggtctgaacctttccagacaaatcttacatgcaagattatattaaaacctctcttaagagaagaaacctccagttggaggtgttgtgttagccaacaaatgtagattaattgtgctcccctgagtcagtcattgtttaatatgctgcacagattaacaccttcaggaattctgcacattgtaaagtgcaatacaaatatactaataaaataacagcagacatttattaagcttaccacgtacccgcagaccctatgctgcatacgttgaatctactatctcattcatcctcagaatgattctatggggtagattctattactgtccgcattttccagatgaggaattgtgactcagggagatggatgtagcctgtcagtatggactctgtgctggttagacaaaactgtcctggccccgtaaagccagtgttttcctcccacgatgatgcctccagtttacatccaaatgtcacaggaagaaagctttcctgcagtccagggcccgactaggtccccacagtcacagcagatttggaaaggctttgtcctccacacaccacttaaaagcaccaacccaagcagcccgagggtcctctagcagcccacttcaagccgccacactgcccagaaagtagcctccggggcagttttgcttctaatgcttgtgtctaatgcttgagacatggttgcttttgagaaatggagctgctcagtgagctgtcgcccccaccatccccaaatgcctggtcagccctaaccagaggagagcctggccagccagggcagcccccaacttcatcagcagcaaggagcttgtggtttgaccattacctttttgtttgtttgtttgtttgttgtgagatagagccttgctctattgcccgggctggagtgcagtggcgggatctcggctcgctgcaacctccgcctactgggttcaagtgattctgcctcagcctcccgagtggctgggattatgggcgcgcatcaccacgccggctaatttttgtgtttttggtagagatggagtttcaccacattgaccaggctggtctcgaactcctgacctcaagtgatccgcctgcctcggcctcccaaagtgctgggattacaggcgtgagccaccgtgcccagtctagtacctttttcttaggtggggctttctagaagaagcagaatgaaaaaggaaaatatttagtttctgaataaaaaggggctattggcaaccaggtttggatggcgtcagaaggaatgcctgaagaagtgatatgccatgttgctgcccagtttcacactggaagagatcctgtgcaaagatccagcggcctgctttgggttccagtaaacacaaaagtacgtactggcactctgcggattacagactcactgacaacttcatggattcatagatcaagttttgttacattgatccaaggtgaaggcacgccacagcaggttacttgtggccttgttactgtctgtagctccttgagttacagatgaaagttcagctaaagatgaaaagggctccaggcggggcaggaaaggtagcatcgtgaggccagcatctcacctatggcattttgacctaaaagagctgtatcaacagaggtaaagtgacccatacatttaccttggggttagacagcttctagttccttggactatctggaaccatgtctctttctgaaggtgccacatgcagtgaggaacctgccctggcagaggaactcgtgttcatcctctgaggccccttcgtttccaactgagccatgtgcttagcagttgggggtttcctactaatttttcggagaatgttattgtttgaaaagtgctctccacagagcatgtgattagatctttttgttacttgggtgagaatctagagctcctgtcttgccttgacagctaatattcatgcccatctattgtggtcctgtttccaaagaggaacacacaacagagtttctgtgcagtgaaacctgtgtcagacctaaaggaggcaagggctgctgaggagcttgaaatgacccttaaaagatatcaaggagaagagttgtcttcatactctcttctatctgtctgtccatctgtctattcatccattcatccatccagcattcagagcaggtctcccatattttaatgaagggaacctcatttttatttccccaagatctagagattaggaagagtgcagacagtgctgaacggctaaaaagaaacgattcacagcgaggttctccttccttccttatgggaaaccaacaaatcatagccagataggctggactgtctacagagaaagacttcacatgtggcaggctggggattccctgcctcccagtccagcttagtgcagattaggggatgcaatttagcctatacgtgaccttctatgacctcgcagcatccttggcaattcgctctttcctgtttcctgaaaacaaaggccttgagtgtccctgcaagccctgttccttgtgtaggcaactgggatcctatctctggggtgggtgcaactcatccttcttttctgaatagtgttaaagttgaatttagaatgtcgtgattgttagtaatagcattactaatgttccaaggccctcggaaaggtcacaacaatatgtcttcctttcaagttgattctcttggtaccccattcccacccccaatgtggtggctgagttggaagaggcccagcatcttccaagcacagctccctgccccacagttcctccctcgcacctactgaggttctgagctgtcagccccccagtattgaaactcaaaaaattagggaacatgataacgcattctgccctaatattgtccttttaatgtctaattatcattgtagacaaagtggcttgaacttaggctttcatcctagaagctttaccacttttactgtttctatacttttgtagctaataagtcaaatgtagaacaaagagaaggctgcatttgttcaggaaactgtaaatctgtcccatttgatcacaatcctgttgaaaggaagaagccttacgaggacagtgtgtttgctacaatgctgagccgtgacagctgcagcagcggctcctggagcacagggctgctggcatgggctcaccaccctcacagccatttgtctggcggcttgtattcagatgtatttgttcagtaatccaaaaatggaagggtgatttggaaccttgagcagcaggctggggatggctgtgaattctgctttgcacttgcccactacatcaacacgccaagaaactcacctgccccatcccagtgcattctgaacatttcttatttttatcttcttaccaaccttctctcttaaaatcagcttcattaaaatggatttttctagagtaaccaccatatcacctcccccactctcagtccgttttccagtcaaaccatttgttacttgattcagttccaaatataatgtgtgtctgctactgttaagtcattgccttatagtcaacctcaagggtagtcataaactccaagagtttcacgtgtctgactatattcttaggagattgatgggttacatttttctcctcgatagtggtcatgggggaaatgtgttaatttttcactttagatgtttgtgaaatgttggggagagtgaggggtttgttcttaagtggtgggccattgacccaaagtatttttaattccttttttaggctgcatttgatgccagaaggcaaacacaacctgcatttgcgttttgcagatgaattcaacaagttagcagaagacttcctacaatgagaatgcacactccagtcttggtggttccttcgtgtggggcttgatcgtgttgctgcctgttaacatgatgcctttgaaactctc

SEQ ID NO: 376 - DNA, 3578 bp, Homo sapiens
acaaggagactaccctaggcttacacagaccccagggggcagggcccctcagtgcctctcaggaaggcagaaggggctgtggtcctggcccagttcctgggactcctgcctcaggctgcaggcactccctttactctgtgcacttgcagggatgaaacccacctccaactccacggactctactgcccagggcttccccagccacaaaggagagcttgtgcctgggacagcgaccacccccaggacagaaacaccccctcccgggactcctctaggacccactgtcccatgtgggaccgttccacaggtgctactcttccagggcgcaaatcccagcgtgctcctggccacacccacatcccaaagctctccggctgtccccaggcctgcagtctgctgcaccgtgctcccacagtggggcccacttccctgctccgccaggctgctccacacagccctggcaccccttgccccctgcccacacccctccaacctcgtacacaggcagaggccccgcccagcctccacccaagcacacccccggcctggtccacctgcaaaaccaaacctgctggactcgtcatttcccccaaccagcctggcttctccatgaacaacccccccaagttggggactgctctccttggtgatgacaagggtcccccactggtgtggcccctccagaccttgccacgacctcagtgacccccccattgtctccccatcctgcaacttgggatgttgaggcttttaagttgtcaaactagaacaactcgagatgaggacctcggcaggggggctggtgacaggaggatggatcgccaggaggatgatcgccaggaggatggatcgccaggaggatggatcgccaggaggatggatggcccagagctcagaagaggtggttgagggcccagccccaggggacccagcaggaagaagccagacaacttctgaggctcccactgaacccagaccccaccaggctgaggggcttgcacctgcggaggaggagggaggagtcaccctctgcagtaggcaggggagagaggtggagagcagtggctttgcatcctcctgttcttgcccagggctcccaaaacaaatgccaccccagcacacaaaccacacaggcacacagacacacatgcacacacaccacacaggcacacacctgtgcacaacacaccacagacataccacacaggcacacacacaggcacacacgtgcacacaccacacgggcacacacaggcaaacacaattgcacacacgttctcacacagacacacacgggcatacatacatgtatctacacatatacacgcatgcacataagcatcacagtacatgcacaaacatgcaatacacatgcagacacatacacagcaaccaaatgatcaaggaaagggatcaaaatattaacaataagtgaatctgggtgaagagtattctctatactatgcttactcttgcaatttttctgtatatttgactttatttccaaagtaagttttttaaaaaaggaatgccgtcacctcaccagccaccaccccataccaccccctcgaatacacctcaagcagctcttcttgatgttgggaccagagtccctctctcaccgctcctctgcagggatgcagtgtccccagctagtgaagacagacacctgtgcccccaccccagccccaagctgctgcttgtccctgcacctccaggtgctcacgcccagccccagggtgcagcaagcttcccaaaatataagggggagggggaagggaggccatcccatccctgaggcctggcagagcaagttggcctagggacctggtattctgaggccccgtcaaggccaccctcctgcacacctgtacccagactgaggaatgacctcacctgccacctgccaccatctttggagaaggctagggctacgttagcccagcttggacgagcccaagcagcaaactgcaccttgaggtctcctcccgtgatgagaagatcacggcagaagccggcacttgggggaggcaggggaaccatgacaccagctctggacgtcccctcctgtctgggctggacaccgaacccaggcacttctcaccccgaagcacaccattgcccacccctgtgccctggaccctccacagggccaagcgggggacgctgtcccagagaacctggagcctccacagggccaagcgggggacgctgtcccagagaacctggagcctccacagggccaagcgggggacgctgtcccagagaacctggaccctccacagggccaagcgggggacgctgttccagagaaacagctgctgcccacccacagaaagtctcctcttccaagcctgacagttccacaggactgaggcaacgctcttcctggtctcacaagtggtggccaaagcccaaagccgccaagggcctcatcacctgtgcaccacctactccactcccgagtagctgggactgcaggcgcccaccaccacgcccggctaagtttttgtatttttggtagagagggggtttcaccgtgttggccgggatggtctcgatctcctgacctcgtgatccgcctgtcttggcctcccaaggtgctgggattacaggcgtgagccaccgcgcccggcccaggcgcttcttttaactccagatgtgtgcacccgaaagttagccacagttacgtgatggagcaactccaggctgcagggaaacgtgagcgccggccgtggggatgcgcggggaggagggcgggccaccaatgcctcgcccacactgtgtggagtccacaggatggagacggatactgagggaagccatgagttgtggtctggtgactgaagtcacagagtaacggggctgccccaagctgggagccaaggtgcggactcctttctcacgggcctcctatggtgagatcacagcagaagccggcctgggcttacagctggtctccggccagagagggcatttctgtcctaccaaagactgcaacaattctggacagcgaggggcctggagggacaggattcagcccaaagtaccacaggccacacgtttcctccatgtcatcccctagcctggccatttaagacccaatgcagacagcaacctgcagagccagcctgtaacccaccagaagcccagagcacacttgggcttgcacctgagctaccacccagcccctccaaggaaacttctacagccagaggcacctcaaactgtaaatccagctgaaggcttttccaatagcttgcaatttattatgacatttaagaattctagcataggccaggtgcacgggctcacgcctgtaatcccagtactttgggaggccgagacgggtgggttacctgaggtcaggagttcgggatcagcctggccgacgtggtggagccccatctctaccagaaatacaaaaattggccgggtgtggtggcacgtgcctgtggtcccagctgcctgggaggctggggcgggaggatcacttgaagccgggaggcggaggttgcactgagctgaggttgcactccagcactccaccatgggtgacaagagcgaaactccatctc

SEQ ID NO: 377 - DNA, 4694 bp, Homo sapiens
ggaaataatgtttcttggcctcttcagctaacttttaagtggattttgcaaatgaaaaccagtattactgagttttacatactcgaactgcccaaatgtttgctgtttaaacagccaaataatcaagttgccattagtaatttagtggagccaattgatggcttgtttgtattttataattttatctttatacatagtgatagatttaagtttagatagacatcattttggtatactggtactgtggtcattgtcaatgtttggatgtattacgattgttatagtgcaatcaaacttagataattttaattttaagcactgatttatttagatctttccttgtggaaaaataaggtttgcctaaggctttttgcttttttatttattgtttcatttctttattagattaacttttgggaaacagtcttaaaattggagaaaatttccacatttaggaaaaacagcttcccccctgtgggccatttgagagtaaattgctgacattatgccatcacatctggtatgtgggtattcccacaagtcaggacattttatataactacttcataatcagaaagttaacatcaatacacttgatcatttaattctcagtttcttttcaagttttcttaattgtctataatgttctttgtagcagaaggatcccattcaggtccatgaatttcatttagttgtcatgactctttcagtctggaacagttcctcagtttttctttgacctttatgaccttaaatcttttgaagagtaaagtccaataatacagaatgtccctccattggatttctctgaactttttttatgataagatttagatgataattttttttttggcaagagtatcacagaagttatcccatgatcttctcactgcattctatcaggtgacctgcaattattattattttttattttcatcttttaagttcaggggtacatgtgcaggatgtgcaggatgtccaggtttgttacatagcttgccattctgtgtctttcattggaaaacacattgagatttaagagtttggagaatctgatgattatgtgtctcagggatgatctcctcgtggagtatctcactggagttctctggatttcttgaatttgagtgttggcctgtcttgctagaactaacctggggaagttagttctcttggatcctgtgctgaagtatgttttccaacttggttccattctccttgtctttttcagaaagatcatcttcaagctctgagattcttttcttggcctattctgctgttaataattgtgatttcattgtgaagttcactcagctctaacagtgctgggattacaagcgtgagctaccacacccagcgaggaagccaagtttaacgtgtgtgctccactcctccaacctggccaaagggcagtcatcatcactggccactgctgaccacagcctttagaaactccccttgaacgtgctgggctgaccttcctctgatcacaggcaaggttgtagatgagcatgagagtgtggagcagagttggcgagtgcaagtcgagcccatcaacctggacagctgtctccgtgctttcaccagtgaggaagagctaggggaagatgagatatactactgttccaagtgtaagacccactgctttagcaacaaagaagctggatctctggaggcttccacccttcctgattattcaccttaagcgatttcaatttgtaaatgatcagtggataaaatcacagaaaattgtcaaatttcctcgggaaagttttgatccgagtgcttttttggtaccacgagacccggctctctgccagcatcaaccactcacaccccagggggatgagctctccaagcccaggattctggcaagagaggtgaagaaagtggatgtgcagagtttggctggggaagaggacatgctcctgagcaaaagcccatcctcactcagcgctaacatcagcagcagcccaaaaggttctccttcttcaccaagaaaaagtggaaccagctgtccctccagcaaaaacagcagccctaatagctgcccacggactttggggaggagcaaagggaggctccggctgccccagattggcagcaaaaataaactgtcaagtagtaagaagaacttggatgccagcaaagagaatggggctgggcagatctgtgagctggctgatgccttgagctgagggcatatgcgggggggcagccaaccagagctggtcactcctcaggaccacgaggtagctttgggcaatggattcctttatgagcatgaagcatatggcaatggctacagcaatggtcagcttggaaaccacagtgaagaagacagcactgatgaccaaagagaagacactcatattaagcctatttataatctatatgcaatttcatgccattcaggaattctgagtgggggccattacgtcacttatgccaaaaacccaaactgcaagtggtgctgctacaatggcagcatctgtgaggaacatcaccctgatgaaattgacaccgactctgcctacattcttttctatgagcagcagaggatagactacgcacaatttctgccaaagattgatggcaaaaagatggcagacacaagcagtatggatgaagactttgagtctgattacgaaaagtactgtgtgttacagtaaagctaccactctggctgctagatagcttggtggggagggagatgactccttgtagctgatacttggcaaaagtgtcactgagaggcaagctaaatgtagttattttatcctgttagaatacaaattctaattaaaatagttaactttaagagtagtagtaattttattttgaagtctcatgcaagttgtctgatagagaactttcaggcagatcccaccattagcctgtaaacaaaaagtttggcaccagccacctgggaccaaataagaattcaattgtgcttgtccagatatgaacaaatatgtagtgagtatagagtttatcaataatcataacaaatattaaagatttccttggagtcaaagtaaaaaacaaaaaattgtaatgttgtctagggatgacatgatatgctacctcctttttcctgaagttttattccattctgttgacaagatggagaaagcaagatcatgaaggtgtgcaaatgattcttacggcatgggcgaggatttttcaatttattttttaaagtttccataccctttctttgtctttcttgctttttgtttttgccgttgtgtttatgtttgagatacaaccagtcattggtggcaggggcatagagtggtcagtctgaaagggaggctctcttaagagctatgtgccttccacccagagggagacccagtagaaagaaaaacatcctgggaaatccagctaccatggccctcccagtggaggcatcttacatttaggatacttcaggtatcctcagaaatgtattctgcaccccccggccccgcccatgctgagggaaggggagcagttgccaatatttgcaccatcttcacatgcacatgttgcaacaagagcttctgggaaggtaagcggcatcggagctagatcacgtttcacaattagtggtggttcttttccatgtttgttttgcactttaaaaaagagagaacacatgcaaatgaacttgcttgtgtgtatttgatggctccaagggctataaattacaaacaaaacacatcccagacattaggagttcataagtatatttaatgaaattggtggttttaggaagtcaactttagttttgctttgtttgcatgtccactaatttttttattttgatattagtcttttttaaaaaattttacagtagtcattgaaagttatgtttctttgtttacttcattttttcctctaaatattcaagactgggacaaaagtataaatattatttatttcaggtagaatttttttggtgtagttttttaatatatacttgaaggaaatgtttcaccttatttttggtctttgtttattcatttagaccctgcaagttgattctcattaattgtcagattccactacactttcttcctcataggtagtaattaccagtgtaactaagcatttgtgttctgatatctgaggccagtaactattaatatctagttctcagagcatttggaaaggttatcttaaatggctacctaaattgaaatccttttcagaaaaaatataattgcaaataggtaggagtggcctaaattatctaatgtaataaagtcagacaaaatgcatactttatagttcaaggttttcggtatataaaatctgtcctttcctacctggacatgtcccattaaaaagtggaagattttaaataatttctttacagatgttttatttaagcaggtagcacaatctactaatgttgtttgatctgtgtttgttatactggttgtaattaatttttttaattcatgaactagcggaaaatttattaaattaactattaaccacattcaccttgtaaatgactgtataaaacttgttgacaatgcactgactttagaaagatgttaatgtgcataaatagagtgtaaataaaatagtgttgatgtactgaaatatgaactgtataaaaagtattagtaattgtatatggggtgtacctgtttatctgtaactgttatccaaacaaattaaatactgtggatgccttt

SEQ ID NO: 378 - DNA, 3623 bp, Homo sapiens
gttgccccggctggaatacagtgggatgatcatggctcactgccatctccaactcctgggctcaaacgatcctcccacctccgcctacagagtagctgggactataggtacacagcaccaaattttctgtagagacgggggtcttgctttgtagcccacactagtgttgaactcctggcctcaagtgatcctcctgccttgatgggattacaggtgtgagccaccacacccagcctaaatgtttatttcattggtcagtgtcagaactaggattggaatttagattgttaatctcttgccacaagataggaaaatggagcaagatgaggagaaaaaagcatttaatgggagagaacacccttgtctgaggtcagggacctgggaagcaagcacgactttgccactgtcactgtgtgttacttggacagtgccttattttcccatctgtgaaataaaagagctggataagaaccttagttttgagatcctgtctcccttaaaagctgaagacaaaggtaactgatccaagggcagacaagggatggtaccatcatctccagcttggactcccactgctgacaaaatttgtcccttcaaagttgagatagctaccatggggaagagcacttagttctatactgaatggctccaggcattttcatgaaagctctttcagctttggggaagaatattcatccatatctttaccccatcatattagtgtctaagccctgcaatcaggcatgtcagccacgtgatggaatgggagggctgcagggcagcactgtccagtagaaacgaaatgcaagccacatatgtcattttaagttttctttttttgagatggagtttcactccatcacccaggctggagtgcagtggcacgatctcgcctcactgcaacctccgcctcccaggttcatgtgattctcctgcctcagcctcctgagtagctgggattacaggcatatgccaccatgcctggctaatttttgtatttttagtagagatggggtttcaccatgttgatcaggctggtctggaactactgacctcaggccacccgccttggcctcccaaagtgctgggattacaggcatgagccaccgcgcccagctaatttttgtatttttattttatttatttatttattttttgggagacggagtcttgctctgtcacccaggctggagtacagttgtgcgatcttggctcactgcaacctcagcctcccaagtagctgggattacaggcatgcaccatcatgcccagctaatttttgtatttttagtagagatggggtttcactgtgttggccaggctggtcttgaactcctgacctcaggtgatccaccggcctcagcctcccaaagtgctgggattataggcgtgagccactgcacccgtcctaatttttgtatttttagtagagatggggtttcaccatgttggctaagctggtctggaactcatggcctcaagttatctgcccacctcagcctcccaaagtgctgagtaagccaagttttctaatagccacattagacaagtaaaaggaaacaggttaaattcattttaacatgttttacttaacccaatgtatccaaaatagcatttcaacatgtcatcggttttttagtttttttttttttttgagatagtgcttcgctttgttgcccaggctggagtgcagtggcacaatctcggctcactgcaacctccaccttccaggttcaagtgattctcctgcctcagcctcccgagtagctgggattacaggcacccgccaccatgcccactaatttttgtatttttggttagagatggggtttcgccatgttggccaggctagtctcaaactcctgacctcaggtgatccacccacctcggcctcccaaagtgctaggattacaggcgtgaggcaccgtgcctggcgtcatcggtattatttaaatgaattatgttacgttcttttgtgctgtcttcaaaatctgttatatattttacacttacaccaaatctcaattaccatggtacatttttatctgaaatgcttgacctttattttgatttcataaaattcatagttggagaagtagattcacatatccaagttgttccaattatataatagttttccaaaaactgagatgggtgtccattttttttttaagtaaagatgcaggtctggttatgttgaccaagttgctgggttgttttgttttgttttgagacagagtctcactttgtcacccaggctggagtgcagtggcatgacctcagctcactgcaacctctgcctcccaggttcaactgattctcttgcatcatcctcctgagtagctgggactacaggtgtatgccaccatgcctggctaattttggtatttttctcagagacggggtttcaccatgttgggcatgctggtcttgaactgctgacctcaggtgatccgcccacctcggcctcccaaagtgctggtattacaggcatgggccaccacacctggcctcagctgttcaattaaaagtaaatacaacttaaaattctatgtttcattggcagtagtgcaacattaatactgagtagccacatgtgattagtggctatggtattggacagggaaggtacagaatacttccatcaacatagaaaattctatcagtctagctctaggggcagatagtccttccactgacttgggcaagtcactctacaaatggcatctacctcacatggttatggtgagaattcagcgtatgtatgtacatgcaggcacacaatatgcacacagacacataacatagtacaccctttcctgaaaagcctgacacatggagctcaaacatgagtgccacccacccctgggcagcaccaagatggctctagtctgggtgcctttgtctcacccccatgcctttgctcggagtgtgctcctcatttttctgccactttgaccctgtctctgatttggtcctgtctgacatcactgctatatgctttgctcctctcaatttcctctgccctcatgccagcaggagtcatgccagagatcatatctgagaaagcaagacaattttgtgtgtgtgtctgtgcccatagaggagtgctggttgtgttgatatagttgtagattggttgtgtttacacagttgtatatattgacacccttgagtgttatgacttcttttgggggtggtcgccttttaaatcataacttttaatgggattccattttagtctttgtgaagacataaggttgttggcaggcatctgtccctgggagcatccaagcagaaaagactaagactcccttgtagacagatcactggccgccactgaagtgtgtctgcatggcaccacagggctggaagacccttgaaggcaggaattcaaggaaatgtatgatgaattttggcattgccatcaaaagcagaacaggcatggaaaacttgggtgagtgggcgagacaacctcctcaccacagcagagttccatccatgcctggataatgagggagggatttgtgtccactgcagtggggaaccatgaaggacacatcaagggtgtggttggcctgtggtgctctttggaggaatgaataaaaatgaatagaaatcct

SEQ ID NO: 379 - DNA, 3670 bp, Homo sapiens
atgagagtgaaattttgtataagcaccagctagttatagctaaagactaagtacttcctataccaattccaggaaatacagaagtagacatcctgactttctatcaatttgagtaagaaaatcccatccctccatctcagtatgtctccaggcaaatagtttccagtagtctcttggactcttacctcatccagtcccctaatctataactccaggtaccagatttcccttactaaatccagtaagcttaatggtatcttcagaatgaaccatgccctcctgttggtatgagatcagcatgaccctgcatctgctctgtgtcatactcggttatatgtttctggaggcaatacaaaataggctcataaatagtgggaaaagagtactttatctttttggaaataaaggtaacagacccagagaaagccccatccctgtttggaatccctgctgagtcctggtttcttattctcttctttgtaggctgtactttcgcagtcaagtcaaaggggagacggaccgagaacggctgctccttgcctctcaaaccagtagagagatagtggcagggaggtttcctatcaacaaggaattggctcttgagatggctgccctgatggcccaggtagaatatggggacttggagaagcctgccctgccaggccctggaggcacatcccctgccaaggctcagcatcttctccagcaggtcctagacaggttccaccccaggcgctatagacatggggcccccgctgaacagctgaggcacctggcagatatgttgaccacaaaatgggcaacattgcaaggatgctcccctcctgagtgcatccgcatctacctgaccgtggccaggaaatggcctttctttggtgctaaactttttgctgctcagcctgcccagctgtcttccaaggagaacgctctggtgtggattgctgtgaatgaggatggcgtcagcatcctggaccacaacactatgcaagtgcacatcacttacccctactcttcagtgacaacgtttggtggctgcagggatgacttcatgcttgtgattagatctatcccagacaagagctctggaaaaagccacattgagaagttgatcttccggatggctgctcccaagattgcagaagccaccttcatcatggccagctatatgaaccattgcactacaactgtgaacccccccaccaacccacccggagcctgccagctgtgggaactggatggacgacagttcttttcttctgtttcctgtgctaccaaggggccaacgttgctgtgaatatttctcctacccgattccccaccaccactagtgcctctggatttagagatatatatcctagggtatgatactactgtgacgggtctaacagcccccggctactcttgttctgtgaaatgtgtattttagtctctgtgaagcctttactctctaggtgccttataatgtttcagggctcaactttttaaaatccagacccagtgttaaaaccatttattccttttttcataagaataatgactccagatgctacctgattctagacatagacagggatgatccactgttactgagggcatcagtgctataagttaaggctttctgcactagtactctcaaggaagctaattttctttctggggggggcgggggacacagtgtcactatgtcacccagtccacagggttcaagcaattctcctgcctcagccttcggagtagctgggattacaggtgtgcgccaccatgcccggctaatttttgtatttttagtagagacggggtttcaccatgttggccaggctggtctcgaactcctgacctcaggtgatctgcccactttggcctcccaaagtgctgggattacaggcatgagccatcgcccagcccagaagctaattttttaatattgtatatggtcttatttatacttgaagttttgtgaacgtcgctaaacaggataggactaaaatttccaattctcctacactctgtcagaagcctagaactcactaaactgggctgcctttcccaaatgggaaaggtgctgacagagttggagaaaaaagaatagactcatttttccccattattggtatgtaggcattggtacagccccttctggggcagtctttgcaggataacatgctatacctgctaagattcaagctgttttcctcacactggactttaggccaaacccagtaccacgcaatgtgcaagcaagggcaggaggtaggtccaatctgacccctccctgtctcattttaatgactggacagcgctcggtgaaggctgtgttcactgtagtgggccatcatttgtttccttcttcttgtaaaagaccaagcaaatgcactctgctttttgctgctgtaagaccaccaaaaatgagtcagaaacacagaagactatttcaggcatgtgggcctggatatgctccttgagacttctggcaaacttctgctgggaattagtttgagggtgagggtacatatgtgacatttgccctagcctaagagtagcaggtaaaaaaaagtttctttcatcttttgccttactgataataccataatccccctcaattcagaccttctgattgagtgcagaggagactagacagtctcctctagacaggttgtagacacaccctcccctaacaaaaacaaaacgaaagagttcatactctgattttccaacatctaggaaactgagttttatttcctagctctaaggcagccttactatatgtcagtaaagtgctgaaaactgtatatttagcagtagcacccaaaaccaagcctttaaccccaacaatgtgtgtatcttttgcacagcaaaaactgcgaggccagaactagtttatctgaacacctcagctgctgtaagcttctcctctctcaccccgtaaactgacaagcatgatgaaaaaagaagcagatccaagtttctgcctcttttaaatgtacttgactttgcaaggcaagtggttttacagccatttctgttcacacttttcaccccacaacttggggatctagctgagacatttctacctcgaacaagtcacatgtaccacaggttcctgaataattcctgcagggctggtgacagacataacagctctggttttataatatcttgggtatctctaaggccaataaggataacattatctacccagagagtttagaagaaaagtaggagtccaaaggaagagtaaacaagaatggagctgtgttcacactgaatttggggtcaatctatttcccccaccctctctcctccccaacccttcaggaaccctttagtttattaatcttatacagaagaaactaacttagaaacaaaggattcaatatttgcttatttattctttgttaacatgagagtcccatgtctgaaaaccaaagtccaatttctgtctggccttttgtctcatccttcttggcaaaagtagcttttgaactgatataaaaaaaaatgctgagtaacagaaaagtattaatgtgcttgacaccatgactgaaatactatgatcttgtttgtcaataaaaagcagctatctgtgaaccaggtaactgtgtgttttggaagatctgtttattaacagtaaataaataagccctgtacagaacacaggcactaggttgac

SEQ ID NO: 380 - DNA, 4138 bp, Homo sapiens
gcgggcgaggatggcggcggagaacgaggccagccaggagagcgccctgggcgcctactcgccagtggactacatgagcatcaccagcttcccgcggctgcccgaggacgagccggcgcccgcggccccgctgaggggccgcaaggacgaggacgcctttctgggagaccccgacaccgacccggactccttcctgaagtctgcacggctgcagcggctgccatcgtcgtcgtcggagatgggcagccaagacgggtcgccgctacgcgagacgcgcaaagacccgttctccgccgcagcggccgagtgctcctgccgccaggatgggctcacggtcatcgtcacggcctgtctcaccttcgctaccggtgtcaccgtggcgctggtcatgcagatctacttcggggacccccaggtgagggggacaaatggggagggggaggaaactggggagtggggagtggggtaatgtttgaggaactgtggaaactggggaatggctgagtggtagaaggggagagagggtggtgacttgggagaggaaggtcccaaagagaggagctccagggcatgagggagacagaacaaggaagaataaggacagatccattaggaggcacttggggtaatgagggcagagtcaaggcaacaagggggcagggcttcgaccttcatgccgcgtagagttctagggctagtggaggtgccctagggaggtggacagctcctcctgcccccaccaagtcctctttcccctcccagatcttccagcagggtgccgtggtgaccgatgctgcccgctgcacttcactgggcatcgaggtgctcagtaaacagggatcttctgtggacgcagcggtggcagcagccttgtgtttgggtatcgtggctccacacagttctggcctgggcggtgggggcgtgatgctggtacatgacatccgacgaaatgagagccacctaattgatttccgggagtccgcaccaggggccctcagggaagagaccctgcaaagatcctgggagaccaaggtggggaccctggtgagaagagagagttcaggggagtctctcttcattgcccttctgctaacccaagcattaatttgctaagtatttaccaggggagtgggaaaaagagttgagcaggattctcttaggctatgagagagtcaggcagcccccaagataaaataatgaactagaaaatctggaaccttacttctctgggaatcttacctatctggcacgtgggaaggaagaaaaaaggctactgagtaccctgaaatgtcacgaagttgatgcaatgaaactcacacatctcactctgagccagttgactataactttcccagcccttgatatattggaagattagaggggaattgccagaagtaaaccaactgtctgctgaaagaaaaagaagatatcgaataacttggaaaaatgggtacttagtgcggtggcaaaagccaaacacacccctgagtcttcagagctcagagtaatggtggggtgaaactgaataggttaaatgaaggtcctttgtccaccgttttaaaaggtagggttgcctgggcacagtggctcacacctgtaatcccaacactctgggaagccaaggcaggaggattgcttgaggccaggagttcgagaccagcctgagtgacatagtgagactttgtctctacaaaaaatgctttgaaattagccaggcacagtagcatgcaccaaggatcgcttgacttgagcccaggagttggaggccacagtgagctatgactatgccactgtactccagcctgggtaacaggaaaaaaaaaaaaaaaaaaaaaaaaggcaggggttggtgaaatccaatgtagacaggtgtctttctacactggttatgtcctggctcttaaaagagttttgcttaatttataaatcccccaactacggcagctaaaagaggcctttctgcatttgctgataggaagtcagggagatgggaggggtgcctgcttgggaaagcttgtccctcccctgggatacttggcctgtgtctctcccctgtgccagccatccctggcttggggctctgcggagttcagcccagcaccccccttccagtgacctggtctcctctctccctcgcctacccgccttgcccagcctgggctcttggtgggggttcccggaatggtgaaggggctacatgaagctcaccagctctatggcaggtaacaaccctccccctggggaccagggacccccgtttgcatctctccttgggtggccttctcctacttccctggattcttcctttcccaactccccctcctaatatccccttcccttgccaggactctccttcccaggaacccccctccccccggacccctcctcattcccccaggacctcctccaccccctgctctccggcccccccaggctgccatggtcccaagtcctggcctttgcagcagctgtggcccaagatggcttcaacgtgactcatgatctaggtcagtggggcctggggatttgggagagacatgaggttgatggagaagggtagaatctttgagatttggagcccaagccagagaggccctctcttccagtttgctcctcagaccccctccccaccttatcccaccctcacctggaggcggcctcaaacgagggggtctgggaagggcccttagacatccctgcctcgcacttaacaggctcctgggggtcagggcacttagggtgggccactcagcccccatctaccccatctattgcgcgtctcatccggtccagtcctggcgtcccgccctgcccagcctcccgtccctgcccctagcccgtgccctggctgaacagctgccacccaacatgtccgagcgcttccgggagacgttcctgccatcgggccgcccgccactacctggctcgttgctgcatcggcccgacctggctgaggtgctggatgtacttggcacctccggcccggctgccttctacgcaggtggcaacctcacactggagatggtggccgaggctcagcacgcagggggtgtcataaccgaagaggacttcagcaattacagcgcccttgtggagaagcctgtgtgtggcgtgtacagaggtgacctctcccccggctcccagggtcccccctcaggagaagcctcccagtccatggccacatcgttttggcctagagactcctctccatttcacaggagagaaactaaggcagtgagctacctgggcagtcaactgttgaagcaaaccagagtcagcccaccttctgaaaagtagctgtggggtcagttaccccaagtatttaggatattggggggtggacctggtcaaagggtccaacctggaagttggggttctggccataggttttcttgatttgggctctgtgttgcctctgccctttccccagcagcgctgtcactgccctgtacttcctaagaatttttaagacaaagtccatccaagcttcacagtagaatgaacctttcaagacagtcatagacccagctcctcatagtgccaaaaagaaattgaggcccgaggagggaatataacaactggccaaactcaagaaaaccaacagggaacccagaaaaccaagcttatgacatgggtggggtccatgtttactgaacccaaggtggtaggtgctggatttctcagaagattctcaggttctttcccttctaggagagccagatcacatcaagccccaggaaagggtttctctgagttcaactttccaggcctcaatctccaacctgattcctctgccagaggcagtggaatatgaagcaatggaaagagcctatcagctgggtgcagtggctcaggcctataaccccagcacattgggaggctgaggcaggaggatcacttgagcccaggagttcatgaccagcctgggcaacatagtgagacaccgtctctataaaaaatttaaaaattacccaggcgtggtggtgtacctatagtcctagctactcaggaggttgagatgggaggattgcttgagcctgggaggtcaaggctgcagtaagcatgattgtgccactgcactacagcctgggtgacagagtgagaccattatcacacacacacacacacacacacacag

SEQ ID NO: 381 - DNA, 3835 bp, Homo sapiens
cagggagaggtggattgcaggctgtgcctggcatctttccttcccgatgctgcttgcctttgggattggtggtgtctttgtgagaccagagactggtggggtagaagggagaaggatcaagactcagtgtttttcagggcttgaaaaatggagaacattccagatggagtgaatagcatgagcaggggtcttaagagcagcatatacaggctatgtttgtggtttggtgagcagcctgtgtgtgcacatgcatggggtttacagagtgaattagtagagagcaagagtaaagacatagatggacccagatcttcatggatctggctgaggagcctgggcttggttgtgcatgcagtggggagccatcaatggttttggagcaggaggaaaggtggtcagaactcagtggtaagcagaatgaaggaacagataagaggcctgaggactccctacaagacataccctaatgagagtataaggacctgagaggaaagagtggacaagcagaaatgtctgaaatcatcaggcagatactaagctgcttcctcacttctttaaggatttccttgctgatcccagtagccacagagtctcacattcttttgtccctggcagggctgtgctggctagtgaggtgtggtctgagacccaccaggaggaagtggggagctggggggaacagctctatagcacttgaccctaggctatcaggaagggtggtcctggatgtcagagagatcgcctggcaggtgagcaggcctggtgtagccccagcagcccgcccctccctctgagctgagagtccgtctgtggctgtgccagatgcacctcaggggtcagccacttgcgtggcccatggcctggcctccgctcagcctggttgccttcatggactgctttgagaagtaggtgtgcatgcctgtcctccctcgtctgtcccttcttaatccctttataactgcacttgtccaggaatctgggctgagtgaggtggagatgaataattaatgtcaggcgcttcagacaccaaatatttgaacagctgcctggtgtttttgctggcaaggacctagcggccaaaatcaggatgttggccgggggtcccactctgtggctctgattggccttagccagcctgttctctcctctgatggacttgtcaggctggataatggggcataggggaggccccactcttttcctgtgaaattcctagacctgaatttttctgtcctcttactgttcttcctagacctggaagataggtggacagcaggcctgggctgagtgtccccgaggacgtgacataatatatgaatgggctagtttatgagcagagaccacttggagcagcatgcagtagcagagaaagatgaggtttgcagagtgaagggcctgaaatgtcagggtcaggggcactgaagtatctggctctatacatcccaggcccaggtttccctctgggccttatcaggtccaaagcctaacccctacctggaggcaacaggaggggcacccttggcctcgtcttgtccccaggccctcctcacaccctgcttcccacaggctctggcttcatcatgtgcagcggcaaagagaacccggacagtgatgctgacttggatgtggatggggatgacactctggagtatgggaagccacaatacacagaggctgatgtcatcccctgcacaggcgaggagcctggtgaagccaaggagagagaggcacttcggggcgcagtcctaaatggcggccctcccagcacgcgcatcacacctgagttctctaaatgggtcagtgatgagatgccatccaccagcaatggtgaaagcagcaagcaggaggccatgcagaagacctgcaagaacagcgacatcgagaaaatcaccgaagattcagctgtgaccacgtttgaggctctgaaggctcgggtcagagaacttgaacggcagctatctcgtggggaccgttacaaatgcctcatctgcatggactcgtactcgatgcccctaacgtccatccagtgttggcacgtgcactgcgaggagtgctggctgcggaccctggtgaggtggcatgggggtcggggaatgggaggccgctccgggcactgcccagatgtctgtgcttatgcctgagcctgcctgggggaagtggggagcatggcgcaaaggagaacagagccaggagccaggatatttacccgcaggatatttacccccaggctcgctgcctctcctccccaactgcaggtttaggaacttctccccctccatgagttcactgcattctcccttccccgccccggtccccgaaggcccactgcatcacacagactggtgaggcctggggtcaggaggaggctggctgtaggtaaacaggaccagggccttggcccctccccctcccattactaagctccttctgctcctgcccctgttcttcgctcaggagcagccattaaaatgtcgcccggagacagtaataaaaggctcggacgtgggctctgtgtcctgatcaaaggccgcgtgtaatctcgttagggctgcggctgccacagctggacccagccttgttctcattactggggctcctgctgcggggctggccaggcggtttgatcctggcgtccccccaacacaggagcgtgcctgcctgctcacagaagctgcctatgcgtccccagcctgggctgacaggaccaaggtctcagcacacactggtgcagagagacatggctgcaggcccaggtgctcacatgcgcacacatggctcattgtgtagaccagagccctccctgttctccctgcagggtgccaagaagctctgccctcagtgcaacacgatcacagcgcccggagacctgcggaggatctacttgtgagctatctgccccaggcaggcctcgcctccagcagccccacctgcccccagcctctgtgacagtgaccgtctccctttgtacatacttgcacacaggttccccatgtacatacatgcacatactcaaacatgcgtacacacacacacatttacacacgcaggactctggagccagagtagaggctgtggcccaggcactacctgctggctcccacctatggtttgggggccatacctgttccagctctgttcccagggtggggcagggaggtgggggttgggggagtagtggggcacggctcctaagatccagcccccatactgacagacggacagacagacatgcaaacaccagactgaagcacatgtaatatagaccgtgtatgtttacaatgttgtgtataaatgggacaactcctcgccctctacctgtcccctccccctttggttgtatgattttcttcttttttaagaacccctggaagcagtgcctccttcagggttggctgggagctcggcccatccacctcttggggtatctgcctctctctctcctgtggtgtcccttccctctcccatgtgctcggtgttcagtggtgtatatttcttctcccagacatggggcacacgccccaagggacatgatcctctccttagtcttagctcatggggctctttataaggagttggggggtagaggcaggaaatgggaaccgagctgaagcataggctgagttagggggctagaggacagtgctcctggccacccagcctctgctgagaaccattcctgggattagagctgcctttcccagggaaaaagtgtcgtctccccgaccctcccgtgggccctatggtgtgatgctgtgtctgtatattctatacaaaggtacttgtcctttccctttgtaaactacatttgacatggattaaaccagtataaacagtt

SEQ ID NO: 382 - DNA, 1927 bp, Homo sapiens
gtgaggagcgatataaacgggcgcagaggccggctgcccgcccagttgttacttaggtgcgctagcctgcggagcccgtccgtgctgttctgcggcaaggcctttcccagtgtccccacgcggaaggcaactgcctgagaggcgcggcgtcgcaccgcccagagctgaggaagccggcgccagttcgcggggctccgggccgccactcagagctatgagctacggccgcccccctcccgatgtggagggtatgacctccctcaaggtggacaacctgacctaccgcacctcgcccgacacgctgaggcgcgtcttcgagaagtacgggcgcgtcggcgacgtgtacatcccgcgggatcgctacaccaaggagtcccgcggcttcgccttcgttcgctttcacgacaagcgcgacgctgaggacgctatggatgccatggacggggccgtgctggacggccgcgagctgcgggtgcaaatggcgcgctacggccgccccccggactcacaccacagccgccggggaccgccaccccgcaggtacgggggcggtggctacggacgccggagccgcagccctaggcggcgtcgccgcagccgatcccggagtcggagccgttccaggtctcgcagccgatctcgctacagccgctcgaagtctcggtcccgcactcgttctcgatctcggtcgacctccaagtccagatccgcacgaaggtccaagtccaagtcctcgtcggtctccagatctcgttcgcggtccaggtcccggtctcggtccaggagtcctcccccagtgtccaaaagggaatccaaatccaggtcgcgatcgaagagtccccccaagtctcctgaagaggaaggagcggtgtcctcttaagaaaatgatgtatcggcaagcagtgtaaacggaggacttggggaaaaaggaccacatagtccatcgaagaagagtccttggaacaagcaactggctattgaaaaggttattttgtaacatttgtctaactttttacttgtttaagctttgcctcagttggcaaacttcattttatgtgccattttgttgctgttattcaaatttcttgtaatttagtgaggtgaacgacttcagatttcattattggatttggatatttgaggtaaaatttcattttgttatatagtgctgactttttttgtttgaaattaaacagattggtaacctaatttgtggcctcctgacttttaaggaaaacgtgtgcagccattacacacagcctaaagctgtcaagagattgactcggcattgccttcattccttaaaattaaaaacctacaaaagttggtgtaaatttgtatatgttatttaccttcagatctaaatggtaatctgaacccaaatttgtataaagacttttcaggtgaaaagacttgattttttgaaaggattgtttatcaaacacaattctaatctcttctcttatgtatttttgtgcactaggcgcagttgtgtagcagttgagtaatgctggttagctgttaaggtggcgtgttgcagtgcagagtgcttggctgtttcctgttttctcccgattgctcctgtgtaaagatgccttgtcgtgcagaaacaaatggctgtccagtttattaaaatgcctgacaactgcacttccagtcacccgggccttgcatataaataacggagcatacagtgagcacatctagctgatgataaatacacctttttttccctcttccccctaaaaatggtaaatctgatcatatctacatgtatgaacctaacatggaaaatgttaaggaagcaaatggttgtaactttgtaagtacttataacatggtgtatctttttgcttatgaatattctgtattataaccattgtttctgtagtttaattaaaacattttcttggtgttagcttttctc

SEQ ID NO: 383 - DNA, 1954 bp, Homo sapiens
gaaagaagacgtccacgctgctgagtgagaccttcctctgtgctgctgagtgagaccttccatctgaccagggggtcatgctctcactgctcctgcttggagttctggtgctgtagcgggtctcggccgccccttctgagctgggtggaggaagaagtccctgttgaaatatcagatgagtagggatgatcgcctcttttgaaaacaggagccgtgaagggattcccagagaagattgtcatctaacggagtcattcgtccgcccaggacttctctgtcacagggttacgtttgggagaattttcacaggccactggggatggctgtggctagcctggctttccactgatgccctctatccctaacctcagctcctgacatggctgtcattccagagagtgcttggaagcatcctgactatgttgacgatggcctgagcggagtttgcaatggtctggagcagccaaggaagcagcagcgctctgatctcaatggacctgttgacaataacaacattccagagacaaagaaggtggcatcatttccaagttttgtggctgttccagggccctgcgaaccagaagacctcatcgacgggatcatctttgctgccaattacctggggtccacccagctgctatcagaacggaacccttccaaaaacatcagaatgatgcaagcgcaggaggccgtcagccgggtcaagaattctgagggggatgcccagacgctgacggaagtggacctcttcatttccacccagaggatcaaggttttaaatgcagacacgcaggaaaccatgatggaccacgccttgcgtaccatctcctacatcgccgacattgggaacattgtagtgctgatggccagacgccgcatgccccggtcagcctctcaggactgcatcgagaccacgcccggggcccaggaaggcaagaagcagtataagatgatctgccatgtgttcgagtcggaggatgtaagtaagcccttgccagggcactcccctcccaaagttcacagcccagggcggctccaggatccaggcgctgtggaaaccaccctcaggtggaaagcctccatgctgttactgatgtttccagtggatcagtgatcttttgcatactctttgggtttgcaaagatagtgaatacagttttattctacttcttgaaataggttcttcaggagctgtttataaattgagttgtggttaaatatatgagggagctatttgaagaaatccctttacaaaacattttctctactaaaaatgaagttaatctttgcataacttttgttattaaaatgcaaattttcgcatggccctggcatgctgtataaagaaagcacatctgcacatgaggcttagttctgcctttgcgtgtggtcttcagaggaagtaaaaagtgattctgaagtataagataccaaagactcaggaaaagatcacaagccctttggctccctccttggctggagaagagtgttgtttttagcctggagggggacagaggggctgaggaaggagcagcagggccaagaggggagctcagagaggaactgtccttcctggaggctgatcttactcacagaccagcagggggcgctgctggtgagccagttttgtggctgttgccagagtgaaattttaaaatatgatctatggctgggcacggtagctcatgcctgtaatcccaacacttttgggaggctgaggtgcgtggatcacctgaggtcaggagttcaaaaccagcctggccaacattgcgaaaccctagtctctactaaagatacaaaaaaattagccaagcttggtggtgcgtgcctgtaatcccagctacgtgggaggctgaggcaggagaattgcttgaacctgggaggcggagattgcagtgagctgagatcgtgccattgcactccagcctgggtgacaagagtgaaactccgtctc

SEQ ID NO: 384 - DNA, 2059 bp, Homo sapiens
cagctgctcggaggctctggcatgatgccccctccagggatccccccaccctttcctccgatggggctaccccccatgagtcagagaccaccagctatcccccccatgccacctggcatcctgcccccaatgcttccaccaatgggggcgccaccaccactcacacagataccaggaatggtacctccgatgatgccaggaatgctgatgccagcggtgcctgtcaccgcagcggtaagcactaggggccagcaggtagcaggctctgccctgcagtcccgtgagtctgacttggaatgcaggactatgacctccattctttccctcttctcatcgcatccacccaggtccccggcagcactccccacactcaaatccttctcgccagccatgtactcagctcttctagtttcccactcatccccaaaggcatatacattctcttgttactcacgtgccttgtccagctcccttaaggagcacacttatcctcacagagccacacactgtggacacatgaatatagttcttcacatcctctttgtccccagaagagtcagtagcacctggggatcttgctgtgccttcttatgctatcgctcagtgtagcagagtctgggtaggatatagaatttggcatccactgtgaaggaatgagcctcgggagttgtctcaacaaaatactctcacttgaggagaacgaagaatggagctgctatgcgattctcccttgggatcccagagctatggccctgaagggtgggggaagcctgttagggagcagagatctctaggagcaggacacatggattctggcctggcctgcttctccatcccccatggcctgggtcctgggggccactgggcttggccccaacccttccccctcctctttcttcggcagacggctccgggtgcggacaccgccagctgtgagtcttctgggggcctgctccccccaggctcggaggttggggggcataggggagaggggaccgtggactggagcccaccctggatcatgcctgttgggatgccaaggagtctgggatattgatgggaccaggggactatttactggggctggaatacgggaggcataggtgggaataagatggaggtcggagcaaggacttagtatgtatcctttggcttttttctagctgctgtggctgggacaggccctccgagggccctatggagtgagcatgtggccccagatgggcgcatctactactacaatgctgacgacaagcagtccgtgtgggagaagcccagcgtgctcaagtccaaggcagagctgctcctgtcccaatgtccctggaaagagtacaagtcggacacaggcaaaccttattactataacaaccagagtaaagagtcccgctggacccggcccaaggatctggatgacctagaggttctagtcaaacaagaggctgcagggaaacagcagcagcagctgccacagacacttcagccacagccacctcagccacagcctgaccccccacctgtgcctcctggccccaccccagtgcccacaggcctcctggaacctgagccaggtgggagtgaagattgtgatgtgttggaggccacccagcccctggaacaggggttcctgcagcagctggaggagggccccagcagttctggacagcatcagccacagcaggaggaggaggaatcaaagccagaaccagagaggtctggcctcagttggagcaaccgggagaaggcaaagcaggcattcaaggaactgctgagggacaaggctgtcccctccaatgcctcatgggaacaggccatgaagatggtggtcaccgacccccgttacaggtaggcctgggcagagggagccaggccctgttcatgagagcagctgtgctagggactccctaaaaaaccccagctcaacactcagccctaagggaaccagagtcaggacagtgatagattgggttggggtgcaaggggaagaaaagctggagggcctccaggagaaggaaaggaaaggtatctgacacaacacgttcaataaatgcttcctgaattg

SEQ ID NO: 385 - DNA, 2310 bp, Homo sapiens
atgccggaaatgcggtcctgtttgagacagtactcaccatcatggatatccgctctgcagctggcctacgggttctagctgtcaacattcttggtcgcttcctactcaacagtgacaggaacattaggtatgtagccctgacatcactgcttcgactggtgcagtctgatcacagtgctgtgcagcggcatcggcccactgtggtggaatgtctacgggaaactgatgcctccctcagccggagagccctggaactaagcctggctctggtaaatagcttcaatgtgcgagccatgatgcaagagctgcaggcctttctggagtcctgccctcctgacctacgggctgactgtgcctcaggcatcctgctggctgcagagagacaccatcctgcatgtgctgacaacggcgggcacccatgtgcgggatgatgcagtggccaacctgacccagctgattgggggggcccaggagctacatgcctactctgtgcgccgcctctacaatgccctggcagaagacatttcccaggtcacagctgcttacacagtgcagaagacatctgagcacagagccctgtttttaagaacatctgggcttttgtcctgactctggtacctcctggttatgtaactacagatgactaacttcccttatgctccatgtaccctgactgcctcttagagctgccttgagattaaagctcttgtgtttatgaggttttattattaccttgaatgctgaatgaattaacagatgccagccagtatctatagcccccttttccatcttaattaaatagggtgggcagaaagcatcatccaccccttccacaagggagggaccctctcacatttccatcctgtttggttaggccatgtagttctgatgcttggccaccagagggcagtgggagccaggtaacaaacttccctttccccactcctccaaccccccaccatctctgcactgcctaaagggatattgccaggtctggaagtgaggaggggacctcagacactggcccagcagtgtttctttctctctctctctctcttttttttttaaaatagagatggggggggtctcgctttgttgcccaggctggtcttgaactcctggtctcaagcaatcctcccgcctcagcctcccaatgcgctgggattacaggcttgagccaccatgcctggccagcccagcagtttcttatcccatgtagcaaccactggtgcaggtggcagcctggtgcattggggagtatggggacctcctgctggcagggaactgcgaggagattgagccccttcaggtggacgaagaggaagtgctggcattgctggaaaaggtgctgcagtcccacatgtccctgccagccactcgaggatatgccctcacagccctcatgaagctcagcactcgcctctgtggggacaacaatggcacactgccatagccacttacatactacactggcccagccgcatccgccaggtggtgtccatctacgggagctgcttggacgtggagctgcagcagcgggctgtggagtatgacacactcttccggaaatacgaccacatgagggctgccatcctggaaaaaatgcctcttgtggagcgagatggccctcaggctgatgaggaagcaaaggaaagcaaagaagcagcccagctttcagaagcagccccagtgcccacagagccccaggcctcacagctcctggatctgctagatctcctggatggggcttctggggatgtccagctcccatcccagatctcaaagtgtttgagcgtgagggagtacagctgaatctgtctttcattcgaccccctgaaaaccctgctttactgttaatcaccatcactgccaccaacttctcagagggtgatgtcacccatttcatctgccaggctgctgtgcccaagagtctccagctgcagctgcaggcccccagtgggaacacagttccagctcggggtggccttcctatcacccagctcttcagaatcctcaatcctaacaaggcccccctgcggctaaagctgcgcctcacctacgaccactttcaccagtcggtgcaggagatctttgaggtgaacaacttgcctgtggaatcgtggcagtaactgtctccactcacagcctgaaattctcctgtgtcccaaaccccagggggccccagcagcttcgaacctacacctgagggctaccagcaggtggcgctctggctttgcactgcaaaaactggggaccagcccccttctcccacaaataaagcccaataaagcctgagaagtgaggaaagcc

SEQ ID NO: 386 - DNA, 2011 bp, Homo sapiens
tgttggcctactggtctgaacagccacccaggcgcgctctgcctgagtctcgggctgtgctagaggcgcctctggccatggtcctctcacggctgggcttcctggcccccgcgctggtgggtggggttcgggtgctcttgagctggagagcagagggcctctgcatgttggggtgagcctgccagcaagacaggagtagccttctgtggcctcagaagcgcctccccactctcctgttggaagcgagttgcaggccccgcctgctcctgggggtggggggcacagctgacttcaggagcccagcttgagccacctctcacagcggccttggtgagggggggcttacctgtggggggctcacctgtggggggctcacctgtggaggggcatccccagacttgggagtgggtggcatatgggccagggtcagggcgttagggcttggagaaaggttagggttggggttggggttagagccacggtgatggtcagggcatatgggctagggttagggcgttggggtcagggccatgggttctggctagcactgtggagacagccgtttctatcacgaagcgatggaagattctgccgttccaaccccagattcgagggaggcaggggtgtggacggtgccacacctcaatcctcacagcctctgtctcccactgcccaggctggcgaagaagtcctggtttgggaacttcatcagcctggagaaggaggagcagatcttcgtggtcatcaaagacaaacctctgagctccatcaaggctgacatcgtgcacgccttcctgtcgattcccagtctcagccacagcgtcatctcccaaacgagcttccgggccgagtacaaggccacgggggggccagccgtgttccagaagccggtcaagttccaggttgatatcacctacacggagggtggggaggcgcagaaagagaacggcatctactccgtcaccttcaccctgctctcaggccccagccgtcgcttcaagagggtggtggagaccatccaggcccagctgctgagcacacacgacccgcctgcggcccagcacttgtcagaaccccccccaccagcgccaggactaagctggggtgctgggcttaagggccagaaggtggccaccagctacgagagtagcctctgacgctggcagacaccactaactgtatggaaatgatgacggggcggctttccaaatgtggaattatcccgaaaagttaacatgtcacctccacgaggccatcctctgtgaccgaaggcagctgctgcggacccgccctccctccgctcctgctgttgctgccgggcagtgaggcccagcccagcgccccgtccaccccgcggcagctcctcgcctcagctccgcacggcccgtgggaggaaggccaggctcgggggagcctcctccagcccggccgacccggactcccggtcacctgacccctcagcaagaacagcctgcctggtggccttctggggccaggacccccggtgggcaacgtagccacaggaacaggccccgtccaccgcctccacgccgcacctggaggcctcctcgcaggcccgtgccccgcctccctggccgcgccgcctccgtgtagtcttggcctcctcaggctgcctcccgtcctctcgtctcacccgcgcctcccttgcctcatctggggcggctgtgggctctggcgctcctctctggctgaggtggaaacagagacaccctgtggcaccagagccttcccagcaggccaggccgctgggctgggatcagtgttatttatttgccgttttaatttatggattctccgcacctctgttcagggaagggcggcggccacatcccctgccgtctgcgcgtctcaggcagtgggggggctggggccagggcgccctctgaggacagagctggtggggcgcgggggggctggcgagctactgtaaactttaaagaattcctgcaagatatttttataaaaaaaaaaaaaaaaaaggccacatgtg

SEQ ID NO: 387 - DNA, 2914 bp, Homo sapiens
tttctgtatctattaagatgatgcgttttttatcttttattctgttgatgtagtgtattacattaattgatgttcagatgttaaaacagccttgaatttctggaatcagtcccacttcatgttgtataatccttttagtatatcactgaatttggttttctagtatttcctggaggattttcgcatctatattcataaaggatattggactgtagttttctggtgacatctttgtctgattttggtatctgggtaatattggcctcatagaatgacttgggaagtgttcccttctcttttctggaagagattgtgaagagctagtaataattcctctttaaatgttttgtagaattaaccagttaatccatctgtgcatgggctttactactatgtgggaacgtttgtttatttgtttgtttgttcgtttgagacagagtctaacgatatcacccaaggtggtctcaaactccggggctcatgcaatccttccgcctcagcctcccgagtagctgggaatacaggcacaagccatatgcccatgcaccacgagccaagaacccatactttgaaggaagttttgtacttactaatttgatatatttgtttgtaatagttctattaagatgttatctttctttatgagttggtttgggtagtttgtgtctttctaggaatttgtctgtttcattgagattatgtaatttgtccgcatatggctgcggatggtatgcccttataatcctttttctttctgaaggtcagaattgaggtctttatttcccctttttttcttggtctttctatctaatgatttgtctattttgttgatattttcataggaaaaaattggggattcatatgctttccctattgtgtttctagtctctatttcatttctttccactctaatccttattatttccttccttctgcttgctttcaatttagcttgctcttctttctttattgtcttcaaatggaaagtttgtttattgatttgagacatttatcctttctttaatataggcatttataacataaattgttcgttaagtgctgttttagctgcatcccataagttttgctatgttgtgctttcgttttcattcatttcattattttctaattttgctagtgatttttttccttaatgcatttattatttagaagtgtgttaatttccacatttgtaaatttccttaatttatttcgattactgacttctgttgtggttagagaacatacttcgtatgatttcaattttaaatttattatggctcatcttatggcccatgagggcaacaaactaaaccatggacgagctagaagtttaacagagataatcaggtcaagagacagctaagaatgtcccaaatcatcagtatttttatgacttttctcatgtatcaccagattgctttcaaaaaggattgtaccagcgtacagcactgctagctacatataagtctactagcttcactataacctctttgtcttggctgcttcacttaatatttggtttataattctgcagagtaggtttattgttcactataaagttcaaagacttgggccgggtgtggtggctcacgcctgtaatcccagcactttgggaggcccaggcgggtggatcatgaggtcaggagatcaagaccatcctggctaacatggtgaaaccccgtctctactaaaaatacaaaaagttagccgagcatggtggcaggcgcctgtggtcctagctactcgggaggctgaggcaggaggatggcatgaacccgggaggcagagcttgcagtgagccgagattgcgccacgccactgcactccagcctgggcgacagagcgagactccatctcaaaaaaaaaaaaaaaagttcaaagacttcatcatagaaacagagataacttttgatttatgttctttcctctcctcttccaagtcacctggaacctctatgactccaagtagtgggtcctttcctagtgcatatgatcagcagtcatctaaagatagtcgtcaaggtcaatggcaacgccgaagaaggctggatggggcactgaatagagttccagttggattttatcagaaagtatggaaagttttgcagaagtgtcacggactttctgttgaagggtttgtccttccttcctctaccactagagagatgactccaggtgagattaaattctctgttcatgtggagtctgtcctgaatcgtgtacctcagccagagtaccgtcagctgctggttgaagccatccttgtcctcaccatgctggcagatattgaaattcatagcatcggaagcatcattgctgtggaaaaaatagtgcatattgccaatgacttgttccttcaagaacagaaaacccttggcgcagatgataccatgttggcaaaggatcccgcatctggcatctgtactcttctgtatgacagtgcacccagtggcaggtttggcaccatgacctacctctccaaggcagccgccacctacgtgcaggagttcctgccccacagcatctgtgccatgcaatgagggctttggttcctggcttctgggagccttttgacagctggtccctgcctcggttggttgtgcatggaactaaaatgttattgcctaatcactccaaccctgcccctttctgtcccatccttcccaagaagagagaactttttcgataaactaactactgtagaagaagtgaacacttacctggaggctcaccttgcagaaccagtgacaatcttatgagtataatgaacactcagccaggcctgtcatgattggctttatttctttcatcattcataaaagtttgcatgtgtttttattctctagatctgttaccaatatagttttctaactcctgtttggggagcaagtgttaataataacttattcct

SEQ ID NO: 388 - DNA, 2519 bp, Homo sapiens
caagaattatcatcaagagcagcaggttttataagatacatggacctatttggcatttaccagcccctgccgctaggatagagggacagggctgggccccaagtgtgggcttcccggaagagccaagcaccggctgctcatatgggatgggtgggggtggtgcaggtgccctgcatgggttccactgccctaaagagggtacaaaggccacacctccgtgtgtctgccagggctgggttcagagcctccctggcttcctgggcactctgcctatcacacagcgattccaatatgatcacatgttcagaacagccacacttgtcaaagcaaggagagaacacttcagcaacgttcaaaaacatgtctccagggattaaaaaaaaaacacggaaagcttcattttcctccctagtggggaagtcttccttactcacagcctcttcctgagttggtgtctgtcgtgaagcattctttggaagcatagtaagcggagggtttaatttaccatagtcgtacacatttgcacagaatctaaagtttgcagtgcgtttcatcatctttatgtgaatctcatgcagctcttacagggaaaacaggaagaactggccccattttctaaatgtggagacaggaggaggtgagatggctcgcctctgcccagccgactgggaaatgcagagctcagagagacagcaagtcaggagatgttgatccagggagcttttcactctgccacccaccccatcgatggaagcaccgacattatcaaggctgcatttagatttcaaaacaaaagcaagcaaacatgccgggctcgtggtatgctgttgttttaaccgaaatgatacagctcaaagggtgagcagccatcagtgctgtgagcgaagcgtgatcacacatcttgtatgtttagcaactcaggaggtagctgagcctggaagtgactttcctggtatgtagcaattcagagaatacaaaaccacattcattatctgaaatgggctcagctgcttctgtgttttatcatatagagctgggaactttgatgtgtgtggtgtgtgcgtgttttgctgcatatacagataatcacacaactggaggcttcagccttgctgtttacacacacacacacacacacacacaccccagcagatacatcacacacagacttctcacctgttacgttactaacagtggtgctggtttgtttgaacagtgtttgaacttatcaataaccttcctccagaaggctcagcatagctatagcatatgctgtgtgtggaaaatataacctaagaaacagaatggaattgaatcatgaccactattgctatgagacagaatccacagcgatggagtgggtgctggggtcagactgcctgagtgtgtaccctaggtgagtcacataatagctgggtgaatggccaagttttcaccttttttccctcatttggaaaatgggatgataataggagctatcctgaagggtgatgatgagggttaaattaacaatataggtaaaggcttagaacagtgtgtggcagatggtaggtaagcccttaataaatataaaatatcattatttgtgtccatcatttgagatatatctcacatcttatccagaggactccccaaacactcgtgttgtcacttctctttcctgtctctgggttcctctacaagtcagttttgtaccatgcagtctcgcatttgatgacatgcagcattacttagttctgtgaatgattcgtgtgtcttaatgtcacttccccaacagactgtaaatttcttgatggcaagaaccatgtaactggtttttgttagatttctgcaactcaagacccaatcctgggcaactgttggacacttaaacatccttcatcactagctgcgttcatcactaggaaaaagtaagagaaatctgatggtatgggattgtaagtgggtattagatccaacagctgaaacttaagatgtgaagatgtatattgacacacatgtgcgtacaaaatgtttatagcagctttattgataatagccaaaaaccaggaacaacccggatgtccttcaacaagggaagggtgacccagcccgtgatgcatccgtcacactgtggattgctgctcagcaacgaggaagcacagactcgatacgggagccagcctgggtgacgctccagagaactaccctgagtggagaagggcagtcccaccgtgtgattccattattatcacattcttgaaatgacagaattatagaaaggagaacagaggagtggctgccagagtttaaggagggaatggggaaagggggaagagcagcatgcgggatccttgtgacggaagcgttttgtgtcgtgtgggtgtctgtcagtttcctagctgtgatactgtaccattgtcttgtaagatgctgccatcggtggaaactgggtaaagcatataggggacctctctgtatgatttcttacaactgcatgtgaatttacagtggtctcaaaataaagcatttaattaaac

SEQ ID NO: 389 - DNA, 2218 bp, Homo sapiens
aatagcctcctgtgcagatgaacaacctcacatcggaaactacagactgttgaaaacaatcggcaaggggaattttgcaaaagtaaaattggcaagacatatccttacaggcagagaggtaaataccagttatgcttatttctgttatgacagttgctctgtttatttccatgtaagagaaagaaaagaatatagatataggccttatttcttttttttaagatggagtctcactccgtcacccaggctggagtgcagtggcatgatctcggctcactgcaaactctgcctcccgggttcacaccattctcctgcctcagcctcccgagtggctggcagtacaggtgcccaccaccacacccagctaattttttgtagagacggggtttcaccgtgttggccgggatggtctcgatctcctgaccttgtgatccgcccgtctcggcctcccaaagtgctgggattacgggcgtgagccatagcgcctgtaatatatagctactatgtattacatgtattacatgtcaagttctagccacataatataaatttgtaatacatagctgggattacaggcgcacaccaccacaccacgctaatttttttttttttttttgtatttttgtagagacggggtttcaccatgttggtcaggctggtctcgaactcctgacctcgtgatccacctgccttggcctcccaaagtgctgggattacaggcatgagccaccgtgcccaacctattttattttcaagacagggccttgccctgtcacccgagctggagtgcagtggctcaatcatggctcactatagcctcgacctcctggggtcaggcagttctcccacctcggcctctcgagtagctgggactgcaggcatgcactgccacacccggctaatgtttaaaaaatttttttgtagagacagggttctcaccgtgttgcccaggctggtcttgaactcctgtgttcaggcagtcctcctgcctcaacctcccagagtgttgggattacaggcatgagccaccatgcctcactaattaagctttttctttttttgggggttaggggggtgtcgggggttgggacggagtcttgccctgtagcccaggcctggagtgaagtggcatggtctcggctctctgcaacctccgcctcccaggttcaagcgtttctcttgcctcagcctcctgagtagctgagattacaggcgcacaccaccacgcctggctaattatttttttttttttttgtatttttagtagaggtggggtttcaccatgttagtcaggctggtttcaaactcctgacctcaggtgatctgcccgcctcagcctcccaaagtgctgggattataggcatgagccaccactgcactccagcctggtgatagtgcaaaactccgtctaaaaaaaaaaaaataataataataataaaaacaagtcctaagaaaaatgcccaggtgctttctggcatggtgatttgcaccacatagaactaaagacgatgtcagaccaagcttcttcctttctctctccccgcataggatgaagatttgataaagtggaaggcactgtttgaggaagtccctgagttactcactgaggcagagaagaaggaatgggttgagaaactgactgaagtttctatcagctctgatgccttcttccctttccgagataacgtagacagagctaaaagggtaagtatggaattgggtgcatttgcttagagttgagcattatgtagaaactgtttcagaaatcctgcttttgatttttaaaaggtgtggcaaagtgatacagatcagtaatattcagagaaccatttgacttctccattgggtggatggaaaacccaaatcctgttgttattttgcctttttgactgagtgtatctttgttagcatatgctttttagagggggattttgagttttgcaggtttttacataagatcgcgttttgaaaatcaatatacttcccccagagtggtgtggcgtacattgcggctccctccggttctgctgctgacaaagttgtgattgaggcctgcgacgaactgggaatcatcctcgctcatacgaaccttcggctcttccaccactgattttaccacacactgttttttggcttgcttatgtgtaggtgaacagtcacgcctgaaactttgaggataactttttaaaaaaataaaacagtatctcttaatcactgg

SEQ ID NO: 390 - DNA, 2039 bp, Homo sapiens
tgaggtcccgggttcgatccccggcatctccaccatatttatttatgagatggagtctcactctgtcacccaggctggagtgcagtggtgcaatctccactgactccagcctccacctcccaggttcaagcaattctctcacctcagcctcccaagtaggtgggattacaggtgcctgccaccatgcccgactaatttttgtattttcagtagagacagggtttcaccatgttggccaggctggtctcgaactcctgacctcaaatgatctgcccacctcagcctcccaaaatgctgggattacaggtgtgagccaccgcgcccagcctgagctctgctttatactcaaatctttctctttttttttgaggcagggtctctgtcacccaggctggagtgcagtggcacaatcacagctcactgaagcctcagtctcccaggctcaagcgatcctcctgcctcagcctcccgagtatgggagtacaggcatgtaccaccatgcctggctaatattttgggggggtttagtaaacaaagggtctcactatattgcccaagctggtctggaactcttgaactcaagcaatcctccagcctcagtctcccagaaggctgggattatagatataagccactgtgcccagcctatacttgaatctttaatgttcatcccaaaccctaaaggtagacattacccccattttatggaaaaggacactgaggctcagaaaggtgctgtgacccggccaaggcccccttgctagtgagtgcaaagccaggactcgaactgtcccccagcttctgtctcctcctgggccaggcttcccctgagctcctccctgcccccagccctggcctgcagctgcaagggttattttcatctctcctgtcattccagcaaaaccactgggccagtgagtcagtcttgtggttaagggaggaagggtactgttgggagcccgcaatggaagacgtttcttcagcgggtggcccccgggccctgcagtacccctgcaccgagagaagagccatgttcctctaggcctgcccatggctttgggaagtcagtgccctggataagccaccagccttccccacaaaggctcaggagtggcagttgagaagtattcactcccaattcacttggacccccttgtcctctccacccaggtgtcagcggtgcccactgtgctggccatgaagaatggggacgtggtggacaagtttgtgggcatcaaggatgaggatcagttggaggccttcctgaagaagctgattggctgacaagcagggatgagtcctggttcccttgcccgcgtgggaccccaatagaactcagcccttccatgccagcccttcctgctgcctccctcctgtctggctcctggggcccatgcttagagcccaggctccagccctgagtgcttccgagctggcggactgcccaggggccatcagaggatggtggtgctgctgctgatccggggaccgctgtcttccctcccatacgcctttcatccctccttctagggcctatggcagttctcccaggatgtgtggcgagagcctgggccagcccacagcgttcctagtcaggcagccacaccttggtcctcatcttggtcccttccaatctgaaacctcgtgcctggctcgtctgccacctacatttctctttccagctgctgttttgtaaaaagaaaaagaaaaaagaagcccaaactagtgagagtaatatctaattatctcattttttgtaggtctgtgataaagaacttagtcatcccttccacctcctactgtgaagaacagaccctgggtcccacactgaaatcccctctagtcacccattcccaccccccagggagctgcctcccaggcagggggtgcagaaaatgattgatgggctggggaaccctggagagcctcgactccggaagtctcaaggtgcctcctcctctccttagctggcccgttggttttctgagcagggggctgaactgtgaacaagtcagacaaataaagcaagggtctgcacc

SEQ ID NO: 391 - DNA, 2687 bp, Homo sapiens
gacctagaggggcgctggcctggagcagcgggtcgtctgtgtcctctctcctctgcgccgcgcccggggatccgaagggtgcggggctctgaggaggtgacgcgcggggcctcccgcaccctggccttgcccgcattctccctctctcccaggtgtgagcagcctatcggtcaccatgtccgcagcctggatcccggctctcggcctcggtgggtgcgcgcccctcacgaccccggccccttgctccgctgggtggaggctggagccagccctcacgcttctctcttcgcagctcccattgctatcacatgttttaccagaggcttggacatcaggaaagagaaagcagatgtcctctgcccagggggctgccctcttgaggaattctctgtgtatgggaacatagtatatgcttctgtatcgagcatatgtggggctgctgtccacaggggagtaatcagcaactcagggggacctgtacgagtctatagcctacctggtcgagaaaactattcctcagtagatgccaatggcatccagtctcaaatgctttctagatggtctgcttctttcacagtaactaaaggcaaaagtagtacacaggaggccacaggacaagcagtgtccacagcacatccaccaacaggtaaacgactaaagaaaacacccgagaagaaaactggcaataaagattgtaaagcagacattgcatttctgattgatggaagctttaatattgggcagcgccgatttaatttacagaagaattttgttggaaaagtggctctaatgttgggaattggaacagaaggaccacatgtgggccttgttcaagccagtgaacatcccaaaatagaattttacttgaaaaactttacatcagccaaagatgttttgtttgccataaaggaagtaggtttcagagggggtaattccaatacaggaaaagccttgaagcatactgctcagaaattcttcacggtagatgctggagtaagaaaagggatccccaaagtggtggtggtatttattgatggttggccttctgatgacatcgaggaagcaggcattgtggccagagagtttggtgtcaatgtatttatagtttctgtggccaagcctatccctgaagaactggggatggttcaggatgtcacatttgttgacaaggctgtctgtcggaataatggcttcttctcttaccacatgcccaactggtttggcaccacaaaatacgaaagcctctggtacagaagctgtgcagtcatgaacaaatgatgtgcagcaagacctgttataactcagtgaacattgcctttctaattgatggctccagcagtgttggagatagcaatttccgcctcatgcttgaatttgtttccaacatagccaagacttttgaaatctcggacattggtgccaagatagctgctgtacagtttacttatgatcagcgcacggagttcagtttcactgactatagcaccaaagagaatgtcctagctgtcatcagaaacatccgctatatgagtggtggaacagctactggtgatgccatttcctttactgttagaaatgtgtttggccctataagggagagccccaacaagaacttcctagtaattgtcacagatgggcagtcctatgatgatgtccaaggccctgcagctgctgcacatgatgcaggaatcactatcttctctgttggtgtggcttgggcacctctggatgacctgaaagatatggcttctaaaccgaaggagtctcatgctttcttcacaagagagttcacaggattagaaccaattgtttctgatgtcatcagaggcatttgtagagatttcttagaatcccagcaataatggtaacattttgacaactgaaagaaaaagtacaaggggatccagtgtgtaaattgtattctcataatactgaaatgctttagcatactagaatcagatacaaaactattaagtatgtcaacagccatttaggcaaataagcactcctttaaagccgctgccttctggttacaatttacagtgtactttgttaaaaacactgctgaggcttcataatcatggctcttagaaactcaggaaagaggagataatgtggattaaaaccttaagagttctaaccatgcctactaaatgtacagatatgcaaattccatagctcaataaaagaatctgatacttagaccaaaagcaacattcgttctctaaccattctgtattgattatataagcaaaatgaaaagagaaacttaaatgaacacagctctttaacatggttcaggtacacatattttgacccaagtggatattttcttaaaaccaatcaataatagctagctattactgcagactataaaatctggatatagaaaggagacctgtatcaaactgcttttgtagtgtgttttcataacaacttatgactaaaaatatcacactgaataagagagcaggattgccaggtatttttctatttctctccttaattttatatgtatatagatatatttggcttatattctaagtcacctaagtacttaaaagttaagttggtaaagtatttactgactgcttataaacatttaaagacaaagacatttcaaataactgcagaaaaaatattgtagtttgaatatttaagcaataaaactgctagtgagttattgt

SEQ ID NO: 392 - DNA, 2090 bp, Homo sapiens
atttaaacagcaggtgatcaaatttagtgcatgttagtttgtcaaagctgcattttcaagttgtaacagattggtgccttagactatgggatgggcatggacagaagaaaaatctgatggtgaatataagaaaagctgtgaaaaaagaaatggagaggagtgtggggatggttaattcacagagaagggaagccggccttgcctggagtcagcagccaggagtccagcattcacattctccccagaaggaacaaaaggccacatgtgccctgttttgcagatgtgccttccccacgcctccatgggggcctttggcccagttctcattggcagtgtcacttcctgatactcattttccagaagcctcccaggtgattagccatcatatgtctccaagaaaggaagtgttcggcacataatctgccaatgattgctgatgacaacacaagtgtcagacactgtgttagcaatgacaaggacatggtctctgccttctagtacgtgaggagtctggccttgagcctcaccctgaggctgcagtgtactcaaagttgtaacagaccaggacagagggctgagggtccaggagaaagggtgcccagccttgaagagtcaggagagacatcagtacagttaatacaggctccatggagtggggaggaacaggagggacagacagcagcaggaaactcatctggaaaggtgtgcaagggtcagagcacaggctagtggagagagccaggaaaaggcatgtgggccttgaaagcagacggacccagctcatctaatgactggctgtaaaaccttaggcaaattacatcatttctgaagcttcagagcttcttatatgtggattgggagaaactagttactcacaattcttccttcccaccccacctttcccaaggcccactgtaggcagagaatgctccctatgctgttgctgatgggcttggccctatgcctcatctcagccattggaatatgggtgggagtaagatggggcagctccaagccaaggccttaagagccaccactttcttccttctagccccactgtgcctctgtatctgccatgagaagggcatgcctgggagctgctggtccaagaacaaggagtcagagaacagccctgaaatcaacccacagcctgatgcagagtggccccaacccacagacctgtgagcaagaaaaataaatgtttgttgctgtaggacttggggtgcatttgatatgcagcattactgaagcagaaactacagaacaaaatgcccagcaaggtacctggcacaggaagtgctcaaaggccggcagcagcttggctggggcagcatgcatgatggaagggcatgggctttaggggtcaacagccacacgacctttgccacatttcttagcatctccaagccagctgcttcactttcaagtggagggatggtgaggattaggtgaaagcctgctgctaaagtgctcagggtcatacaaggtgcactataggtgcttgtctctatggcaggttccattattttcctcttcatgcatatgtgcagacccagacaccacacagttaagttctgcactaagtgggggggactgctagtagcaggctgaagacaggaagcccaggaaggagctagcatgagagtcgaggtcagaggtcagaggtcaaagcatgctggggttggcagggtgccctgcctggcctggcagtaactctccaccgggatgccacctgggagagggtggagtccactgcctgagaggcaatagccagaggcgagggccagattgtcctgaaacacccctacacttgcagccactgttaccaaagggctcagagtattcacaaccaaggaggaatatgtgactgaggctgaaagtattgtgttattaatcagatacaaaagatttccctttgtggagacgtaccatagaacagtgggtcccggggtggttttcttttgacgaggacacgagccagcagtgctaccaggaacaggatgagggcagcaacccctacaatagtccaggaactgcaacgaccagaacagggaggtggtcactatcaaaataaacacattggtgcctgg

SEQ ID NO: 393 - DNA, 2417 bp, Homo sapiens
actaaactctccgggggggctcagcgccatggggtggttcgaagaaccatgatgaaggctggttcgaattgtgatgaccatttttgtccacatctcctaggacccataagccagagtttctctggagcttatagctagaaggggttctgggtcctggagtgcaggcctgtcaactttacaggagagcactagattgctttctgaagtggctgaaccaggttatgcttccatcagctgtgtatgagcatccccatcttcttgaccacacttgaagccatcagtttccttgaagcatatgggttgcacacttcattttgcatgtatcaaatttatataataaaaaatgtaaggaagccatggaaataaaaacataggtgtgccttctgtaggctgctacgctcctgtgcacgagggcgtctagaactttgccctccatgcacaagttgcagagcaccctcatcaggacatttacgaaggccctggggtgggatgggcactgcctatgtggccctcccccagcccagcagtatgcagtggcccgggtccaatcaaaggtcgcctgggagggtgagttgcaagaatctggggaaaagagcccaaggtggctgccgcctgctaacagcttgtctagacaggccccatggggcttcaccgcacattgcgagagctctggccagccccctgcccacttgcaaaagaggctgttggcagcaacacttcaccactagaaacctttactccaattcgaaacatgccttaacgcacagtgtgaattacccactctcgtggcccacagaggttgactcattcaggcccccttttgttcagatgaggaaactgaggctgactccgaagcctgggggctttcagatgtggagtgggtccctgtgcccaggtgatgaggggaccaggcgggtctggagcagggctggagtggggctcagatgtagtaggctggcagttaaaggtgccagatgtgagccaggctgctgggtttgaatcctggagctgcctcatagcagcagtaggactttgggtaacttacataggtgctgtatgcctcagtgacctcatctgtaatatagagatgataagagtacctgtctcattggtctactgagttgtccggattaactcattaaatgagttaaaactcatgaagcccttggaactgtgactgacacatagtaagtactcaataaaaaataactgctaagaccagccacagtggctcacacctgtaatctgagcattctgggaggccaaggcggaagaatcccttgagcccagtatttcaagaccagcctaaaggtcaacataggcagactctgtctctactatacatttttagattaaatttttataataataataaccactaaaatgtgattactaaagacagcttcttcacagtacaaagagatgctcttctgagtaccaactctttggaggataaactgcccttataccttcaaaaataacacttgccatatatcaagtcctttcaagtacctggagatttacccagcactctgagataaataccattatccctctgggcacacagaggctcagagaggtttagtcatttgcccaaagtcacacagcctgtacgaggccaggctgggactcaaactcagttctgactgattctaaaatcatgtgtttaactgctgcactctaggaccacccgcaatggatctgtgaaccagaaccagctctggttctgacctgcctagtagggcctttggcatttgggggaggaggccattggaagtccgaagcccccttccagattaggcatgattgcagtaagagaagagacagaccctttggccccccacccctgctcaggctcaaaaatgcagaccctgccgaaacagtccttctcacccagaagcaccccatagggtgggctgagtaaccttgggggcctcgtcagtcttgggctgccccatgccctgcacagcccgcctgaggtttgaggaaggggcagttggctaggcccagactggagaaagccaccccaccatggctcttctgcaagaacccccggccagccacaagcctaagccccctccttaaaagctcctcctctgaccttagctgtgcatcaagggagaaaagaaagctccaggccgggtgcggtggctcacacctgcaatcccagcactttgggagaccgaggctggcagatcattaggtcaggagttcgagaccagcctggccagcaaggtgaagccccgtctctactaaaattacaaaaaattagtcaggcatggtgacacgtgcctgtagtcccagctactctggaggctgaggcgggagaattgcttgaacccaggaggcgaaggttgcagtaaaccaagatcacgccactacactccagcctgggcgacagagcaagactctgtctc

SEQ ID NO: 394 - DNA, 2472 bp, Homo sapiens
agatgctggctgccaagcagagctataaaatgtgcctcgacttaatttttccatggacacaacctcaagatgggccagccagactctggaggagctgggattccaaagtctcactgcctgtctgctctgggatcggcagctggagttggggagagggaagtatttgggggtcggcattgccacctcctgggccatttctcttcctaatatcttcccaaagcctgatgcagcaacagagtaagttttcattcagcactgattcagggttggaatttagtacaaattgcttacatctgcctggccatatcccaaataggtagtttagagcaaggaggaggggcagcattggcccacttcttggagcccgggtagccgcctgctaaagaatctggtgccatgctgggaccagccagcccagggtacaaaactctccaacagagttgagaaaaaacagcccaagagagctgccagagacgatacagcgattccatcccaggcatgattggaagggctggggcagggaagctacgaagaccccagaagcgggtggagatggagaaaaggcaggcctgaaggagcaagagcaatggcagaaaacacacacacacacacacacacacacacacacacacttcaacatcagccaactagggtgtgtgcactaacctcatacatttggtaacctcttcccacaatccagaagcctgccaagcccctgggctccccaccctactccaccccacaccagcttggcagccttgcttgtgcttcctgctgcgattgctcctccaacatcaaagtcaccgctgtcgggagctgaaaatgagggacaagtataggccaggagagcagcgccttctcccagcaccggcgaactcaggcctgagggtccctctccctctttcaagctttcagtctccttttgctgcagtatccttataagggagaatccaattctaccctccgcccgactaagaaacgtacacattccccaggctagatgccgacttctcacccagtccacagaaggcactaaccccatcacaggacaggttttgctttttttatttcttatcttaaataaacaaaccccaaagccattgactggttcagatcgccctgcagctgggagccaggaagtgtgtttagcgagaagggggtggggacgcgggtgcctggagccccagaggccctgaagctgctggagtggagtggagtggggtgaggggcaacctgctctgcccggcgggcaggagctcaggctcccacggcgtccgccgctcagcccgccgccaggaaccctcggctgcttccattgttgcacctccgctgttgccatgttggagggagagccccctgacctcggctgcctccactctgggggcactttacagacgctggggccgatgcaacccgcaggatgcgtgtcctacctgcgctagctgctggctctgctgcaacatccgacgtgtcttgtgcctggcgacgtgggctgctcgctccgcgcctcccgggctcgctctgcggctccaggcgcctcttgcaccagcgcgagaggagctggccggccgcacgccgcctgctcccgggccgctcccctctccaggctccgcacagaccctaggctccaaggggcagagggagaggcagcaaagggcgcaaggaccagcttgtgggggtggggaggggtgctctccgccgagagcgtgcgcgagctcgcagagtcaggccaccccgggtgagacaatagcggcagcagcgggcgagagaggggaagccatctcccggacacccggcgcactgcacggcgacgcgacgctcggccagaccctgcctggacaggcaggcacccggccgccggctccagccgcagcgccgaatccgccgcgagccggagggcggggcggctgctggaacccgggccgcccttcgcctctcccctccccttccccctcctcttctcttctcctctcctcctctcccctccgactcccgccccacttgccattgcgtgggggaagagaaacgcgctggcgtcaagttgtgcactgcaacccaagagccaggatttccactccccacttgggtgagggtttttgcggatggtcgttagtttcccctgctggaaccccttggctttgggtcagaggaaagctcaatcattctgctagaaatgacggtgctgaggtccagttatccgtttcaggaatttctaccataattaaggtagcgatgttcgggggatcccctaccttgagggttaggttggggtagagagaggctgtctccgggctttacacgctcagtgtcattcgtctttctgtctccttccttcctccctttctggaaggggagtctcgtttgtttttgtattcgcccaggtggatcttccgagatgcgatccaggaaacagcagtcaacctaagtagggaggggagatagaggatcctccaacccaactagggtagtgag

SEQ ID NO: 395 - DNA, 1888 bp, Homo sapiens
attggagccggcttggctggcgagcccggctgaggagcctcttgggccgcacttactgccgcgtccgctcccggtccctggcccctcagcggcatggcgtgcggggcgacgctgaagcggcccatggagttcgaggcggcgctgctgagccccggccccactccgggcctcaggcccccggacgccgagccgccgccgccgtttcagacgcagaccccaccgcagagtctgcagcagcccgccccgcccggcagcgagcggcgccttccaactccggagcaaatttttcagaacataaaacaagaatatagtcgttatcagaggtggagacatttagaagttgttcttaatcagagtgaagcttgtgcttcggaaagtcaacctcactcctcagcactcacagcacctagctctccaggttcctcatggatgaagaaggaccagcccacatttaccctccgacaagttggcataatatgtgagcgcctcttaaaagactatgaagataaaattcgggaggagtatgagcaaatcctcaataccaaactagcagaacaatatgaatcttttgtgaaattcacacatgatcagattatgcgacggtatgggacaaggccaacaagctatgtgtcatgaagctttgtcacatatctgggtaccaggtttgacctcaagagatggctgctgtacactttttgcaactggtttgatgtcacatttcagctccaactttgcatcctgagaacacttaaacgtttctgcaggtccattttatacaacttgaaagaccgtaaaactttctggttgccacaagcatatctttcttttctgctcatccaataaacagctgtgccctactgtgatagattttccaaacaaaaatacctggagcagcagtttagcaaaatatgccttcagtggcattcaacaaatggagtttccccaagcacagttctgtaagaagtgcgtgtgagagtgtgtgtatatgtgtgtatgtgtattttaagttattatttgtattgtgcaaaaatttttttttgatcttggggattctggctgtgaatttggtgcacgacaattatggtaaaaaaacatttgcttggtctaaagaagatcattaatgttttgtgaccatacaagttgtaacagtggattgtttttatgtgtaggtattgttaaatacagggactgtttccaggcacagaatatgaatcgtaagttaggatggacattagatgtgattatgatgataaagcgaaggtctgcggtcctatatctacagacacgtggtgagaaattagaacaaactggagacgggccattgacacatggactctgcctgggcatgttaggttaattctttgactccaagccttaaaatactcacatggagtcagcgctcacctcattcacacaattatcatagagctccctggacactgaacctctaaagggaaaaggtctaccctggagccaggagcatcagggttggcttgggagcatgagaggtgagcccagggctaggcctgggccaggccccggcagcactgctacttgggaggagccacttcacctttgtattagttattaaaaaatataatttgggctgggcgcagtggctcacgcctgtaatcccagcactttgggagtccgaggcatgcggatcacttgaggtcaggagttcgagaccaccctggccaatatggtgaaaccccatctctactaaaaatacaacaaagttagccgggcgtggtggcaggcgtctgtaatcccagctgcttgggaggctgaggcaggagaatcacttgaaccctggaggtggcggttgcagtgagcacagatcatgccactgcactccagcctgggcaacaaaacgagacttcgtctc

SEQ ID NO: 396 - DNA, 2620 bp, Homo sapiens
gtgctgctccctgcctttgggggaagaggaggcctcacaccacatccccaggtggccgtgtggcctcgactccactgacccaggatcaggagaggctgagctcctttctcagcagcttcttcctatggccccagcctccgtgccctcttccctccaggggggactcggtgcctgcctggggaggaaggagaggcgttgcaggcgtccgagctgggccacagcctgaacgagaacgtcctcaagcctgcgcaggagaaggtgaaggagggaaagatttttgatgatgtctccagtggggtctctcagttggcgtccaaggtccagggagtcggtagtaagggatggcaggacgtcaccacctttttttcggggaaagcagagggccccttggacagcccctcggagggccacagttatcagaacagcggtctggaccacttccaaaacagcaacatagaccagagcttctgggagacctttggaagtgctgagcccaccaagacccgcaagtccccgagcagcgacagctggacgtgcgcggacacctccaccgagaggaggagctcggacagctgggaggtgtggggctcggcctccaccaacaggaacagcaacagcgacggcggggagggcggggagggcaccaagaaggcagtgccgccggccgtgcccactgatgatggctgggacaaccagaactggtagggcccactgcgcccccgtccccagcgcccccgggcgacttcgtgtttgcactctgccctcgtcgttcctcctccttccatttgacccaagaatcagcaactgcagtgtgaggacagcgtctcgggaggcaggaccctagggagacccgggtgtgcgccgcctgcgcgtggggagtcttcggtgcgtgggggcggcttgctgtccagcctgtgtgggggccgtcccgtcccacactcccctgggcattcttggactcaaggccggggctctgcgtggcttgctgggaggtgggctgcagcacagaggcctgtgactgcgttccagcggccagttcactacgcagtatctctggggcctgggaccagccacgtgccgagctgtcagcgacgtgaggtgtcccttctcgttgagatatttaactttggttttgctctagttctttctttttgaagagagtgactggagtggtaaagatggaaatgctggaaatgatactggcgctcacgctgccatccgaccaccctcggctcccgagtccacgcctgcctgggcctgtgctgtcagacccgcgtcggtcgtaaccctctgtggctcccctgcatcagcaccgtcccaccaccaagttcaccaggttcaccagacacggcctccacaatagccacacccacacctgagctgttctcagtgctggaacttgaccatcctggaacaccctggaagaaaaaggagcgcagggtgggccctcggccctgatgcaggagggtgcgatagcggacgtggccaggcaggaggggccgggttcaggagctgagcaggggatgcctgtgcgtggtgcctgggtctagggaagctccagccccaggatggggctgccctgcacaccggtgcccgccacatgccaaccctcacctccccgaggactggatgatgtgctgccacgtgtgactcgtctcccttgtctgccctgtgtgaccctcagtcttggccagccatgcatgcgcccgaagctcgtgcagtttgtacgtgaggtgctctcctccctgccaccatgctcatcactctggccttggccatgctccctggtcaccccacttcccggtcgccgtctgcagcactcctggagcagcctgggcccttcagcccctgtgctcgtcccaccctagggactcagccacttgcagaacaggatgggaccgagatttcagcgagccctcctggcgcccggtcctccctgtgggcaccagccctcttggtagctggtgtggagggccggtgtccttggctgccacggagggatttgatcaccgaagcagccacctgctgtagttggacctgaggtcagaggcggggcatcagaggctcaaggtgctgagaagccaccgggaaagcagccagcacaaagggcccaggaagccagcccccgagagctgagcgtgggggtctttgagtgtctttctccaagctgagacgtgggcggccgcgtggtatctcccgagggctgcttggaccctggtgggctgagtgctccgaggaggggtggactccaccttggacagtgggatgtggtgttccacatgtgcctgtttccacgccagcaccttgacttggcagcatggagccaaggtctgtccccgcccaggagggtgccttcctcgggggtagggggacggcccactctgccccagggagtcccttttgatgggaagtgcagtcagcagcgtggaggtgtctgggccaccttcagaaggtggatgtggtggccgagaccccgtccacggagggtgatggcctttcccttctgcaggtgcgggcaggtgggcctgggaccggtgctggggcctctccttgctgtgtgtgagggcccaggtggaaggcgcggacctgacagcattccaataaagcatacgggaacatg

SEQ ID NO: 397 - DNA, 2280 bp, Homo sapiens
gtgtttgcagcatttgtgtcatcggtgagagagactcactgacttccacttgatagaccaaatgttcgaaagtccaggatgggctgtgttcgcgtttctcgataacgactgtcagcaccagcagggctgcctgaggatgcacgccttggtcctcggccctgagagtcagcgtgagctcccgctgctcgcccgcgcccaggctgccgttgaggaacagcacccccagggctctgtcgatggcaaagacgcctggctgcgggctggcgatggagtaccggatgagtccgttccgcccactgtctctgtcttccgcacgtgcgaggtacaaggctgtgccagggggcgtggtctgggatattctaatctcatccgaggtcctgaggaacgctgggtggttgtcattgacatccatgactgttatgttgacctcggtgctgctgcaggctggggcgctgccgagctgcgcctgcaccgtgagcacaaccacgggctgcgtctcgtgatccaggggcttccgggtgcgaatagtgcccagccgcgggtgaatggagaactttccgccgagatcaccagaagaaatcctgtaaaagattggttctgaggagtctgaaaaagagagaggggacaaccactgtatgtcaaaagggtggacccactggaaactcagaaattgaaatgttaatacagtcatccactgcctaatgacacttcagtcaatgatggatcacatatactatgatggttccgtaagattctgacaccgtattttattgtaccttttctgtgctcacatacataaatccttaccattggggtacaactgcctacagtattaagtgcagtaatatgctgtgcaggtttgtagcctaggagcaatcgactgtaacatttagcctaggtgtctggtaggccacaccatccaggttcgtgtgagtacactctgtgatgtctgcacactgacaaaattttctaatgaggcatttctcaaaacatttcccatcgttaaggacgcatgattgtatattctccatctacagagactgctgtgcaatgtcttactttctccactctccaaagcctgctgaaaagtggacacacggttttaagaatttttttggtgtacgaaaagaatgtccaatgggcaaagagcaagccacaggtttcactctcttccttcatccctcttgcattagataaaagggaaagatattcagaaaataattcaaatacctttttttaaatatatttgaggaagtcaagttcaatttatgttgatgttactctattatatctacctatgaagggcaaatactctccatagagattgagggaagggagagaggaaggaacaggaggggactaggaggaggacaagctctttggaaaggtaattcatttctaggaatttatcctgcagaggttcctctacaggtgtgaaaaagtcacacacggctatttgctcaagtactatttggactagcaagattttttaaatccttcaaattggtagcaaatgtaaacataaaacatatctaagttgaaacactataaactgtcttttaaggaaacagaatggcatccatttatctggaaagttgttcagtatatactaagtggggaaagaagctctataacaacaaatatagaaagatgcatttttgtcaaaaatttgtaaattgtgtgtgcatgtgtgtgtttttgtgagtgggttataggagacatatattttgtatattataatctgtattattttaaacattctttttaaaatgcctattatttttgtgatcagaaaaaaaattgtgggatggacagaaacaatgttggaagaacaaagagcaagccacagtttgtgttatctcccttgttttgacttgcgtggaaagaagaaaaaaattattcaagattgtaccgcctacaaaaaaacaagaaatgttccaataatggaattccatgcagcataagaaataagtacttactcaagggctctcttgctttcactgttccaatgggactatcttcaggcacatcttcataaactaagaaagtgtacttaggcctttcaaactcagcaggtgccagagttgtctggaaaatgtgtatggtgacatcggcattaatgacagctgtgagcccgccaccgtcttgagcagagaccatcaacaaaagtgtggtagattccaaatgactaagaggtaatgttaagtaaataattcctgggtagggaaaagaaaacattggtaaacagataacatgtaataaatactgatgagcaatagt

SEQ ID NO: 398 - DNA, 2192 bp, Homo sapiens
gcggtgccccggcgagggagcgtggcggcgagctgtttgggggggttggcgacggcagcccgagggcggcgcaaggcctgaggcccagcacagtgatgtccgagctcagcgatgaagccagcgagccggaactcctgaaccgcagcttgtccatgttgcacgggctcgggacacaggtcagcggggaggagctggatgtccccctggatcttcacacagctgcttccattggccagtatgaagtggtgaaggagtgtgtgcagcgggagtcaaggtggacgcgagagaccacagtggagccacagcccggatgctggccaagcagtacggacacatgaagatcgtggccttgatggacacttactcgccctctctgcccaagagcctctatcggagcccagaaaagtacgaagatctgagctcttctgacgagtcctgccctgctcctcagagacagaggccttgccggaagaagggtgtcagcatccacgagggaccgcgagccctggccaggatcacaggcattggcctgggcggcagagccccacggcctcgctatgagcaggctcctccccgtggctatgtcaccttcaacagcagtggcgagaaccccctggaagaagagggcctctgctgccgggatgtcacctcccccatcaatgagcgggatgtggagagcagcagcagcagcagcagtcgggaggaacatgctttctgtgccaacctggggcccgtccagagcagcagcagcagcgagggcctggccagagcccaggggctcagcagcgaagcttctgtggagagcaacgaggactcggatcatgcctgtaaaagctcagctcgcaaacaagctaaaagttacatgaagaccaagaatcctgacagccagtggcctccccgcgctgcaactgacagggaaggctttctcgctgagtccagcccccagactcagagggccccctactcaggaccccaggtaagaccgcttgtgaaactggaggttacactcagagacggcactttttgtgacttaggaggcatgtgttgtgtatatgacgtgccaggcgctgctaggagaacagaatggcggtggcatccccatggcctgttaggctccacaggctcacagccggctccatggctggcagccccgctgcagcgcttctactctgttcctctccacggaaaggacctgtctccctgctttccatactggagttggcctccctgagcctggggagaagaaaagcacacttgacctcagagctgcctgcaggagtctgacaagatgtggttgaagcagagacaggaactacacacagtgtgtgcttggtgatggttacagctgccaccatcctcctcctttctgtggtccctctgaccacacattaccttagggatcagaggtgtgactcacagctcagctgtctcacctgtgtctgctgagttctcctaccctgtgtgggcagaagaggcacggagaggagaggcagagggaagctctggttggttatttggtttgtttgttcgagacggagtctcgcactgtcatctgggctggagtgcagtggcgcgatctcggctcactgcaacctcctcctcctgggttcaagcgattctcctgcctcagcctcccaagtagctgggattacaggcacccgccaccatgcccatctaattttttgtatttttagtagagacgggatttcactatgttggccaggctggtctcaaattcctgacatcgtgatccgcccgcctcgacctcccaaagtgctgggattacaggcgtgagccaccacacctggcctggtgccatgcccggcctggctggttatttgttaaagcactggctttgctgttcagtagagccttggatttgccggcttctccctgcagcccctggctcagtgagcaggcacacgtctcggtcccttcaacatacgttgagtggagtctggtcagggtagtgtcctaagtatgtttctttcagaaaatagcttgaagaaaatgtcagagtaacatttgtttgtccattaaaagcaataaactctcaaaagtaggatttctggagttgaaaagtaaatgaaatgaaaatatcactagacgagctcacagcagaattgagcaggcagaagagtcagacaacttgtgaacacaggtcacctgagatcatctcgcttgaggaacag

SEQ ID NO: 399 - DNA, 2834 bp, Homo sapiens
aatgctgttcagctgcctgtttgaagaaagtttattttttaaaaactatgtttgcagttggctgaagagagacatggaaatattgaagaacgtatgagacatttagagggtcaacttgaagagaagaatcaagaacttcaaagagctaggcaaagagagaaaatgaatgaggagcataacaagagattatcggatacggttgatagacttctgactgaatccaatgaacgcctacaactacacttaaaggaaagaatggctgctctagaagaaaagttggcagctaccagaccagcaagagttatgagagctggttaccaattccagagcataaattaagaatgttttaattcaagaatcagaaactttcagaaagaatcttgaagaatctttacatgataaggaaagattagcagaagaaattgaaaagctgagatctgaacttgaccaattgaaaatgagaactggctctttaattgaacccacaataccaagaactcatctagacacctcagctgagttgcggtactcagtgggatccctagtggacagccagtctgattacagaacaactaaagtaataagaagaccaaggagaggccgcatgggtgtgcgaagagatgagccaaaggtgaaatctcttggggatcacgagtggaatagaactcaacagattggagtactaagcagccacccttttgaaagtgacactgaaatgtctgatattgatgatgatgacagagaaacaatttttagctcaatggatcttctctctccaagtggtcattccgatgcccagacgctagccatgatgcttcaggaacaattggatgccatcaacaaagaaatcaggctaattcaggaagaaaaagaatctacagagttgcgtgctgaagaaattgaaaatagagtggctagtgtgagcctcgaaggcctgaatttggcaagggtccacccagccaagtgatctgaggaaacatcggagaaagattgcagttgtggaagaagatggtcgagaggacaaagcaacaattaaatgtgaaacttctcctcctcctacccctagagccctcagaatgactcacactctcccttcttcctaccacaatgatgctcgaagtagtttatctgtctctcttgagccagaaagcctcgggcttggtagtgccaacagcagccaagactctcttcacaaagcccccaagaagaaaggaatcaagtcttcaataggacgtttgtttggtaaaaaagaaaaagctcgacttgggcagctccgaggctttatggagactgaagctgcagctcaggagtccctggggttaggcaaactcggaactcaagctgagaaggatcgaagactaaagaaaaagcatgaacttcttgaagaagctcggagaaagggattaccttttgcccagtgggatgggccaactgtggtcgcatggctagagctttggttgggaatgcctgcgtggtacgtggcagcctgccgagccaacgtgaagagtggtgccatcatgtctgctttatctgacactgagatccagagagaaattggaatcagcaatccactgcatcgcttaaaacttcgattagcaatccaggagatggtttccctaacaagtccttcagctcctccaacatctcgaacttgtccggtttttctacagaccctggcttatggagatatgaatcatgagtggattggaaatgaatggcttcccagcttggggttacctcagtacagaagttactttatggaatgcttggtagatgcaagaatgttagatcacctaacaaaaaaagatctccgtgtccatttaaaaatggtggatagtttccatcgaacaagtttacaatatggaattatgtgcttaaagaggttgaattatgacagaaaagaactagaaagaagacgggaagcaagccaacatgaaataaaagacgtgttggtgtggagcaatgaccgagttattcgctggatacaagcaattggacttcgagaatatgcaaataatatacttgagagcggtgtgcatggctcacttatagccctggatgaaaactttgactacagcagcttagctttattattacagattccaacacagaacacccaggcaaggcagattcttgaaagagaatacaataacctcttggccctggggactgaaaggcgactggatgaaagtgatgacaagaacttcagacgtggatcaacctggagaaggcagtttcctcctcgtgaagtacatggaatcagcatgatgcctgggtcctcagaaacattaccagctggatttaggttaaccacaacctctgggcagtcaagaaaaatgacaacagatgttgcttcatcaagactgcagaggttagacaactccactgttcgcacatactcatgttgaccagccactcaaaggaggcagcactgacctgctatggcgtcttttcagtctactctacctaaagtgcactaccatctaagaagacgagcagtgaaaacctttgtgaaaactgaattctaaggaaataatgacgtcatgacttattaaaagctgaaaaatgtgatttttggggggagtcagatattacatttgattagtttactacaaattgtaataaaatgcttaagtcatttgaataataaacatcatctacatcataaactctgtacaacagatgcttttatgaaatgaagccagttgtttttcatgttttattgtaatatactaggcatttatgtattaccgtgcatttctttttaaatgtgtaagtcttatgtaaatggatataaatatgattttttaaaaaataaaatatatggttcatgg

SEQ ID NO: 400 - DNA, 2947 bp, Homo sapiens
agatttccgcccaccttccgcctcgtctagccgcgccacagctagcggggtgatctttccccccctctggtaggagttggtgaaggtgagactcatgagggaatacaaggtagtggtgttagggagtggaggggttggcaaatctgcccttactgtgcagtttgtcactgggactttcattgagaaatatgaccccaccattgaagatttctaccgcaaagagatcgaagtggactcttccccctccgtgctggaaattctggacaccgcaggaactgagcagtttgcctccatgagagatctctacatcaaaaacggccaaggtttcatcctggtttatagcctggttaatcaacagtcttttcaggatatcaagccaatgagagatcaaattgtcagagtgaagagatatgaaaaagtcccactaatcctagtaggaaataaagtggatctggaaccagaaagagaggttatgtcttcagaaggcagagctctggctcaagaatggggctgtcctttcatggagacatcggcaaaaagtaaatcaatggtggatgaactttttgctgagatcgtcaggcaaatgaactattcatccctgccggagaagcaagatcagtgttgtaccacttgtgtcgtccagtaaagaagataacctcaatcatggccataccgagcagataaaactcagaggaaatttgcacagatgctgctttggagaactttacaacctgggttgcagaactgagccttggtaaacctgtctctattacagcatgttgccatacatctatttaagtgcataaggtctttggccttcaagatccatcgaccttaaacaggaatgcttagcacgtttaccatacgtttaaaatccattctttatcaatcagtccttttatagctttctaagttcttattgatggctaatatacaagggttaatttttaatattttaattgatttctttaatcagtttctcgacttgtatttattaaatactcaaactcagtattacctactcaatgccttttaaaagaaagttataatggagaaaaaattgagccttaaacaaatggttacttctgtatattacctcgtaccagtgcttcatcctatttgtaaaatctttctcctttaaaattattggttaatactttgagactttgtttacgtgtggcagtgttgtaaaaagaaactaaagatcacattttacctgtatggatggaatatcccttttcttcaagtgcagtttgtgatgtgttttgtttttttttttttttttttgtaattaacatgttctgaaggttacaattgatatttgaaattgactgtagagcatttagttgaagagttaagcattcagttccattaggttttcacatgtgttaatctcatttacagcattgaattgcggcagtaacattttcctttctgtgaagttctaaatttagttatgacctatttagcaatgcctttgaaaagggatattgtatccatggtaaattaattgtatacctaaacagagatagctcatctttgcctatcaggcttgtaattgacatctagtagacttctgcacatgtaaaattgaattcaaataaaatcatacacactttctagttcttaatatttgtctttctgaataatagtttaaagcaatatttgttaaagttttcttgcactatcacaattgctttttagttatttctcaagaagcatgttcgtattagagacaaaatctgtgtaacaggagggagaatagcgccaagtctctgggctattttttatttttgcaaatgtgctttctaatagccattgccttccatgttgtttacctaatcagcatatttttgtctgaatacttgaacattttaacagtaacgcaggtgtagaatcagaaaggaaacttatgcagagtaatattttggttcagttttaacatcgtgacaatgagggctttttctagcaatgatttttaaattgtgtaagtttgacagtattttattgttgggtttttatttgattttagttgtgtgcttttcatttgcagaagttagtaactgcagctcacctactgcaccaaagttctcgattttaggagcccagctttagtcatttgaacatgcttctaaataaaataaaacaaaaccaaaactatacttttgatctataataagagctcaataactttgtcaaggaaagctctaatatatgcagtgatggtttatgaaagggtgtggcaattttaaatttatattgtgtgtgatgttcaaataaagtggtatctacattcatgtgatttatgggtcagcatgaccattaattactgagtagaaattgactaaactttgatttcctttttttaaatcgtgttgcatttgattcctgagcaaattccctcaaagtgaactcttgttcttaaattttgaattttatggtgagattgtaaagatagaggcaattgaaacattgttccttatttatgaactgcttgaagtgaatacttaatttaagtttgcactttaataccaaacttaaaaccaaacactcatttaaaagtaggttaagtgatcatggatcattgttattagctttgtggctttgtgaaattctaaaggaatcaaataattcatcatgatttaaattttctagagattttgatttttttataatgtttctttcctgtagattgtgttcttgtttctctctctctctctctctctctctctctctctctctctctctctctcaaaattacagtgttcattgtcattgacctcagcagcaaatttgacttgaattcacttaggatcgcaggaatcaggggaaagtgattttaaaggtggtttctccagcacattttaagaaaagggaccaaaagttattttagcttcctcaatagattgcatgttgcttattaggataataaattaatattaaatgc

SEQ ID NO: 401 - DNA, 2315 bp, Homo sapiens
atactttctgactctgacttccctttactgctcaatgcaaagttcctggacctgggtctgctcatcccagtttctgacagaatacacatgaggtgtcaccatcattggggaggtgagggctttgaggcagcaggaagggactagtcatttgtttccacaatgaagccctggggttcagagtaccagagcctcagtggaggtcagcagatgtccctccctccttggaatggcagcccatcccaggagatgtcctgacaacacctgtgtaccctgcatagggtccctgatgggcctgggtgacattatctcacagcagctggtggagaggcggggtctgcaggaacaccagagaggccggactctgaccatggtgtccctgggctgtggctttgtggtaagttctcccctcaacagggcttcagtggactcaacagtggtcttagttctttgccatcctttggcttcccttggactctcacacctaagccaacctgccgccctcttttttcttagtgtccacttcccctattctgatacttggggcagggagcttagtgaggtagaggcctagggctccctcactgcagcctgctgctatctggggtttacttccagggccctgtggtaggaggctggtacaaggttttggatcggttcatccctggcaccaccaaagtggatgcactgaagaagatgttgttggatcaggtgagcaggagaacagagtggggagggtgagctgtgttgggggtaggtggggatttcagcactcataggactttaatttctcttccctaggggggctttgccccgtgttttctaggctgctttctcccactggtaggggcacttaatggactgtcagcccaggacaactgggccaaactacagcgggtgagctgggcaggtgtggagaatgtctctggctggcgggctgacagcccaggggaagaagacaggttttacagggataaaaaagggggtaagtgcaggtagggccccaggccatggaggagaggagctgagggttatggtgcaggaatgtgctctttgaacccaagtctgtgtgtgacattcatactgggaagtgggagctgcttggaggcgcaagtgttaatttgttccttctctgtctccccaggattatcctgatgcccttatcaccaactactatgtaagagctgacacctcaactgcttgttctcctgcttccttaagtctagaactgtcctgggattggggggtcctcctgacatgggaaacccttccgttgggattactctttcattcccaggatgggcaccataaatagggaagccatcacccaactgttcacctttttcttgtgtgcagaagttggggtagggccaggcaagacagtgagtctggggtcaggtggtggggcagccatccaacctttacattttctcttgcagctatggcctgctgtgcagttagccaacttctacctggtcccccttcattacaggtatgttgcacccctaccccacccatcaaggaagacccacgttaccaacagttggagacaaaatgattctcatttcaaccttgagctaccttagacccccaaacggaacactgagccgtgatcagagttcctcagattcccaagcgtgttattcagaatgtcttgccatttccggaaactgtcccagagtgtctgcccactgaccttcttcatctccctagggaggatcctgcttctaccacccttgtctccatcccacctgagctccgtctttgatggcatatctggagggacagtggctggggtgctgcagcctaggttagacagagaggtagaccagaaggccaagtaggagcctggtcagacactcacaataaagacagttgctgaactgcacccaaaaagatagtggcactgaagatgtgtggttcaaatgcttgaaggtgaaggatcgtgggaacaggggaaaatatggaacgcttcagagggaacagggccaaaatgtacatgagtagcatagctaaaacgaatacagactggctgggcacggtggctcacacctgtaattctagcactttgggaggctgaggcaagaggtttgcttgagtccaggagtttcacaccagcctgggcaatatagtgagacctcatctctacagaaaatacaaaaaattagccagtcacatggtaacatgtgcccgtagtcccagctactcgggaggctgaggtgggaggatcacttgagcctgtgagatggaggttgctgtgaactgagattgtgccactgcatttcagcctggtgacagagtgagacgaccctgtctcc

SEQ ID NO: 402 - DNA, 1933 bp, Homo sapiens
cggaagtgtggtgaaggtggacacagaagccgcagtttcaggggaggtgtctaacctcctggagggacagtctatacgtgcggagggaggacacagcagacctgtttctcagggatatgacgaggctgcgtttcctctggaggagatgacgttgtaaagcaacctgaggatgagatacaccagctggctgtcgaaatcacagctcttcattttcttgtacaattgtagtggatttcgtgagaacaccttggatgcctttctcttgcaatgtcctccatgtccatgtaaaatccagtccttccaggccctgcctggctctaaccctcatccccttcgagggccatctgctgtggacagttgtgctgtgtaaccttcagatttcccacacattacagcaaatgcaaatacacatagaaatcagtggttccatttgtggtttagagacacatggtgccatcttcatcttccgctccacagctcgcttctggcacccagcagtgggttgcggagctccccatgccagaaccttcctcttttttcttaaaaactcttcttaattgaatccaaagtatcttttaaacgttctacttgtgtaatcatgtcatctgtgaatattcagatttatcttctccttccaatccgtgtacatttaatctctttttctgtgccttatttcgggggctgggacccttcagtccagtgttgaagagaggcagccagtggaggtcttgtctcattcaaggactcagagcaaatgtgttccacatttaatttcactatgaaatataatatttgatgttcagttttgtagatgctatttatcagatcaaggaaagcccagtctatacctaatttgttaagggttttgctttttatcataagtgttgacttttatcaaattcttttttgtatctattaagatgatagatgattgattttcatatgttaaattaaccatgggttaaacaaacttacctttatcatgatatattattctttttgtatttcacaggaattagtttggtaatatgttgggtcaatgtttaaaaaagaaaatgatgtgtaatttttttcttttattgtagtatttctgtttaatttttggtatgaggattattcaggtctcataagagttaggagtatattctcttttaaaaaatatttgctaatttacactcccaccaacagtgtaaaagtgttcttatttctccacatcctctccagcatctgttgtttcctgactttttaataatcgccattctaactggcatgagatgatatctcattgtggttttgatttgcatttctctaatgaccagtgatgatgaactttttttcatatgtttgttggctgcataaatgtcttcttttgagaagtgtctgttcatatccttcacccactttttgatggggttgtttgcttttaccttgtaaatttgtttaagttccttgtagatgctggacattagccctttgtcagatggatagattgcaaaaattttctcccatcccgtaggttgcctgttcactctgatgacctatcaatgatagactggataaagaaaatgtggcacatatacaccatggaatattatgcagccagaaaaaaggatgaattcatgtcctttgcagggacgtggatgaagctggaaaacgtcgttctcagcaaactaacactggaacagaaaaccaaacactgcatgttctcactcataagtgggagttgaacaatgagaacacatggacacggggaggggaacatcacacactggggcctgtcagggggtggggggctagggaagggatagcatgaggagaaacacctaaggtagatgacgggttgatgggtgcagcaaaccaccacgacacgtgtatacctatgtaacaaacctgcacattctgcacaggtaccccagaacttaaagaataattt

SEQ ID NO: 403 - DNA, 1934 bp, Homo sapiens
aattctgctcgctcaggccaccatggcaacagcctgccttcccccactcagggggtcacgcacagccctgccggggtgaggcccagctgccacatcgccacaggctgcccctgtgggaaaggtcaccccgtctcctccctgggcagcaacgagaaaaggaaaagacagcccctctgcccgcctctgggtgacatctttcacaatcggatgtcaggcaagtgacatgaggcccagcccagtgggccttagagatagaaaacacatgctggggcagggatacacacacacacacacacacacacacacacacacacacagtggggccggaatggacatgaacaacaacctctccccaaactgctggttggagcaggacgtggggtgtaaacaccgtcaggcatccaatactcctcctctgggcctccggtgcccccacgcagtgacgcaaccagccctacacacgtgtgtgtcccaactccacaccctgccagggtgcacacgcaccagcagggcagggaggagtcacccacatcccaccctgcagaacccactgcctcaaccacactccctccctcttgggttggcctgcctgggaagcctcgggctggccactcctgctcccaaaataggcggcccagccagaccaggggtgaggcctggagggaaggagtgggggacgctcaccccaatcgggctgtcccctgctgaaagaaggcccccaaacgtcctgctgtgccccgggggctgagcactttggaccccctggcccagagctggacgcgccgcccccagcagcctcccctcccagccccaccccacccatgccctccccagccagcagctgaaactggagctggggctggaggggggccagggggcggcccccagcccagactgccctggcccgcttggttaactctctcagttcagagagagcagcagcgggcagccagcaggcaggctggagaggctgggaggattgtggaggacagggttgtgaacacacacacacacaaacacacacgcctccaagagcttttgggctgaggcggctgccccctgggaactgggtccagccagggccgaaggtcacccagcctgactgcccaggagcccactgacccccgatcccagtgctccgtgaggtccttaacagggctgttttagaggacgggagggaggtgtgtgtgtgtgtgtgtgtgtgcgcgcgcatgtgcgctatctgctgtggtgagatccccagaaatgcaccacacacacacacccacacacaatcccaaagacccagatatacaggtacaaaaccagacaaaaccatgtatgtatgtacatccatagaagcagacacacacagaatgacacactgatagagaaacccaaagacccggacacacagccaacaccttttatgccagtcacaaaataccagaacaagcacatttatgtctacacagacccacgcacgctcgtgtagatggatggccacacagagatacagtcgaagacatagccacatcaccatctacactcacaaactggccacaaaaatgcatgtttatgtgaagacccacccacaaatggccatacagaaacacacaagtatgtgcacaccgcacataaatgcattctaagatgcatggccaaacatggccaggtacggtggctcacacctgtactcccagcactttgggaggccggggcgggaggatcgcttggggccaggagttcaacaccagcctggccaacccgacgagagctcgtctctactaaaaagatatacaaaaattggctgggtgtggtggcgtgcgcctgtagtcacggctgctccggaggctggggcgggagagtcacttgagcccggggggcggagcttgcagtgagctgagatcgtgccactgcactctagcctgggcgacggagcgagactctgtctc

SEQ ID NO: 404 - DNA, 2206 bp, Homo sapiens
catgtgagggttccttgttcccagcccaattctcatgtcccacctttctccactaagaaacagccaaattttggcaagagtcgtggtaggaaaaaaaaacaataattgggcagatgaggatttttcgctttttgactagttctttctctagactttcctgtctttttaaaacttctagtttcccccttgagcgctccctcccagtgggtagaccacggaaggaatgaacaggggatggaagcaggggatgcagtccctattatttcaatagattggaaagatgggcccagaacaattgcgtacggtgttcagtgtaaattgaagatctggagttgcaggattgttgaggcaatttttagttgctttgctccatctaaacacaaggccataggatagtgtgactttgtagcttcatcaccgtatccacatcagaagtacaatgtccacttaatacatatatacacatatgtatacacatatacacatgtgcatatgtatgtatacacatatgcacatgtgtacgtatgtatgtatacacatacatatatgtgtacacatatacatatgtatgtatacacatagatatatgtgtacacgtaaacatatgtatacacataaacatatgtatgtgtacacatacatatatgtgtacacatatacttatgtatgtgtacacatacatatatgtgtacacatatacttatgtatgtatacacatacatatatgtgtgcacatatacatatgtgtgtgtacacatacatatatgtgtacatatatacacatatacatatatgtgtacacataaatatgtatgtatccatatatgtatatatatacacatgtatacagatatacatctatatgtatactctatatgtatgcacatatacatatatgtgtacatatatacatatatgcatacatacatctataatatatgtatgtgtatatatacacatacagtgtccacttaatatatatatctatcttgtgtgtatgtgtgtgtaaatatacacacacatacacacacgataaaatacagagtctaccacatgatgagcctctgctaggtccttagcaatcaaaccacatgtccagtcctggcccccattctacaactaaacacatgggccagtttaggggtccaggagggcaagaatggtgggtccacgtagaaaccaggtgagggaggagcagtccacagggctggggtgatgggctggtgaagcagtgttccaggaggggaactgccgctcacagggctgtcctggtcgccctcgggatacagccagacttgatccgagtggctcccggggctgaatggggaccgccgggtgcatatcccaggaggcagccttcagctcagtggggaaagcagtttccaaccttagaactgcccaacactagcacagggcacctgagaaaggaggggcccctctgcctttactctgtctcccactagaggcagctggttcctgcagggaactctggtggggggtgagggggtggctggttctcagtgggcaggggtgaccctactggggtcagtgggctggcaatgctggtcttcactaacaagagttgaaaatagccaggaagctaagccctggctcctgggctcctgggcagatgcttaattaggaggaagaaggaaccaaaatcatgaacgcaactggctctctcagggggaggctgtcaccctccaagctcttcttccccttcctcaaatggagattcacactcatccctagttcaggagagccgccattgatgatgaggaaatccgtgtcaaagaagctggaaagactgctattcattgtgagaattttgtttccactgctacattacattgtttcttcttgttttcccttccaatttccagttaagaatctttcacagaaaatttttaattttatcaaaaactgcacagatatcacacagctgcacccccatttggtgacacaaagcatacccttctgtgaagattttcactttacgccaaggcatgattgtcactttacgccaaggcaataaatttttacaaattttgtataacaggagctgaattctgggttctcaaatgtgaaatgtggcaaaaaaaaaaaaaaaaaaaaagatttaattcaagcattttgtcatgtggttcttatttcttcaaccaagtttgtttacagtcactgcctttgaaatacagtcaaatacatc

SEQ ID NO: 405 - DNA, 2138 bp, Homo sapiens
caaaaggtgctgtgtgtaccctttaggtacacccaactttctcccaaaggagccattttctttgatctcagatggctgttgcgtttacatctttggaactataaactgtggtggtacaaaggttggttcatggtttgattgtttacttctgaaggaaagtatattctagaaaggagaacactaatttccattacaaattggcagacagataaaatttatttgccaacattctcactttaatgttagtgtttgccttgccgccatgcccctcacattgttactctgggcagttcgtagccctttggctcttgatggctttgtgtctagtaataatgcagggtgctcaaggaaataaattcagtgtggatatactgaaaacagactccctaacaggtgtgctagagcttgaaaaggagactgcggtggatgtgtggtgtggccctatcctcagagcactctctgtcaggcaggagtcatatacttgtgatactaatttttttaggtaccattgctctattaatattcaaacaagcctttcaccttgtactcccacttctgagaattgaccctaatgaaataatctaaaatatgacaagctatggagccttccttcagatgatcttactaccattattcttactggttaaaatttgcatcttaaatgtataactcaatgaatgacaaatcaatgaatgacatgtgtctgatggaatgttatacagctgttaaacaccatagtttaacaccaccctgttaaactgcagttgcagtggctcacgcctgtaatcccagcgctttgggaggctgaggcaggcgaatcacttgaggtcaggagttcgagaccagcctggccaacatggtgaaaccccatctctactaaaaatacaaaaattagccaggcatggtggcacacacctgtaatttcagctactcaggaagctgaggcaggagaataacttgaacctaggaggtggaggttgcagtgagccaagaatacaccaatgcactccagcctgggcaacagataagactgtttcaaaaaaaaaaatttttgtcaatgttaaagaaaagctaatattggcaggaatgtggtgagactgacatcctgacatacacaagcaggactggggatcagtgtcgcctttctgtaaagcacttttgcagtataaatcaggagcccttgaaagttcagaagctctatttttgtagttcttgtgctagatatctttccctagaaggttaaaaagaaagaaaaaacggggaacgttttaaaaaaatagcattatttataataattaaaatcactgggcatggtggatcacgtttgtaatcccagcactttgggaggccaaggcgggtgaatcacttgaggtcaggagttcgagaccagcctgtccaacatgctgaaaccccatctctactaaaaatacaaaaattagctgggcgtggtggtgtgcacctgtagtcccagctacttgggggctgaggcaggagaattgcttgaacccgggaggcggagattgcagtgagctaagataacgccactgcactccagcctgcatgacggagtgagcctccgtctcaataaataaacaaaaattagctgggtgtggttgtgggcgcctgtaatcccagctacttgagaggctgagccatgagaattgcttgagcctgggaggcagaggttgcagtgagccgggatcacatcgctgtactccagcctgggtgacagactgagactctgtctcaataataataataataataatcacagacaattgatgtccagtgatatggaaatgcttaagtgaatgataatacatccatactagatactatgacataatgcagccataaatgtcttaaaaaaaaaagacagtctcactctgttgtccagactggagtacagtggcatgatcacagctcactgcagcctcaacctcctgggttcaagcagtcctcctgccttagcctttctagcaatggcaatgtctcatatttttttcataatatagattgcttaagaaatagtgtgacataggacaggtgtggtggttcatgcctgtaattccaagtactttgggaggctaaggcaggaggatcacttgaggccaggaatttgagacctcatttatacc

SEQ ID NO: 406 - DNA, 2459 bp, Homo sapiens
caatattttcaatcccacatactcttctagaagcttactacactgtagtccccattaagacccctgaggtcaggtcataaaaggatatatagctggcttccttttggctctctctcactcttttacttgctctcttggaaagctcacctttggaacctagacgccatgttgtgaggaagctcaaactagcacacatggagaaaatctcatgctaccagcctgcaggcagcatcaggtggtcagacatgtgagtaggcagactttcaaatgattccaggccctagatttcacagagcagaaacaagccattggtactgttctgtggtgtgccatgccaaacccctaacctaccgactccatgaacatggattgtttatgcaactaagttttagagttatttattgtgcagatataataactagaacaactcttcaatttccaagttatgtactattgtcatatattttatctgtattgtgtgttttaattctgttgtcatgtactttaatgttctttaattctaagactttatatagtcagtgtttgtgtttatacatacacatatatataaaactttctttgcttttcattattttttgtatctaagacttactcctatgggctgaacgtttatgtcttcccaaaatttatgtgttgaaattctaatcttcaaggtgatgtaatttggagatggggcctttgaggggtgattaggtcatgggggcagagcccttataaaagaggctggagatctctcacccctaccatattaggacacagcaagaaggtgccatccttgagctggcatgtggaccctcacgagacactgcatgtaccagtgccttaatctgggacttcccaacccctaaaaataaatttttgtcacctataagccagtttatcatgtcttgttactgtggcctgaatggactaaaacaccatctgggataaatttttatctgaaatacttgctttagaatttcattttgtgagagtctgctggtggcatacttgctcatgatttgttttctgaacatatctgtattttttcctcattctgtaaagatatttttgctgaatatagatgcctaatttggcctttattatctttcagcacattggcattggagatattttttcattttctcgtgacttcctctgttgttcttgagtcagctgtcagcgtaacacttacacctttaaagaaatttattttttggccaggagcggtggctcacgcctgtaatccgaacactttgggaggccaagctgggtggatcacttgaggtcgggagttcgtgaccagcatgaccaacttggagaaaccccatctctactaaaaatacaaaattagctgggcattttggcaggcacctgtaatcccagctactcggaaggctgaggcaggagaatcacttgaacccaggaggcagaggttgcagtgagccgagatcgcaccattgcactccagcctgggcaacaagagcgaaactctgtctcaaaaaaaaaaaaaatctctttttttatctgctttggttttatgcaattaatatgtttctgagtatggatttatttttactaatcctgcttaagatttgttgagatctttaaatctggatttgtgtctttgattactagttctggagaagttctcaaatactacttcacatataacctcttcctcattatcttttcttctatggagattctcattaaacgtgatagaccttcagtgttctgtcttcagtttttaacaccctctcttctatatttttcaattgttctttcttgtcatgctttattctgtataatttattttaacccatattccagtttacttacctcttcatgtgtttcttgtctacttacagccatctattttgttgtggtggtggtggtggtggtagttttatttttcagtcctaaaagttctgtttggttctcttttttaaacctgctagatcacttttatagttgtttattccctacagatattttctaatatgtctgttcttgaaactatgagggctgttttacgatctttgctgctttcagtttctgaaatgtctgtggccctgtttctgttgtttcttccagctaaatgtattgtcggtctcctgtgagactctccacattggcaaggccctgggctttgatttctgtttctcttgtcggttacttttccatttattgcattcaactacaatgtgtcaccgactttaggaatctactttttaaaagttttttatattaagcactctaatttcttatagaatgcaagaattcactcaacactttgaaatgataagaaattagagctctttagtctcatctacctatattttgaccaactcaattgtaaaacccttgagaataatacatatgtgctgcttttataatttttacattaacagtgatttatataaatactcaatacatttcaataaatacttaacatt

SEQ ID NO: 407 - DNA, 2257 bp, Homo sapiens
aaaagccgacgtggaggtgatgcgcgggagcacagatccggggcagtgcgctgcgcagaggcgcgcggcgaagccgagtgggcgcgggagtgacgtcacggcgcgcgacgcggaggcggggtcgggcctgggtccgacggtagtgggtagcgggtctcgggttgcgggttgcaggttgcaagccgcaggccccaggcaactgccttcccggcgccatgttcggctccagtcgtggaggcgtgcgcggcgggcaggaccagttcaactgggaggacgtgaagactgacaagcagcgggagaactacctgggcaactcgctgatggcgccggtaggccgctggcagaagggccgcgacctcacctggtacgccaagggccgggcgccatgcgcgggcccgagccgcgaggaggaactggcagccgtgcgggaggcggagcgcgaggcgctgctggccgcccttggctacaagaacgtgaagaagcagcccacgggcctgagcaaggaggacttcgcggaggtctgcaagcgggaaggaggcgaccccgaggagaagggcgtggaccggctgctggggctggggagcgcaaggtgcgggcgggtttccaggggagggcagcactgggctcgattgctcgggtgaggcggacccctgccgtactgtcttcatcgccatgtccctgcagtggctccgtgggccgcgtggcgatgtcccgagaggacaaggaggccgccaaactggggctgtctgtgttcacggtaatcccccgccccgcctgaccgcagcaggggctaacaggggtggggcggggcgggggcactgaacggagctccccggggcgctgcggggcgtggtgtggggccggcccgcagactcctccgcagagctcgcttctcccgcagcatcaccgcgtagagagcggcgggcccgggacctcggcagcctcggccaggaggaagccgcgggcggaggatcagacggaaagcaggtgaggctgtgccacctgggctagctgtgccccggggtggggggtctcgggaggaccggagcggctcccactcgggcaggtggcagcttctcttggcgcaccggcccggcgggtggcctgccctactttacttcctgtcccagttactcctaggtttttctctaggggagtttctcgggtcacccttgaagagaggtcctaagtactggcagtggtcgggcgctgtgccgtgggagggcactcaggacctggggcggggccttttcctgccgtgggtggcacctccagggcttctcctggatggtgagcctgggcctgaccctaagagtggcctggtgggtgcaggtaggaaggtgtcaacctgccaagggcacggctggggtggggcaggggcgtgctgtggagatggggatattgcatctgtttctaacccacgtagccactggccacgtgactacgtaactgaggagtggaatttgtagtttgatttaactgatttaaagacgcacttgtgggtggtggcttcatctggatggggcctgcttgtgttcactctcttggcttgcaagactagggtctgaggcacaccttgtatcctccttgtagttgtgagagccacaggaaaagcaagaaggagaagaagaaaaagaaaaagaggaaacacaagaaagagaagaagaagaaagacaaagagcacaggcggccagctgaggccacctcctctcccacatctcctgagaggcccaggcaccaccaccatgactccgactccaactccccctgctgtaagaggaggaagcggggacacagtggggacaggaggagcccgtctcgcaggtggcatgacagaggctctgaggcctgatggctggaccctgctcactgctgttgtgggaccctgaaccctcccttcaccttgcttgcctcctgcctcggaagctccttgggtgtgggtgaagcccgaggctgctcctgtggaagtggctctgggcaccagcctgtggggctaaagacttgacagctagctctggagcagccggcttcctggaaaacctccaggtttcgcataccagggatggcccctggcttggcctgcgaaggtgaacctgcccagatttatcagtagaggctggactccctctgtgtcctgcccatggttgcagcagccatgggcctatgagcggtctaactgtggccaagtatggtgacctctatttttctttatattgactctttgtatttcaataaatatattttaaaaggaaggtat

SEQ ID NO: 408 - DNA, 2130 bp, Homo sapiens
attgggaaaaaaaaatgcatacatacatatacatgtgtgtatacccatatatatgtatatacatgcatgtgtacccatgtatatgtatatacttacatgtatacacatatatatgtatgtacatacatatatacccatatctatgtatgtacgtacatatatacccgtatatatgtacgtgcatatatacacatatatgtatgcgcgtacatgtatacgcatatatgtatgtgcgtacatatatacacattatgtgcatgcatgtatgcgtgtatgtgtgtgtgcatgcatgtatgtgtgtatgtacgtgcgcatacacacatgtgtttgtatgcgtgcgcgtgcgcacatgtgtgtatatgcgtacgcatacacacatatgtgtgtatgcgtgcgcgtgcgcacatatgtgtgtatgcgtgcgcgtgcacacgtatgtgtgtatgcgtgcgtatatacacgcatatatgtatgtacgtacgtatatatgtatttttatgttttatgtatatgtattttatatgtatatatatctgcacatccttcactattttcatgaggaaattggagctcagggatcttagttaccttgccaaaatcatgtgactgaatagtaacaaaagtttgggcttaaaataaggaagactgataataagtgttaagcttatattcctgtctaacaatgacccctggcaaagacatctgatatataagccacgtctgatatataagacgtgatatataagccagaggcactgaatgaacattggcgaaatggacaagaagggtgggacacttatgtccagggactaggtgaaagtcctggagcttttggctttccagccaccttcccagcataaagaaattgtagctaaagttaagggaatgaatagaagtattggccaaaagagaaattattttgttgtttaagagatctggccgggcgcgatggctcacgcctgaaatcccagcactttgggaggccgaggcaggcagattacgaggtcaggagatccagaccatcctggctaatgcggtgaaaccccgtctctagtaaaaatacaaaaaaaatagccaggcatcgtggcgggcgcctgtggtcccagctactcgggaggcttaggcaggagaatggcgtcaacctgggaggcggagcttgcagtgagccgacatagcgccactgcactccagcctgggcaacagagcaagactccgtctcaaaaaaaaaaaaaaaaaaaaaaaaagggagatccagaggtaactttacagttacattttcatcactgcttctgtaaatttactttagtaaaagctgtctattctcactttattttccaaaatctcttaaaaaataatagtgattatgcttcaaggtttctgaaaatgcttccacttgtgggaaattttgttgcaaaatggttttctttctaaacttacgctagttagttaaatgcaaattaaagttagtcgtcttaggagttcatcatagcgtgagtaatggtttgattaatgacattttggtagaggtcctattttttttcataaaagtgctcaatttgagatgacttgttgcaagtatactcatttacaggtaagagtcagctccctatattctctcagagtcattgttatggttattattgtaagtattttacattaatttaacagaaattttttcttccctaacttataactcaactttatgtaaatacagtgatcatcttataaaaatcaaattacagaatgtcttaaaatctgtaaatttgactttgttttaatgttgaaactacaaattcacagaggcataaatctaacatcttaattaaaatgtcaaccatatgcaagaagaaagatagaagttatttagaaagtttaatttgaaaacagaataatgaagcattttaattgatataggatttgttagtatggcttaaaatcagtggactagaagtagctgtgtaggtggtggttggcattatagttgcatttatatatgttcttattaatttcagtttcaaaattgtaagaagcatatgcatatttttaaggtgacattgaaaagtactataaagattctaaatatgttgtttttacaaaacaaaatgtaaataaattattgatttaaaatct

SEQ ID NO: 409 - DNA, 1785 bp, Homo sapiens
agtgccgggggaagctgcaatgaatcctcagctctgggcccagtggaggcgctggggacggaagaaggggagcggccggggtcactgaggcagatgtggcgctaccgctcctgggacgtgccacagatcccatcagaggcaccccagacacagaaagccatcaccaagtcgggcctccagcacctggccccccctccgcccacccctggggccccgtgcagcgagtcagagcggcagatccggagtacagtggactggagcgagtcagcgacatatggggagcacatctggttcgagaccaacgtgtccggggacttctgctacgttggggagcagtactgtgtagccaggatgctggtgagtgctcgtaggggcacgccgccccctgctggtggagccagtagccgcagcccttccgggaacgtgggattgagcccgctccctggcacccctgctgtgggccgccccaggatggtgaggggtgcaggggctttgtccggatgccaggactggggcttcccagtgcacacaaagggcagctgtgctggggcaggcagcctccgagatagacttacctggtgcctcaggggccctctcttcctgtcctgcagcagaagtcagtgtctcgaagaaagtgcgcagcctgcaagattgtggtgcacacgccctgcatcgagcagctggagaaggtgggtgggtagctcagctttgcccgcccctgccctttgggtgctgaggccctttcagcgcgcactcacacccacatgttatacaaacggcctgccaggagtgacccagcactcgggggtgaagagtcaaggaccctggagccaaatgcctgcgttcgaatcctggctcctcactgattagctgctgtatccccactgcctggaacaaacctggcgcctagtgggttcgttgaatatcactcaatggaatgaattgacgaatggtggcccttgtaccatttcaccatgtccaaactagtgcttagaagaggccattgatttgctgaagcttcataactcagctgtggctacaccctgcctctgtggagacctttccccaagggccattgtccactgtgcatttgcagctgggggcatgtctgggcactgtgcttctagaggtggaggcagcactgggcagacgggtcaaggccaggggcagaagggttcgcatggaggggcagcgcttcccagcctgcagaaacccaggccatcatacgggagagactgtaagactaggagtggttcaggcaggctcacacaggctgctttccccagcctctgaattgtaaagtgaggcttccttatacctctaataaggctgaagtagggacagttatgagaagggaaatagaaatgcagccccaagcactgtacactcatcatttaaggtggaaatcgacctagggttccacaaattagctaaaggtctccaggggccaggcagtgcaagtctgcgtgtgaggaccaggctggctgcgtgtgcccgggtcgggagtgccagagggcgaggaagaaaggatgcggccgagtgcggtggctcatgcctgtaatcccagcactttgggaggccgaggtaggtggatcaccctgaggtcaggagtttgagaccagcctggccaacatggtgaaaccccatctccactaaaaatcacaaaaattagccaggcgtggtgatgcacacctgtaatcccagctactcgggaggtggaggttgcagtgagccgagatcgcaccactgcactccagcctgggcaacagagcgagactctgtctc

SEQ ID NO: 410 - DNA, 3061 bp, Homo sapiens
caaaatcatatagaaattcctggaaagaaataatggcaataataatcgtataagtagaagctggaagggaaaaaaagatggtcatccaggaacctagaatggcactttatataattttaatgaagtcaacagtgtatatatagactaaggcgacaaggagataaaacgtgtaaagcagtgtgtgtgttttaaaggctggtcaagaacgtgagttagaagacaatgctatgtacatttaataaaaagcaaaggagaaggaggcagttgaagaaaaataaatgtacaaagagagaaacaagtatctgaaatacaaccttccagattctcaggctagcaagatgcctggcagaggcagtgccagggccaagttaacccatagcgggcagtcagtctcctttcccccacatggaaaggatgaaatctcttcccagaaaataagatgtgcaggaggaaagagggagtggggtgagggggaaggaggcaaaaagcgagttgcccgcagacaagaatgtgtgtcggtttcaagaaagttcagtcagatgatcctcagtcgcctgactcactttgtaacactttcactgacgctggagaggagggggaaaacccagcccccctttttctttcccctgattataccccactatctccacacagccttggagtcagaaatgagcactcggagcgggagatgccctgctgctgcttgccaccggtgcggcccgtttgtaacttgcaaagtttgttgcttttgcccctgattcgggcagcgggtcctgggatgctcctgcttccctcctgcctcccacggagcccgggaagagggtctgcctccccatcccgccaccttccagcatcagcctctgaaaaatctcacagagacatgcacgttgtagcaaaaatcaaatccggaaactgcttgtttcagagaaagaaatgaagttgtcttttaaagaaaaactgaattaggaggagagaaaagggaaataggagaagaaaggaaaagttaaatttgatttttctccagagtttccactaaagggttggggacagtgtgaaggagaaggggagctttttacaaatgcctttggtctctgaacttcagtggcaaagaacagggatcaagttgaatgttctcagggctttggatcctagaggagaaacaatcagaagagcagaaatggttatccctgtttaaaataagccctcactctttaccacttccttaaaggagtggaggtgctggtagtgatggttagaggcaatgagggacggagaagttgctcccgtttcagagatgcttaaatgaaaaggaaagaaaatgcagtcaaccccttctccaggaggtgcctcctagctctcctccctgagaggtgaagttgggatggggcaacgagagtcatacacacttagacaaggaagtttccttcggatcactgtcagtccagacttggttatctttgcaaagtgtggaaatctttggcaagtagctttcttcgtaaagttgatgagcttctagggagcctgttttgctgactttcaaagcactggggcaggttgtgtggcaggtaccagttctgagggcgctccaaagatatccatctccatccttttttctctgtggagatcttctgcaagttttgtcacgctgcacacacacaaggctgggggctatgtatctaggctgatctatttgttttattttggtctggaaaaactaagccaattggggtagaaacatgctttccttcgtagcagagccagtaggctgctggtgtccatagagtgacagtccaccaggactaagggtgggctgaggattttaaactttacattgtttctctgttaccagatacaaataaattcacgtcttccaccatttgttttcaaatagggtaaaaccaagattaaagttccctgctcaactgctatgtcataggtttcagtgtttcccttccttcttaatttgcttaaagaaaattccaagaggttattaaagaccttgatgccatattaagaatatttcctgggaaaaatgtatgtctaccctgaaggtaggaaaggagggcgttgctagcctctagcagtgccgcgtttattctaagatgtgggagattcttttccttgcaacagtttttgtcatctgcattcttccaaggcttttaaggtgcattttcttctgtgtgaaaggaaattctttgtccttttcctctcagcaccgtggcttcccaaggtagacactattttgtgcctgtcacagagagagggagtgcaggtttgcaatgctcacagacaattgattgtctgccctaatgtgtttcatttacatgtttataacgtcaatggtgctggggtgtccactgtaccattcattcccgcattcccacaagggggcaattgtctgaatggccaagtcagacacctttttgattgctctttggttgtcttttcagagcaaagagataaaggaggaaaatctgtgatgcagaaacactagttgaaaatatacagaattaaatgtcaccacaaaagcagatgttaacataagcccaaatatgctttttagccaagatgtgaaggttgaaaaaaataattcagagcagagggaaggatgatttaaaccaataaatatagccctattccccctctttacttcttttctgtctttagcaatcagaagatgaaatgtaattttccttttcatttttaagccttgaaacatccaggcacctcctcattatttgtatgtttgctgtgatttgtgaattttgtatatatttacatagctctgtttatgccaacagcatcagcttaccacttggaaaatctattgaatgactatttgggctgtggggagggtaaacttttaaaaagtaagatccaagtatttcttcatcaagcagtttttaaaaggaaaacgataataatcagtaggctccatggaagcctttgccttaatagctatgtgccaaatacttttatcttgtgtgacagtcatgtcagagtgaaatctctcaggaaaagtgtaactagtagttacaaagtaaataaaggatttcatttt

SEQ ID NO: 411 - DNA, 1909 bp, Homo sapiens
gttgttggggccgtcgaggcggcggcgactctgcgtccccggctcctgatggaggcggggccgcatccccggccggggcactgctgcaagcctggggggcggctggacatgaaccacggcttcgtgcaccatatccgacggaaccagatcgctcgggacgactatgacaagaaggtgaagcaggcggccaaggagaaggtgaggaggcggcacacgcccgcgccgacgcggccccgcaagccagacctgcaggtgtacctgccgcgacaccgaggtgaggccgcccgccccgcctgcctccagcccgcgcgctcttcctgcaacgcactccccttctctatagggaaaaaccacttcttactcctaaggttcagctcatctcgtctctttccggaacctccacctcagcgctcccaaatctccgctgaatgattctcaccaagaactgggacgactcataagcccccagttaagcatcgctgtcagagtatcggggagccagcaagaagtttatctgccggtttgccccaccgtgctgtattttagtaaggtgctccgctacctagcaaagagaaagtctggcacagcgatgagcgaccagcacataattgcggaatgaacccagtaaatggcctttccccagcttctctgctacctagagatcacactggttaatatatgacggtcaatttttgttaagcattattactttttttaaaatgtttttattttatttttgagactaggtctctgtcgcccgggctggagtgcagtggtgcgatctgggcttactgcagccttagcctcccgagtacctgggaccgcaggcgtgtgccaccacgccggttaattttggtatttcttgtagagaaggggtttccccggctgggcgcggtggctctcgcctgtagtcccagcactttgggaggccgaggcgggcggatcacgaggtcaggagatcgagaccatcctggctaacatggtgaaaccccgtctctactaaaaatacaaaaaattggccgggcgtggtggtgggcgcctgtggtcccagctactcgggaggctgaggcaggagaatggcgtgaacccgggaggcggagcttgcagtgagccgagatcgcgccactgcactccagcctgggcaacacagcaagactcggtctcaaaaaaaaaaaaaaaaagagagagagagagggggtttctccacgttgtccaggctggtctcgaactcctgagctcaggtgatctgcccgcatcggcctcccagggtgctgggattataggtgtgtgccactacctttgttaggcattagtgaaagtgcttttagatcttacgtatattaattcattgagtctttatacaacctcataagaaagcttctgtctgtttcacagtcaggaaacaggcacagagaggttaaacaacttgcccaagatctcagctagtaaatggcagagcctggatttgaacccaggcagagctctatccacccttctgctttccagtactttttgctagacaaatgtgcattgtgtacctactgtgtgacaggattgtgctggcctcagagcagggatgcaaaggtaaataagtccttgattggcagcacaccaaatgcttacactggtccgggcgcggtgattcatgcctgtgatcctagcagtttgggaggccgaggtgggcggatcccttgaggccaggagttcgaaattaacctggacaacatggtgaaaccccatctctactaaaaatacaaaaattggccaggcgtgatggcgggcggctgtggtcccagctacttgggaggctgaggaaggagaattgcttgaacctgggaggcagaggttgcggtgagccgagatttagccactgcactccagcctgggcaacagagcaagactccgtctc

SEQ ID NO: 412 - DNA, 2977 bp, Homo sapiens
tttttttgcaagaaacatggtaaatgggaagaaatgccctatatgcaatgttttatggccctctatcaaaaccctgccttgcagatgaaatgcagaatatgtaaattggccaaagggaactatattgccaattctagaagcctctggagaggaagcatcagtcatgtgggggcctatagggaagggaacaagtaagaagagtccctttactaccccctccaagagaagtgaggccctctaactctactcggggactggaaccttggccaatacaggggcatagtccaccttcttggaaatggtaccctctgcacctccagggaaaagcaagggcccgttctgtatttgccaggccctccaaactctgcagagccagctgtggctcctgctatggcaatagcaggcccctgttgcactcttctttgccagggagcaccactcatagtgggaacgcatataaccctggagggtgactgttgccactcagagcatgcctgttggagaaagaggttttgctcgggtctatgtgttttttaaaactgttgacttgtataactggaaatcccatagtaagggcttatgggtgagcccacgagagttcgtaactctcatatggagaatattctccacacataaccctacctggccaggtgtgcagaccgtaacagcaaccctgctcacagcagaagataaatctgccaccatggccaaaactaaggaggaggcagacaatatgtgtgctgataacctggtgacctggcccgttgaggtgtcagtcccaatagccaacccaaactgggaccccagtgataacaagaatcaagagtggcttcatcattataggaatatgcttctcagaggtatgagggaagcaagccagtccctggtcaattggggaaatctcagagaaatagaacaaggccctaatgaaaatccatcagcattcctaaattgataataagaatgcctccagaattacaccccttgggacccagatgacccaaaagctgagtagtactttaatctcacttcatctctcagccccagatattcagagaaaactctaaaaagtggcaataaatccacatactccccctttccaactggtagacatctcctttaaggtctatagtaaagagatgtggcatctgatgaaaaggaagacaagaagatgcggcagccctacagactacttcaggaagcccaggaagaagatggcatgggtgagtgaccagggcccccaccatggaactcagggcctgcctacactggggcccaaacaatatgcttactggaagcagaaaggatgctaggaaagggaatgtccaaatcatccccagagagggaaggaggaggacaagcccaaggtacctgttccctgtaactggacaagaaactgatggatggggacatggggctccctgcctggctcctcaaaacaagatccacatctcccccaaggagccccaggttacacagaagaaggggggcaaccagttggattttttttcgtttgtttgagacagggtctgtgttacccaggctggagtgcagcaccgtgatcgtggcgcactgccgcctccaactcccaggctcaggcagtcctcccaccttagcctctcaggtagctgggactaaggcacacctggctgatttttttgtttgtttgtggagacggggtctcgttatgctgtcagggctggtcttgaactcctgggctcaagtgatcctccagccttggcctcccaaagtgttggcattacaggcatgagccactgctcccggccaccagctgagtttttgatcaacactgtagccatgttttctgtgttgatcactaaaagtggaccctatccaggaagaaatgtatataaggggtgtgtctcataaaggaaataaaagattcttggagcctctggtccatgaaatagtatctaaaactttcactcattctttcttctgttccccaaacatcccattctccttttgggaagggaccttctgactaagtttggagccacaatttctctaaatcaggacagaatagaggtgttctgagcccatggcactgccatgctggccctagttcctggggaagttccagacttggggcctcatatgactccttggctaatgcggtactagataattgtatagcattagactgcctcttagcagaacagggaggaggagagtgtgcagttattaattcctcttgctgtacctgaataaatacctcaggggaaataggaagttaacattaggaaggtccatgcccaagcctcttggttccacacttttaatcagcagccatatttttttttttttttttttttgagactgtctcgctctgttgcccaggttggaatgcagtggggcacgatctgggctcactgcaacctctacctcctgggttctagcgatttttctgcctcaccttcctgagtagctgggactacaggtgcgcaccaccacacctgcctaatttttgtatttttagtagagacggggtttcgccatgttgcccaggctgatcttgaattcagggtgatctgcgcgccttggcctcgcaaagtgctgggattgcaggggtgagccaccacatcaggcctaatagccatacttctaattctgtttgagaagttctcaaattagcaataccaagtgttacttggtttcttcccctaatgaggccactaattttattgctcttactactgttgtttggtccctgcatctttaacctcttcgtaaaatttgtatcttccagattagaaaaatttcaactgtaggtgcctttgcaacctatcctgggagaccctaaaacatatttagttttagtgcctagagattttcactcctctaacatctctggatacagtgtccctggtcaacatgaagaagttacagaagaacgctttctgatcctggcccctaaagaatttacttgtgctaagtaataaaattcctattgatc

SEQ ID NO: 413 - DNA, 3241 bp, Homo sapiens
agttgctccggcggcgctcggggagggagccagcagcctagggcctaggcccgggccaccatggcgctgcctccaggcccagccgccctccggcacacactgctgctcctgccagcccttctgagctcagctgcaggaggccagcacctcaagactgctgagcgtgggaggggaggccttctctggaggcaccagcaccttcactgtcactgcccatcgggcccagcatgagctcaactgctctctgcaggaccccagaagtggccgatcagccaacgcctctgtcacccttaatgtgcaatgtgagtggccctgaggtgggcagggagataggttctttgcccagggacccccagcacccaccaggcaggtggtccgcaggacatttagcagacacttaagcactttgcaaatatgaactcatttgatcctctgagtaaccccatgaggtcattactattgtcgtcaccattttacaaataagaaaactgaggcagaaagaggtaagcaatctgcccagggtgatgatcccgctggtaagaagcagagccaggattcacatctgggcatttggctctagtatttacactcataatcactccgaaatgctgcctctctggcagacccagccatcctgttcctcagcatcccctctgaggagaggcccaggcccctggctcccatctgggtttgggaagaaagggctagaagtatgaggggctgtggtgagagcatattggcctctgctttgtaccagtcaagccagagattgcccaagtcggcgccaagtaccaggaagctcagggcccaggcctcctggttgtcctgtttgccctggtgcgtgccaacccgccggccaatgtcacctggatcgaccaggatgggccagtgactgtcaacacctctgacttcctggtgctggatgcgcagaactacccctggctcaccaaccacacggtgcagctgcagctccgcagcctggcacgcaacctctcggtggtggccaccaatgacgtgggtgtcaccagtgcgtcgcttccagccccaggtgagcatggccaacaagcggccctgcaaagcttcaggtgggctcaggggtcccgtccccatacagaaatgggaatacttgttgccctgtggttgggtcttgtggatgaactgtccccagccaccctgggcaaggagggcagagtagtacctatggcatgttggggctggggcactacccacttgggacctgacacagaggacatcctccagggcttctggctacccgggtggaagtgccactgctgggcattgttgtggctgctgggcttgcactgggcaccctcgtggggttcagcaccttggtggcctgcctggtctgcagaaaagagaagaaaaccaaaggtaggccagggacactgggggcagtgtggatgaggtcaggctgagcagcagccaagacagcaagtgcagctgggcagaaccagtcatctctgacggtggcagagcacttccagggggtggccatgggtacggtgacatgcatcccaggtagcagggtcaagcactgggaacccagtctctggccccagggccaggcctgggcatttgagagaccccttgcctgagggtcctgggtctgaaagggtaggacagcccagcgtgggagggcacactgagaattagggacatggtttctttctccacaggcccctcccggcacccatctctgatatcaagtgactccaacaacctaaaactcaacaacgtgcgcctgccacgggagaacatgtccctcccgtccaaccttcagctcaatgacctcactccagattccagagcagtgaaaccagcagaccggcagatggctcagaacaacagccggccagagcttctggacccggagcccggcggcctcctcaccagccagggtttcatccgcctcccagtgctgggctatatctatcgagtgtccagcgtgagcagtgatgagatctggctctgagccgagggcgagacaggagtattctcttggcctctggacaccctcccattcctccaaggcatcctctacctagctaggtcaccaacgtgaagaagttatgccactgccacttttgcttgccctcctggctggggtgccctccatgtcatgcacgtgatgcatttcactgggctgtaacccgcaggggcacaggtatctttggcaaggctaccagttggacgtaagcccctcatgctgactcagggtgggccctgcatgtgatgactgggcccttccagagggagctctttggccaggggtgttcagatgtcatccagcatccaagtgtggcatggcctgctgtataccccaccccagtactccacagcaccttgtacagtaggcatgggggcgtgcctgtgtgggggacagggagggccctgcatggattttcctccttcctatgctatgtagccttgttccctcaggtaaaatttaggaccctgctagctgtgcagaacccaattgccctttgcacagaaaccaacccctgacccagcggtaccggccaagcacaaacgtcctttttgctgcacacgtctctgcccttcacttcttctcttctgtccccacctcctcttgggaattctaggttacacgttggaccttctctactacttcactgggcactagacttttctattggcctgtgccatcgcccagtattagcacaagttagggaggaagaggcaggcgatgagtctagtagcacccaggacggcttgtagctatgcatcattttcctacggcgttagcactttaagcacatcccctaggggagggggtgagtgaggggcccagagccctctttgtggcttccccacgtttggccttctgggattcactgtgagtgtcctgagctctcggggttgatggtttttctctcagcatgtctcctccaccacgggaccccagccctgaccaacccatggttgcctcatcagcaggaaggtgcccttcctggaggatggtcgccacaggcacataattcaacagtgtggaagctttaggggaacatggagaaagaaggagaccacataccccaaagtgacctaagaacactttaaaaagcaacatgtaaatgattggaaattaatatagtacagaatatatttttcccttgttgagatcttcttttgtaatgtttttcatgttactgcctagggcggtgctgagcacacagcaagtttaataaacttgactgaattc

SEQ ID NO: 414 - DNA, 3211 bp, Homo sapiens
atttttgcctgccaggagtgggtgagggaggagcagccgccgccttcacagacacctggtagtgtcaggagagggcatgcactgccctggtgaggctcctctggctgcccccaggcccacacccaaggatccctgcctcagaaacgtgctggccaaagcgctctatgacaatgtggccgagtccccggatgagctctccttccgcaagggtgacatcatgacggtgctggagcaggacacgcagggcctggacggctggtggctctgctcgctgcatgggcgccagggcatcgtgcctgggaaccgcctcaagatcttggtgggcatgtatgataagaagccagcagggcctggccccggccctcccgccaccccggcccagcctcagcctggcctccatgccccagcgcctccggcctcccagtacacgcccatgctccccaacacctaccagccccagccagacagcgtctacctggtgcccactcccagcaaggctcagcaaggcctctaccaagtcccgggtcccagccctcagttccagtctcccccagccaagcagacatccaccttctcgaagcagacaccccatcacccgtttcccagcccggccacagacctgtaccaggtgcccccagggcctggaggccctgcccaggatatttaccaggtgccaccttctgccgggatggggcatgacatctaccaggtccccccgtccatggacacacgcagctgggagggcacgaagcccccggcaaaggtggtggtgcccacccgcgtggggcagggctatgtatacgaggccgcccagccggagcaggacgagtacgacatcccgcgacacctgctggccccggggccacaggacatctatgatgtgcccccgattcgggggctgcttcccagccagtatggccaggaggtgtatgacacaccccccatggctgtcaagggtcccaatggccgagacccgttgctggaggtgtatgacgtgccccccagtgtggagaagggcctgccaccgtccaaccaccacgcagtctacgacgttcctccatcggtgagcaaggatgtgcccgatggcccactgctgcgtgaggagacctacgatgtgccccccgccttcgccaaggccaagccctttgacccggcccgcaccccactggtactggctgcgccccctccagactccccgccggccgaggacgtgtatgacgtgccgcccccggctcctgacctctacgacgtgccccctggcttgcggcggcctggcccgggcaccctgtacgatgtgccccgtgaacgggtgcttcctcctgaggtggctgatggtggcgtggtcgacagtggtgtgtatgcggtgcctcccccagctgaacgtgaagccccagcagagggcaagcgcctgtcggcctccagcaccggcagcacacgcagcagccagtctgcgtcctccttggaggtggcagggccgggccgggaacccctggagctggaagttgctgtggaggccctggctcggctgcagcagggtgtgagcgccaccgttgcccaccttctggacctggcaggcagcgccggtgcgactgggagctggcgtagcccctctgagccacaggagccgctggtgcaggacctgcaggctgctgtggccgccgtccagagtgccgtccacgagctgttggagtttgcccgcagcgcggtgggcaatgctgcccacacatctgaccgtgccctgcatgccaagcttagccggcagctgcagaagatggaggacgtgcaccagacgctggtggcacatggtcaggccctcgacgctggccggggaggctctggagccacccttgaggacctggaccggctggtggcctgctcgcgggctgtgcccgaggacgccaagcagctggcctccttcctgcacggcaatgcctcactgctcttcagacggaccaaggccactgccccggggcctgaggggggtggcaccctgcaccccaaccccactgacaagaccagcagcatccagtcacgacccctgccctcaccccctaagttcacctcccaggactcgccagatgggcagtacgagaacagcgaggggggctggatggaggactatgactacgtccacctacaggggaaggaggagtttgagaagacccagaaggagctgctggaaaagggcagcatcacgcggcagggcaagagccagctggagttgcagcagctgaagcagtttgaacgactggaacaggaggtgtcacggctcatagaccacgacctggccaactggacgccagcccaacccctggccccggggcgaacaggcggcctggggccctcggaccggcagctgctgctcttctacctggagcagtgtgaggccaacctgaccacactgaccaacgccgtggacgccttctttaccgccgtggccaccaaccagccgcccaagatctttgtggcgcacagcaagttcgtcatccttagcgcccacaagctggtgttcatcggggacacactgtcacggcaggccaaggctgctgacgtgcgcagccaggtgacccactacagcaacctgctgtgcgacctcctgcgcggcatcgtggccaccaccaaggccgctgccttgcagtacccatcgccttccgcggcccaggacatggtggagagggtcaaggagctgggccacagcacccagcagttccgccgcgtcctaggccagctggcagccgcctgagggtggtgaccccaggagggaggcaggggaggggtgcggcggtcccagctccctggctcccatgtcaagagtcgctgtgccacaggcttagggacaggaccccagctctgcgtcggtcctggtgccctggatgcccaggaatctgtatatatttatggccgggcagggtgtggggccatgcctcctcaggagccgaagcccaggggccggccagtggccttccccagcatgcaccacgggcccgggttgggtcaccagacggggctggagtgtgagggtcctgcagcctgcaggacctcgtgccaccccgagggctgagcctggtcccacgagggtgccgtgtcccctgacagggccagtgcagtttggtgtgtcctccgccttaccaggagaagaacctgaagaactatttttcgttattggttttccaatcatttgactaagagtctccatttaaataaagttttt

SEQ ID NO: 415 - DNA, 2428 bp, Homo sapiens
ttttatttgctaaatctggcaacactactcagttggctactttggaacgtatcgactaagttttgtgggtcttttattgtcatgccaggtgggggaaatctgagaagcggtaagaattttgtgctttttcctgaaaaaaaaaaaaaaaaaaaaaaagaccatcgagtgagacgtaattttttttttttgagatggaggcttctgtcacccaggctggagtgcagtggtgcaatctcggctcactgcaacttctgcctcccaggttcaagcaattctcctgcctcagcctccagaatagcggggattacaggcgcccaccaccatgcctggctaatttttgtatttttagtagacacagggtttcaccaggttggccagacttgtctcaaactcctgacctcaagtgatctgcctgcctcagcctcccaaagtgcggggattacaggcatgagccactacgcccggcgagagagagacataaatcttaaatgaattctgaaaagaagtataatttgaggtataagtgcatactcaggaaataacaaccctcaatagagaaagagctcaaaaggaagcgaggagctggtttaagtactttcaacttcacaaacgtcttgggaccgctccctcaagaactgcaggtgtcggtgtatgtagctgtaacatttgctgcttgtcatcacattttccatgaagagtcaaaggcaaacactaccctggtaccatatacaattaaaataaggagaggaaattgttggtgtgaaacttggctttagctcaaaatgttacacctttgtcaatagagctccagactacagcttagaccaatgagtcttaaccttttcaaaaatgaggactcctttggatgaaaatttcatcctgcttgatagtaatatttttagtgtgagtataatgagggaaagctataacgtgatgcttttaaatgaatgggctttttattaatcatgacaatatacacaaacatttaaaattatttatacatacatgtgtgaaacatttgaaaactattcacacatatatatgtacaaccttctgagtcccccaacaggactctgagttcacaagcaggggagcaggtttagactatctttatggggggacaataaaaactggagtcgtttgatgaggtaagttcgactattctgtttctctccaaatccctctgaaaccattaccacacacttggagctggaagcacccagtgaatgagaggctttcaagatcttcctttccctcgagttcttgcaggtctgggtctatgagagaaaactgggagacatcagtagagctgccatcctgtgaagtgggggcaaaaaggtctactcaagtaggctccttatgtccatccatttataaatctccctctcttgcttgattacaagaaacccagaagagggggtgattagaacacctactccattccattatccagattgctacatacaccatgaccatttctcacttaccttttattttcaggcagatctaacaatatagatgagcaaatccctggattatgtgcattagaattagaaatccagtctcattttcaaagtttcttaccagatgcttattacctaccttgcaggattaaatgagatcaagggtatgaaaagtttttgagaacagtaaagtggatgcaaattaaagtggcatgattattcttcggaaggatcagtgtgtcagatatactcaacaaggttggggtgaaatggggctgctgaagagggcagacccagcaggtgcacctggcacctgagcaacagagtggactagtgggctagaggagctagaaggacttcagacagcatctaactcggcttgtctcagacttggtgttctcaggacccctctacacttttaataattattgagaacctaaaagggcttttgtttatgtgggttatatctatcaatatttaccgtattggaaattaaactgaaaacattgttaaagattcatttaaaaagaataaaactcactacatgttatcataaataatattttttacaaaaaatattttccaaaacacaaacagtctagtgggaaaagtgacattgtttcacatttttgcaagtttgtttcatatcttgcttactagaagacacactctcacacctgcttctgcagtcagtctgttgcgatatcatgcaccatgtagtctctggaaaattccactgtaagcatgtgagaaaatgaaagcaaaaaaatcaaataacatattagctttatcataaaaataattttgacgtcattgattcccaagcttctccagaccacactttgaggactattgatcttactcagtgataagagctttcatgtagattgattcaactgcacctcacaaagtttttaaatgcctttgattatccctattacacactcagggaaagtaatccttgg

SEQ ID NO: 416 - DNA, 1717 bp, Homo sapiens
caccggaggagagactcatctaggccagcctggctgctggcaccagcacctggaggtcctgaatggtttctacctggagacccaaggaagctgcttccagggctcgggacattgctacggaagtgtccccttggctggcagcctctgcctctgcctctgccccatcctggatggaggacgaggggagcaactcagggaaacagaggcctagagaggctgcggacttctccatcccaccctcggggttccgccttggcaggtgtacggctgtgcgtgggagggcacacgtgggttcacagtgtgttcaggagtgtgtgtatctggaggagtgtgtgtgtgagtgtgtacctgggcctgtgttagtctgcagatgctagtgtgagtgtgtcctgacatggctccagggcgtgtctgccgtgtttactgtgtgtctatgactgtgatgggtgtagctgatcccaggaggtggcggctgcgccatggggtcaaccattacagtcctagggcaggggcggcccaaggctgcatgttctccaggaggccaggccggggttgcccaggcacctccttccccgcctctgggggctgctcctgctgtggaggcagctgggaagtcagggaaggccactagcagaggctgagtgggcttctggctcctagaacaaatgtcccttcaggcaggtctgtctgccagaagccagagccagtcatgcgagggaaccacagacccacccgccccctcagccggagcagcccgagggagcagaggaggggctgcctggagcttcccaccctgctgtggtcatttgtcaaagggggaaggcacccactgcctacctcacagggctgttgtgaggatcagagaggacgacagtggggaaagaatctggaagtcttcaactgccgtctgatgggaaggaccgtctgggtgtccttctgggatgaggatgacagagcaacccttctcctgccctgaaccccccccagctcacctgaccacctctggttctccagctccggtccttcctagcagcctggtgagctcactccttcccctgatgactggctgcctctacacagactcggcgagaggacttgaaggaagccctctgggttgtctgctgagtacaggggctcagtgaacactggcgctgcctctgagtcggggctgggcctgcagaggccgactcagaggagactctgctgcttgctcccagccccttccccggcgatgcccatcacactgtgacctcccatccctgaagggcacctgcctgagggcctggcctccttccagcttcatggacctggagatgtgccctttcatccttcctgcttcccaggccagtagatccgtttacacttttgggtcgacagtcagcttttccttttggttttggcgggtcccagaggcatgggtgtccagtccaatgtggggagccacgtgacaacgtgggggactgggacatgggactgggaagtcagcagacgctgggatagagagggccctgaacaccaggctcaggggcttgcttggtccttatcctgtaggaggtgggaccacctttccctgaactttctctacaacccttgggagcgtggggaggaggcggctggttccagggtcagtttactaagttagagatttggaaaacctgtgtcagctgtaactcctaggatattttatgtggaacctaacatgcagatgaaagctggc

SEQ ID NO: 417 - DNA, 2613 bp, Homo sapiens
tcctgtgcaggacagcttctatccctgtcacttaacaatggagaggattcttccccagcttccttccagaggacacaaaagctcagagctccacagtctagagtctagaccaacaggcctccacactcacgtcccagagatttccctggtcccacctactcccagtggcaaccagacttctgcacataggagagatgtcatactcagagtccagcctcccacatccacaggaccacctcttcctcctctgagtcttgttaatagggccatcccctgccttagacctggcccagtggactctgatcttacagccaatatggggcagcaaagtgggacatctgtctacagggccagtagccccaggtcatctgcttgccaaaaggagggggaccagcccccggggggagcccagagctcggcagggctggggttagtaagaagagaaaacagggttagtaggggctgggttagtaagtcagagcacagcaccagcggacagggcacctcagcagacacacacaggagtcgctaagagaaaaggaagaacgcacgcaggtccgttagtatgttaagggatgatcggggtgcagttgaggcaccccaggggttagacgggttagtaatcgaacaaaagagctgcctacagaaaagaaagctgagacggaggaagaatgtggggaagtgacatggattcaaagccaagtgtcttgccccaggcagaaggatctgtgtgcagaacacccagagaggccagggcctaggcagcagacgtgttcaaccaggtttgaggggccttcctccatcctcatactttttttttttttaggtgtctgccatgtgctgagacccttatattgacgggaatcctcactgcaacctgtaaggtatcagaactcgcattctaccactgaggaaactgaggttgagagaagtgaggtgacttactcaaactcactcaacaggaagtggcagagctgagaaaaggccatgtgaggacatagtgagaaggtgccacctgcaagccaaggagagaggcctcaccagaaaccaagtcttaacaccttgatctggactttccagcctccagaactggcagaaaataaattcctgatgtttaagccatccagtctggcatggtgctgtggcagcccaagctgatgaatagtacacaccactccgcattctgggaaaaaggacatctggcttttaaacttgcctaagggaggccacaagctgctctcttgcaaacgctgggactgtcccctctggagggagctggaattgcagattgtggggcctgtcctgccaccttctgttccccaagaacagaatccaggagcagtgcaactagaagcagcgatctgattggagaagagtgtcctgagactgggctaaggtgaccccttaagcctttgggatggtgcactctcagcccctctggctgcccctcccagagttcaacagcacagggggaaggctccagctcctcccagatcctgactgtctcctctttgtaaccatcagggagaggaaaagcatggaaaagccccaccaaggaagtcccccacaaaatgacaattacgcactgagcaaatggagacaaaggactccagccagcggcacccgaggagctgcatctgccctctgcctgacagcccctccccgactcccatccttgttcctgtccccatcctgtagggtcctttgagacccagccttggggaaagtgtggtcagtggggacttggcccaggccaggctctgtctggtcaccgacagaaacgcgaggaggaatcaagttcacatggggcaggaaagggcccccagacccagacaatagggcccagcaggcagggcccgagcaggtgaggagggagtagtgggctgccaggcctccctcatacccctggagctgtcctccagagccagatcagtcatctgctgagcatcaaccaggaagagttcctatccatgggaggctccatcccaacaggtgtgaagaggatgagatcttcagggagtcacccagcgggctagaaaaccaccggagtctgaccgctaagtcactgtggccagaatccaaggtcacccgaggtccaaagagaagtccaggccaggagtcctggagatgcggcccagatggagccacctgggggagaagacagcgagtgaggatgaggccacagcctccatccccaacttcccacatccccccagcctaattctgcatctgaggggactcatgttcagagatccccccagtctctcatgcccccagcacacacacagggtggaagtgagggttttggacatgaaacatttttagaagaaacttaggccaggcacagtgactcccacctgtaatcccagcactttgggaggctgaggaaggaggatcacttgagcccaggagttcgagaccagcctgggcaacataatgagactctgtctctacaaaaaataagccaggcatggtagcatgcacctgtagtcccagctacccaggaggctgaggtgggaggacgtattgagccctggagttcaaggctgcagtgagccgtgatcataacactgtactctagcctgggcaacagagtgagaccctgtctctgag

SEQ ID NO: 418 - DNA, 2033 bp, Homo sapiens
aagccgcagattcccatccagtatcctagaggaggagacccagggctgtgtcctaggaggcccaggaagcctggtcagcctggaggccgagggcgggcccgggagatctgggaaggacatcagtgtctccacgaagagcagcagggtctcagcccatggcagccgcaggccccatgactggggccgcagcctccagagccgccacagcagcccattgttctggggggtcaaaggtggaggctgtcagaggggcagtgcagggggctgctggggtgaagccccctgtagcagcagcacccagcctgctgtggctctgccctcctggaccccctgtcctcctggaccccctgccctcctggaccctctgccctcctggacccccttccctcctgggccctcctggaccccctgccctcctggatcctctgtcctcctggaccccctgccctcctggaccccctgtctgtggcccctgctcctctcctccttccccgacacatgactggaccccccgatctgcagccggggtctgggcactgggggtcctgtgggcctctcggtgtctggggacaatcacaggttcccgtgcccacacccagcctctgcttccagaacacactagagggtcccggcatcctgatgagtccactgtccccgcgatggttttcagggatggagaaggctccctgtcctccgctggaaccctgcagccgggctgacggtacccccaccacccacccaggggccccagaccctccccatctccaccgccaacccaggccccggctgcgcacgcggggccaggccgtgagctgctgtccccggatggggccgccccgggctggcctggctcactccgtgtcacagatattcccacagagaccccagcgagacctgcagaacattacagcagaatgaaggagagccagaggaagaggcagatgtgctggcctgtaaacagtctgatttccaatgtaaaccagattcaggcccacgacatcaggtaaacatctgcatcagagcccccggccccccaccgcccgggaggccccggggtccacacggccgactctgggacccgtcacagtgaccgccgagacatttcgtaattaggcaaaattgatccttgcattccttccctaaatcccaaatctctgcaattttacttcttctcaaaaatgaaaacatttggcaattagctgatccaagtgaaaaaggtagagaatgtgctctcaactggaaaatgccaattaaggaagcagctctgacttcccacccgccctggctaagctgggagcttatcttccccgagaagaatctgctgggataagggggcttgggaaacaccgagggcagggctgcctcctcagcttcctttgagagcagattagccgtggccttgtgccagcagggcctgggtgccacacagggtggcaggggtggcagagccgggcccggctctggtactgggatttggggtggcgggacccagtggggcacccgcttgtgggcggcactgagggcggtgacgtaggcagcgggtgccggtgtctgcccctccatctggccgggctccccaccctgctcctgcagccctggacctcagggcccatttgcggtgcaaggcggctcttggccattttgcccgcagggccctaccttgggtcttgggagcttctgtcccttgccctctcttgtccaggtcagcatctcccactgtgggaatcctatgtggccccatcgtctggacagtgtgggtcaggtcactgtggctgttttgtgatgcgtgtgtgggctcatccctcagtgctcagaagctgcagacactatggaaccgcttttcaggccccgtggccgtcacccccgctctagagacttgattgcagggaccatgcccggccggcctaactgcacccctcactccaggtgggtggggggacccaggcctgctggcccctgtggtggtgcagcccagaaggtgtgaatcagtttacactgttcagtgcctgaataaaagtcacaggacaaagagg

SEQ ID NO: 419 - DNA, 1766 bp, Homo sapiens
ggctggaaatggaagatgagaggatcctggacaacctgggggcagagggacttcatggctctgagtgggagtggagaagatggcattttggtggatgggtggaggaagagcataggcacagatggccacgtggagtgtggtccacagataagtcacctggtggagtgcagccacagtgcctgagtcaggaggtctcagctcttgtttcaggaacacagtcatccctcagaaatggattgggtgacaagtggtctgcatgctgcacacgggcactgggtgagtgtgcttggagctgtttgtcaggacatcattagcaatagacagaacacgagggaagtaatcagtgaaagaagacgaagttgttaagttgtttctgactttatctttggagcgggctcacagaacatttgagtgggctttttagtataagagaaagagccctacacttttgcccaattctagttctaggctccaaaacaaattttactagggttctgaactgacgggttagactgtttttgttaacttttattcttataaatatttttggccattgcagtccaatcagaagaaaagtagaaagcaggtcatttttaccttctctaagaaaagaaatccaaaatttacaagaaagcccattcttgaaagtcccttgtgctgctaggcagggcctttcgattattttcagacagatgttgaaccttcagaatttcctccgtgcatcggggtcactgactacttgtgtctaatgcaactctgcactaactagattgtgcgccgacctgtattttcactttcaaacctcatattccaacgttgctcaaggttgactgtcactgactgggcttttctttacgactgtacttatgaagaacaaatgtacttgtaaatgtttggggacttcaaatttagtttacaaatgtgtagtcctcattgaagattcgatttgtattatatttaggcaagttttctggctcttaatggggtcctaatgagtcaccgatggtaaggcttcagattcagaccttcctgttaggatggggatgagctgtttgtcctcatttgccaattatttggaagagaaaaccaatgtaatgcaatcggaatccagttgtattattaagacccgcatttgaaacctagtttcttctatcagaagtaatttttctgatttttggattatgtacttctccttcatataaatgaatgttactgcttttgtggtgttaccagacctagcttatagaaataaatgacaggccacctgggggtctgcccgtgcaagcatgaactaagcagcaacaagcagtatgccctgcggtgaccagtgtgtcagcattcacataagcccgggacagtgaatgcgggcccttgtcagtcacgggcatcaggcgcatggcactgggcacagctgactgcctgttgatgctgatggctggatggctgcatttaagtacactttcacaaaactcatttgtatctcttcccgaagaaacctaaatggaattaatttgttggagggctgcaatgtaaaatttttaaatagagaacaaaatggagtatgttgctgtttcatggaagagaacatgggagaaactagcaatctgtaagctaaaaattgatggcagcccctgccacaatgaataattggcaatgccattcagcctttaaaggtatcagataatgaatgagctgggcataaggcatctagttcccttccattattctccaataggttatgtaataaacatccatccctgaaagat

SEQ ID NO: 420 - DNA, 2084 bp, Homo sapiens
tgttttgctctgctggctctttaaagatggatagttgctcaatgtagcagtgatgttcttggaattgctgagaaatttggggagggcaaaagataggggtagaattttttcattatttccctttatctaatacttttaaatagaaccaacacagcctatatgagttcaggcaatatttagatgtggtatctccatctgtctcctgtaaaagataagaattttcaagaacaggattacgtggaaaaccaaaagatcttcccttactctcctataaatgttttgttccaaatgtttttatatatgggctctagggagtcaggtagttcattgtttcggtgtactattgataggacacagaaagggagagagggtaaagaaatgtatcgctctctgaatattgcatcaaaaatgattaggttgcagaacttcatgaaagctttactaataatcttattgttctgacattatgtaaaggtggtattaatattgtatgacttgtcaaagtgctagataggtttataagtaggtagtagggatgttgaagattagagcacttgaaacagaagttctgggaaaacaaggtgtgtgtaatggaacaccactttgagcacagaaacaaaggtcccttggacctggtagggaagatgtgatttatgattgtttctgtgtccctgtatctgcccaccctgcacagggctccaccacccagggccaccttctggtttaaacccaggacactgtcaaaaagttaagaccccaaaactaatttactgtaaaaaacattgaggactgctgcagagttttcccttgttttctttgtgtacttgttcatcattgtataagttagccacagcttcacaagagcagcttaaggcttctttcataaattggcagtggcattgagttctcaaacattatatcccaaagtctgcaggcagacagctggatacagcgctgtgtataaatgagacgtccaaacacttgagtttcttaagattgggatctctttcaaatgaaaaaggacagagccaagtagagaaaagactttgtgctcccacccagccttaatgagtctcatggtctaaaagtataggaagaaatgaaatgcactttcagaagctaaaatgacagtgtctgctacaaaaggctgtagttgtaggcagtcggggatgccatgtccttggttccattcctgcgtgagtctgcagaaggcacacactttgtaagagtagagtggactagtgccagcctgaataggtttaaaactgcaaacagttggagaacatggaacaggttggtgcaggaagcctaagattttgcaatcatattataacattggcttttgacaacataaatgttgtatcttccctaaggtcaggtcggggaaagaaagacttccagcttcttacctctgcgtgcatgggcacgtgtgcattgctcagtccgcaggaggtctcactccacaggaaacgctctcctcccgcataagtctgtacttccatcccctcatctgtggtagtagtgaaggctaggtgagtaagcgtgggctgttctacccaccagaagtccaggagctgttgtatacctcatttctaactcgtgaccgagtgacttgctttaactttctcgaaatcctacagagttgccaagtctgccctccctcctcagtcatgttaaactctggcctatagcatcatgggacctgtagcctagggtgggaccccctaaagcctctgaatgtcgctgcttaaaagctactgcaaactgagggcaaattgcaatcttctattcctttttgttgcaaggggtcttcacaggtctcttaacatctgctttccctgccaccctgcctttaggggctggccagctatccacacccctaacccaccctgtgtttctgacagctggccacacgtcaacttctgtacttgccttttccttggtggggtagaggccaaccccttctcctctgaggcctcagggttctgtttcttttcaggactttgggtagaagggaagacaccaaaggctcctttaagctgactgctgcatacacatttcactttttttcctttgacatgacc

SEQ ID NO: 421 - DNA, 2009 bp, Homo sapiens
agcttcctggggagaagcacggaccgcgcacctctgagctgccagggtggggacgctgccctagcgggatctgaagggattttgaaaggaatcatgtcttcagcctggaagactccccgtggatcagatgcaatgcctgagatcatggtgaaaatcattggaagtaaacactttcaatacctcgtggagaagccaaagatcaaggagaatgacagcttgaaaacagaaacccaaacaatgcaccagaaaccaatgactgataatgcaaggcagatgagcagagacaccccagttcccattaacttcactgatcagcaaaccactgataatccagatgatgtgaaagagaaaaagcacccagagaacaaccagaaatcaggaaacaaccagaaactactaacaggggcaaacagtagcagattcctggatggcaatattcccagtcaagcaaatgtccactgcagctctgtaccaaccggagaccagtccttatcctatgtgcatggcattcccaggagaaagcttagagactggtccttggaacagatggtgagaggcagctctgaccaacctgaggatattggccagagcccaagtgggacaacaaatgaagacgcttttcttcttgccctggtcagaagagaactcaagtcacgtcctttgagttccaacttattagaaaagcttcagaaagagctgaagatcctggacccaatctcttcaggatttcttctccaatctcagctgagccgcctctttttgaagcatgaagtccctctacagttaccaacagttaaaatcctttgtcagagattttctaagaggggttctcctgaaatggtgaattatgaaaagctactctggtttttaaacagtgcagcatcagattatccacagcaaaataaagcagctgcagacctgagaaaaactgagagtcatggcactcatagccaaagcactccacctcagcactccagctcacagccagaagtgaacaggagtctgttggagattttgaagatggcactaaggacaaccaatggcagactcaacatagacaatctcaatctgagttttcgaaaagaagatcgctcgttctctggctgcctccctctacctaaggtcagggctatatgtgggaagcatggattatatctgaccctgagcctgctggaaacattgcttaaccatcaagatttgggttaccaaaatgaaataaaatggcagaattttgttgagatgctgaccagagcttcttctgatttgttatctgatttgcctacagggaagaatgaaaagaaagcccctgcccctccaatggagcctgaagtccccgagatgtctcaaagcaaaactgaacatatgaaaactccagaagaggagctgcagccagaaagctctcctgctgaaacttcagcctgcaaagatcctctgaaacctttaaagatcaggccagtctcccagcccttcgtgaatccagctgtgaagaacaaggctgaggaatgtgagacgtggatagacaggttcaggaagctggaaaatgccctctacctgtgtgatctgagtaacacaggagttctggagaaggaacgagccagacgcctcattcacaactacaatctcatttacaacctgtccctgagccctcagaaaatcgaccaggccttgcgcagattccgttcgggagaaaatatgctcttggagccagcactgcggtacttaaaggagctatgataacaagcccatattgtgagaacagatgtttcccttatctccctttttacccagacacatgtttctccccagcctaagtgtattggcggaggcattgtcagagtggaggccgatgcagctattgtagatgcttttgatttggacttagtttctggctatgatgctcactcataagcagttcaaagtgatcagaggaaacctagttttatcttttgatgtggcaagaacccagctacttagaatctccttctgttttaataaaacttattattaat

SEQ ID NO: 422 - DNA, 1748 bp, Homo sapiens
ttagagacacttcctgtggcagagaaaagaggtagtgagcggtgtttcaggatgtgagggcccgcaggagccgagtcaggctctctccactgcctgcccgccaccgtgcaagctctggccggcgctgcccacagtccccatggtgggcagcccccgcggcggggacccctgatcggcagcggcatgccagggaagcccaagcacctgggcgtccccaacgggcgcatggttctggctgtgtcagatggagagctgagcagcacgacggggccccagggccagggcgagggccgcggcagctctctcagcatccacagcctccccagtggtcccagcagccccttcctagccttcgtcagcagcaaatctgagagccaccggaagagccttgggagcacggagggtgaaagtgaaagccggccagggaagtactgctgtgtgtacctgcccgatggcacagcctccttggccctggccagacctggcctcaccatccgagacatgctggcagggatctgtgagaaacgaggcctctctctacctgacatcaaggtctacctggtgggcaatgaacagaaggccctggtcctggatcaggactgcaccgtgctggcggatcaggaagtgcggctggaaaacaggatcaccttcgagctggagctgacggcgctggagcgcgtggtacgaatctcagccaagcccaccaagcggctgcaggaggcgctgcagcccattctggagaagcgcggcttgagcccgctagaggtggtgctgcaccggccaggcgagaaacagcctctggatctggggaagctagtgagctcggtggcggcccagagactggttttggacactcttccaggtgtgaagatctccaaagcccgtgacaaatctccctgccgcagccagggctgcccacctagaactcaggataaggccacccatccccctccagcgtcccccagttctctggtgaaggtgcccagtagtgccactggaaagcggcagacctgtgacatcgaaggcctggtggagctgctgaaccgggtgcagagcagcggggcccacgaccagaggggccttctgaggaaagaggacctggtacttccagaatttctgcagctgcccgcccaagggcccagctccgaggagaccccaccacagaccaaatcagcagcccagcccatcgggggatccttgaactccaccaccgactcagccctctgacagctacccaacagtccaggacagctgcatggcacccggcgggccgagcatgccatgggtccgctctgcatgccctgtctgtgccatgagtgtccctggccccttcctgccatgggcaggcccgcaggaagagccggtaggggtggaaaggggactcagatgagacacaccccacagctgccaccgccttgtccctcaacaagctcacccccaatcccttgcagccaggccacaatgggggaggtgagtccagccccttggaacaggcttgcccaacatggagggatggcgttggcagtgccagcctccccagcctgtgccaagcttcaacaggggcaagaggaggggccggcccctcctcaggaagctggtatgagtaaggccttgagggtgcaggcaggcagccctgtaccccacccacatagactatactgtacatacagattttgcagtaggcttggggcagctgggtttgtccttgatgtatgatactgttattataataattattattattctgc

SEQ ID NO: 423 - DNA, 2298 bp, Homo sapiens
atgattgcgggcagcgggacgcgcgcgcacgctcgggcccggctctgggacccctggctgatcgacggtccctgcagtccccgcaacctggtgcccgcagccccgagcgcgccgcggacagcggtcaggctctccaggctcgtccccgcggggaacagtgtgcgctgcggagctctcgacgcggccccgggacagcgctcggggccgacggtggcagcgggcttcccccagggcggagcgcgcgcacgggcaaccccgcggcggcttccaggacaccgccggccccgcggagcaaggggtgcccagaggggtgggagtccggactcggcacacgggagccggccggcggaggcaggggtcagcgcacagtgccgggagatgtaagaggggcgcgcaaggtgcctggaggagttgggttggggggtggttcacggtgcccggggaggcgtgggatgggcaggggcgcggtgcctggagccgctgcccagctccgagcgcgctctcttccttcccggtggcaacaacttcctgcttccccgactcagggcacaggagcttcggggagaagttcaaggccacagctttgctctctcggagcccgatggcgacactgctggccccgggccacacggttccctcccaggccctcccggtggttgagaccggccggcctctagggtccggacacgggttagaatgccaaggaggccgcggcgtcttttcccgcccgctccacagaggcgcctgagtggttcccaaaccgcagaggggccggcctgggcctccggctctcggggacgcacgcggacacagagtcactattcgcagaccccgtccccctgcccgagcatgccctggcccagagccgcatggagctgatgtccccagacgcctgcgacggccctttggcggccagggcccgagagaaacaaggcctcccgggtcccaacccaatgtctgtctgtgcctgtctccccccaaccccccgccgccggccttggcattctaaccagtgtcccttgacgtcacatctcgccatttctgccaaccaattgaaacttgcccgttgtcataaaaatatatatactttttatgccattggtaaattcaaaagttcctcgtgtgccctgcttcccaggaaacttcatttcacattggattagactgcccaggagggcaacgctgggctggggcagccgggcaactctgccagggcctcgctgcccactgagctgccttccacagctcgctagacccccatgattgtggctgtgaattgtgccagccaccctgataaacacaccactgcctccaccccatgacacacggaatttggggggagggaaggaagaactcagggtatgttaagaaaccttcccaattgctttcctgggagttggggcggtggggactggaatcttactacagcatcttctttttagaagctgaaagaactttagggatagctttattatttttttttctatgggaaaactcagttttagaaaatggagtagaaatgttttccaattaatcttttcattggaatccggaccaactttcactttccatagctgcctggtggcttcactatcgagtggggtgccctcttttcctgaggaaggtcctgtgtctccccctcaccccccagctccaagggctgtggggcccagagctggaagctcaggagctctgtgcttccccagaaaagggcacggctctctcggcagcctgagacgcagacatgccgtgtctaccttctagcaatacagcaggggaaatcaatcctgtctagcacagtgctttatcattttctttcttcactattaaaattttcagccccaaataggaagtgtggggtgagagcacacattcccacaggatgagtctgtgcccagcagtgcccaaagtcccacatatgcccctgtagcccctcctaacccagccacactaaggcagaactcaaccgctaactgctctataaactcctcctgtaccccatcgttgctgtatggttcaactactttaaaaaacatactacagatattttgtggtttagcaagtttagggactccagaagaacaaaaatgctttagaaactgagatgaatgcagagatctaaacatcataagcaccaggccttttaatatggaatcttgtttttccaaaataatgaacacagccggtaacgaccaaatggggattctgaacataaatatatggttactattctcaataaaactgttctcaagggcaatctctagaaatgatgcatacctcggagatacacgttcaagc

SEQ ID NO: 424 - DNA, 1964 bp, Homo sapiens
tttacagatgtgacctcgaatccttggggattcttggaaaatgggcaaggtgccaaaagaggagaactggccaggccttcaaaactaaaacaccagagaattacagacagcgaacttgcccctaagccctcgttgtgggtttgtgtttgagcatttaggagaggactccagtgctcctcagcgacagacacagctgcctctgcggtgtctgaaggccctggtcgtggtgacgctagatggccgccctgggcgcctcctgtgggcgtagaggcatcaccactctgcactggcagactcagcatggagttggagcagagtctgacacgagcacttgccatcccaggcgtttcagttctgactgagaaggtagatgcacaggggaggagagggccctttcgagctccactctgcctccaccactcattccctaaccccgcagcctcagcgccctcatctgtaaaatggggagttttgcctacagggttcagcacaatgccagcctgacataggaaccccagtggattgtcagttttgccattatcccctgcatcctggaggtgacaccgcctggttaataggcaacactcccgacggcccagcacagccccagggcagcaggaggctggcctgtggccaagaatgcatggtggagggggcctggagggggactgcagctcctcctcttcctgcttcctccctgctccaccccgtgcctagggcagcacaaaagccaatcgctagcaaactccctgcctagcaaggcccagcctggggcagaaatggctgcaagtggccgaggtctctgcaaggctgtggccgcctctcccttcccggcgtggagacgagataacacggaagccaggggaggtctgaagcctgagtatgatgcggtggtgataggagcaggtaaagtggtaaagcaggccgggccagagctgaggggcgggaagacagccctgctcagagcttggtggggagggggagggggagccaagccccactgctctctcctctggcataacccagccagaagtttatacgctagcagaggctgcaatggaaagcccttccatctggcaggcaggcacctgggattccggtgctggctctgctgtgtggcctggggcaaatgcttgccttctctgggcttggatcttcccatggagaatgacaggaagactaggtgagctcaggggtttccctatatctcttgcaaagtgacctagtttccaccacattctcagcctatggtttgtaagggttggaaagagccctgggccaacagacaagtgaaatccagcaccccgccccctcagtgccctgagttctggtcaccactaccttaccactgaggccacccctcgtcacaagaaactgcagtcatttcataaaggccagttaggataaaacagaactgagtcccagagttcctactgcgtgtctgcagagggagatggaccccattgccttgcagctctgggacatttggggatctgcagtgatctgccacactttgccaacccctgggctcagagtatcacagtctactgggtgctaggggaagaggcaggcccaggaccaggtggtctttccttagtgccttcctttcacacttgcagagggccccaaatgcatgattgccaactgggtctatacagagataatgacgggaccgaaagcagacggcactcaacatgcagctttgagggcatgccttcattttcatatgtactagagcagttgcgagctggtagatactcaacactcacctctccagggaaaaatgtgtgatgtatgtgtgtgtgtacatgtatatatatgtatatatacacacatatatgtgtatatatatgtatatgtgttacgtacatatatatacacatatacacatgcttattttaaatattgaaataaaagatacactgcacacaattttacaaataaagatacaatactctcaattt

SEQ ID NO: 425 - DNA, 2035 bp, Homo sapiens
gctccctcggccgggcggcggtgactgtgcaccgacgtcggcgcgggctgcaccgccgcgtccgcccgcccgccagcatggccaccaccgccacctgcacccgtttcaccgacgactaccagctcttcgaggagcttggcaagtgtgtgaagaaaacctccacgcaggagtacgcagcaaaaatcatcaataccaagaaattgtctgcccgggatcaccagaaactagaacgtgaggctcggatatgtcgacttctgaaacatccaaacatcgtgcgcctccatgacagtatttctgaagaagggtttcactacctcgtgtttgaccttgttaccggcggggagctgtttgaagacattgtggccagagagtactacagtgaagcagatgccagccactgtatacatcagattctggagagtgttaaccacatccaccagcatgacatcgtccacagggacctgaagcctgagaacctgctgctggcgagtaaatgcaagggtgccgccgtcaagctggctgattttggcctagccatcgaagtacagggagagcagcaggcttggtttggttttgctggcaccccaggttacttgtcccctgaggtcttgaggaaagatccctatggaaaacctgtggatatctgggcctgcggggtcatcctgtatatcctcctggtgggctatcctcccttctgggatgaggatcagcacaagctgtatcagcagatcaaggctggagcctatgatttcccatcaccagaatgggacacggtaactcctgaagccaagaacttgatcaaccagatgctgaccataaacccagcaaagcgcatcacggctgaccaggctctcaagcacccgtgggtctgtcaacgatccacggtggcatccatgatgcatcgtcaggagactgtggagtgtttgcgcaagttcaatgcccggagaaaactgaagggtgccatcctcacgaccatgcttgtctccaggaacttctcagctgccaaaagcctattgaacaagaagtcggatggcggtgtcaagccacagagcaacaacaaaaacagtctcgtaagcccagcccaagagcccgcgcccttgcagacggccatggagccacaaaccactgtggtacacaacgctacagatgggatcaagggctccacagagagctgcaacaccaccacagaagatgaggacctcaaagctgccccgctccgcactgggaatggcagcccggtgcctgaaggacggagctcccgggacagaacagccccctctgcaggcatgcagccccagccttctctctgctcctcagccatgcgaaaacaggagatcattaagattacagaacagctgattgaagccatcaacaatggggactttgaggcctacacgaagatttgtgatccaggcctcacttcctttgagcctgaggcccttggtaacctcgtggaggggatggatttccataagttttactttgagaatcgtgagtgggttcgtgctgctgatatactcctgcctgcccctttacccctttgtctctgtctcctgctcaccttctcatcccagttgcccacttttcccttatttgaccttcgtgctgcactcctactctgtatgcttgtccccttgtgccccgatggttgtagacaggcacctttgaaggccctgctcctgagctccaagtgccattcattctgcagctgctttgtggcagtgccagtcaccacaatcaagctcacttatttcttgccgggcgcggtggcttacgcctgtaatcccaacactttgggaggctgaggctggcggatcacgaggtcaggagatcgaggccatcctggctaacacggtgaaaccccatctctactaaaaatacaaaaaattagccgggcttggtggcagtgcctgtagtcccagctactcgggtggctgaggcaggagaatgatgtgaacctgggaggcagagcttgcagtgagccaagatcaggccactgcactccagcctgggcaacagagcaagactccatctc

SEQ ID NO: 426 - DNA, 2492 bp, Homo sapiens
caaatgcttcggggagctgcgatgctgagataacccggctcctccaggctgcctcatctcagcgattatcctgaaggagcacccgcccttcaggtgtcccagaagctgcttgtcaggccaggaagacagcagccctgatgatcagttcttcctaaagccatccggctcctggggagaggcaggtgggactccagaactcacagagcttttgggaggagaaagaggaggccggagaagcaaagggctttacagcaagagagtggtcagtcgcagccactggggaaaagcccagagggagggcaggggcgggaggagtgggcagaggatggaggcccagcccgggaagaaagtgggaaagggtgaccgggtttttggggtggggttgaacgtgatgcttacgtttccagaggaatcttggcctgtccccacgcaggggacagggaggtgcctagaagcagcagccacaggagggccgaggtcttctgcacaaaggcccaggccacgggcattggctggaggggaatccagcggctgctggagctggggtttgcgaggaagttgggagttgcaggcatggtgggcctggggttggggaggggaaggagggcagagcagccacagaccatgagctctgtctgccttcctcccagaccccaggacgccccaggcctttgtcttccgtgccttggcgagcctggggtctccagcctctcagtcctgggtggggagggcttctctctgccccacagctgcagctcacagaagagtcgccccacctagcaagcaggcctcggagacagggactgggggagaggctgtggcaacatgaaaccctttaatccgctggcctctcctctaatcctctcctgacagcagggagggggtggcagggggtggggagctgcctcccaagattaccacaactgcagctggttccctcagggctatagtgcacccctctgctttaaagaggcagccccgttcctgtggaaccaccttctggacccaggaagggcttgctgtgactatggctagaggacagcagctgagtttgcacagtactctgattgacccacaaatctcttgttgaccctgaggtgggggtgtgtcctcatccctgcttggcagaggctcttgaggcccggggagtcccaggggcagagctgggactctggctggtgtttccaggcctggtgcctttgggacaggtcataggtcataggtgaagtcagtggacccacgcctccacatctcagctgctcgtgggcggggctggggacgcatttgctgtgcaactgatgaagcttcgggacccctgaatccacagactcccccctttcccggagaggccctagcaatgtgttcctgtggccaaatgtttttgtaaaatatgcaaaagttgagatagtttaaccataaccggttgagactgtctgtctctttccatcccaacttctcttccgtctgatggactcttagttggatgatgtttgggtggctgagggcacttgggggatccagttaagaggaaagtgagctggggaaacacttaatctgggcttagtgggatatgctgacatggttcacagtgacttctttgtacagagaagttacctccagctgagtgtaggcagggcttccaggaacactcatcccacaggacatcccaccagcagatgcagcaagagaggctgggccgtgatgtgagcgcatgctgtcacacccaccctggccatgtgtggtggggagggcaaagtaacagtcaggagctcatctgcagaaaatctacaaaaagccacacaggtaacatcgttggtggaggatttggttctcaccaaggcctggccaggacagaagttctctcctgttaggaaaatagtggatattgaaagaatataattacaccgtacattgctttgtgttctgatgagagttacacaaattagaattgatcaaaattcttgtgttgtgagcccaaaccagtagtagtaccacatgggttctccgggggtgaagtcatagattttatgcagtccccgtatcagattattttcttagtgtaactggtgcactgtgtcttcacaaaatctggtggttccagcaaaatggtaagcaaaattgccaccaacgcagagaaatgcttgcagaagcaagtgttctgatgacaaaactcctacacagattcatcaataagtcagtgctgtagtatcagagtaatctggtggcacagttttgtggctgaatacaatgtattttttaaaggcatctaaatgattcctatgaatgccttaatttcacataaattttgtacatgttttgaggattacaaatcaaacacatttagaaaaaatactacagaggcacactgggcagtcaatacataaaaagaatgtaacttctctaggttttgtgaatttggtggaattcaccagcttcttaaaatttgtaatttggaatgatttttaaaactgaataaatattcaccttttttc

SEQ ID NO: 427 - DNA, 3491 bp, Homo sapiens
cctcgtgtgcagtgcttagaccttcttgccacacatcccgtccctcacctcactggatagcccccgaatcaactgttcacacgaaagcagctgcctggttctgagtggccatgctcactcccaagcgcaggctgaatgaaaagaaaactgtgcaagtagcttgtatggtgggaagcccccagcagaggctgagggtgcagccaggtgctctggaagccttgaggcctctggtgtcatcttcctcacctctaaataagagatgggctaggttggtcaaggtcctccctgtcctaaaacactttaatgaaatggaagaaaggctgcaggctgatagaggagggacagtctggtttggttccctcaagtcttcaggagagggctcaaggacagtctcccatttcttgttggcaaaatgtaaagtgcagtctggaccctgtccattgagtagagactcaggaggccaaccaagatccctgaaaagctaacagcgtggtcagccttcccacagacagtgcacccaccgtgggaggacacttcgccccccattgttaacgtccaccgcgcccagactcccacagcgagctccttcccttcctccccatgtttgcagtggagttcccactcgagaagacagcacagtagcaagtagaggctggtcctgggacactcgcacccatgtgtgtcaggaagcccctgcggtcacacggcccatgaggaagccagaggggctgctggggctgatgaggccagggcagggcggcctgctcttccataaatgacagctggcaccaaagcccagagctggcagcctccacctgaggagtggcatctccatgaacggcttgtgttctcgcacagccccattgcgtagatgaggaaactgaagctcagagaggttcctgcccttgcccaaggccacacagccggatgagctagaaaggtgctaggggactgggaggtgggggagctgagacgctgtcccgctgctgccaggatgcggccgccccccgtgccagccaggcctgcctcctccctctgtccggctcagcagccccggcctcctgttgctcccagtccgagctatggccaagggagactgattcctgctcaccctgggagagagctcaggattttgtctcaaaaccttataaaagatacgaggctcgacattttactaaggccgaggactcttgatctcccagacagatcctagaaccacagggcacatgtgaccagaatccaatctgtgcaaatcaatcagcaaaaggagcccccagcaaaggcgcaggccggggcctccggggaccggcacctacacagcgcacagccccccagggtccgagtcctccaaacccgtgtaggcaggagcctccttaccttgatttgcttgatgtttgctaatcttctcttgaacaccccacagcgtgaaggtaagcaactgttccctaaacgacttagatccttaaaatatgtgtggttgggccgcatatctcatgagagagcctccgcccaaaccagagccctcctctctctgcggccaacaccctggtagacctgggggagcagcctctcccgcccccaccccctcagcgtggtgctggcccgtggctcctgaaccactcaccagtccagtccggggcctgggcccttccccggggccctggtggcagctcccagtggctcaagcagcgtgcccagcaccgcgggtggaggttgagctccgtggtcttctcttgcagggggccgaaggccagagaccaggatttggctacggaggcagagcgtccgactataaatcggctcacaagggattcaagggagtcgatgcccagggcacgctttccaaaatttttaagctgggaggaagagatagtcgctctggatcacccatggctagacgctgaaaacccacctggttccggaatcctgtcctcagcttcttaatataactgccttaaaactttaatcccacttgcccctgttacctaattagagcagatgacccctcccctaatgcctgcggagttgtgcacgtagtagggtcaggccacggcagcctaccggcaatttccggccaacagttaaatgagaacatgaaaacagaaaacggttaaaactgtccctttctgtgtgaagatcacgttccttcccccgcaatgtgcccccagacgcacgtgggtcttcagggggccaggtgcacagacgtccctccacgttcacccctccacccttggactttcttttcgccgtggctgcggcacccttgcgcttttgctggtcactgccatggaggcacacagctgcagagacagagaggacgtgggcggcagagaggactgttgacatccaagcttcctttgtttttttttcctgtccttctctcacctcctaaagtagacttcatttttcctaacaggattagacagtcaaggagtggcttactacatgtgggagcttttggtatgtgacatgcgggctgggcagctgttagagtccaacgtggggcagcacagagagggggccacctccccaggccgtggctgcccacacaccccaattagctgaattcgcgtgtggcagagggaggaaaaggaggcaaacgtgggctgggcaatggcctcacataggaaacagggtcttcctggagatttggtgatggagatgtcaagcaggtggcctctggacgtcaccgttgccctgcatggtggccccagagcagcctctatgaacaacctcgtttccaaaccacagcccacagccggagagtccaggaagacttgcgcactcagagcagaagggtaggagtcctctagacagcctcgcagccgcgccagacgcccatagacactggctgtgaccgggcgtgctggcagcggcagtgcacagtggccagcactaaccctccctgagaagataaccggctcattcacttcctcccagaagacgcgtggtagcgagtaggcacaggcgtgcacctgctcccgaattactcaccgagacacacgggctgagcagacggccccgtggatggagacaaagagctcttctgaccatatccttcttaacacccgctggcatctcctttcgcgcctccctccctaacctactgacccaccttttgattttagcgcacctgtgattgataggccttccaaagagtcccacgctggcatcaccctccccgaggacggagatgaggagtagtcagcgtgatgccaaaacgcgtcttcttaatccaattctaattctgaatgtttcgtgtgggcttaataccatgtctattaatatatagcctcgatgatgagagagttacaaagaacaaaactccagacacaaacctccaaatttttcagcagaagcactctgcgtcgctgagctgaggtcggctctgcgatccatacgtggccgcacccacacagcacgtgctgtgacgatggctgaacggaaagtgtacactgttcctgaatattgaaataaaacaataaactttt

SEQ ID NO: 428 - DNA, 3494 bp, Homo sapiens
ttgaaactctgtacccattaaacaataactccccacttcaccctccctccagcccctggtaactgctatcctactttctactttctgtctctatggatttgactattctaggtactagataagtgagagactaattgttctttttttttttttttaagttcattgatctagctttcaaattccacattgcaaccaatctttaagaaacaaccacttgttggattctgatgtagtaccaaagaaaaatatccacagttagctgaaaagtttgttaaaatactcttccttttacaactacatatctgtgtaaggttagattttcgttatatacttcaaccagcacgacatatcacgacagattgaatgcaaaaatcacatatgagaatcctgctgtcttctattcagtcagacattaaagatttgcaaagatgtaaatcagtgccactcttctcactaaattgttttggaaaacagttacctttttctaaaatattatttgcgttaacatataatagatatattatttgtgttaacatatgttatttgttaaatgaataaatattttaaaatttttgccgttctaattctaatacagtaaatattgataggtataatccactttggggtcttgaatacatagtaagagtgtaaagaggtcctgaaaccaaagactttggagtagggtataaaagcccagattggaagctctgacctggaaggacaacacagttctagtcctgactgccacgaacatgctgaatggccttaagaaatgacttaacttctcaacatcctgtacttcatctgtaaaatttatctgcctagcctatgtcatagagttgttaccagaaacaaattagagaacaaacagttgtaactaagatttaaaagaaaagttatattgtgagagaaacgttgcttataaaatttggaattcaattagttgagccagtttgagttggttatattgcctataatcatgtaggtatttttttgttgttattatttttgtttgtttggttgggtttgtttttgtttttgtttttgttttgacagagtcttgctctgtctcccaggctggagtgcagtggcgctgtctcggctcactgcaggctccacctgccgggttcacgccattctcctgcctcagcctcccgagtggctgggactacaggcccctgccaccacgcccggctaatttttttgtatttttagtagagacggggtttcacagtgttcgccaggatggtcttgatctcctgacttcgtgatccgcccgcctcggcctccccaagtgctggcattacaggtgtgagccaccgcgcccggctggttggtttgttttgtttttgggacggggtctcgctctgtctctcagtctggagtgcagtggtgcggtcttggctcgctgcaacctccgcctcccaggttcgggtgattctccctgccttgagcctcctgagtagctgggattacaggcacctgccaccaccatttgtttgttttattgagacagtctcgctctgttgcccaggctggagtgcagtggcgcggtctcggctcgctgcagcctccgcctcccaggttcagggatcctcatgcatcagcctcccaagtagctgggactgcagggggcgtgtcgtcgcacccggctaatttctgtatttttagtagagacgaggtttcaccatgttggccaggctggtctcgaacccctgacctcgggcggtccatctgccttggcctcccgaagtgctgggattacaggcgtgagccactgtgcctggcctcagggcacaagagactatagtccccggcagatggcagttcgcgagaaggtgtttgacgtaatcatccgttgcttcaagcgccacggtgcagaagtcattgatacacctgtatttgaactaaaggaaacactgatgggaaagtatggggaagactccaagcttatctatgacctgaaggaccagggcggggagctcctgtcccttcgctatgacctcactgttccttttgctcggtatttggcaatgaataaactgaccaacattaaacgctaccacatagcaaaggtatatcggcgggataacccagccatgacccgtggccgataccgggaattctaccagtgtgattttgacattgctgggaactttgatcccatgatccctgatgcagagtgcctgaagatcatgtgcgagatcctgagttcacttcagataggcgacttcctggtcaaggtaaacgatcgacgcattctagatgggatgtttgctatctgtggtgtttctgacagcaagttccgtaccatctgctcctcagtagacaagctggacaaggtgtcctgggaagaggtgaagaatgagatggtgggagagaagggccttgcacctgaggtggctgaccgcattggggactatgtccagcaacatggtggggtatccctggtggaacagctgctccaggatcctaaactatcccaaaacaagcaggccttggagggcctgggagacctgaagttgctctttgagtacctgaccctatttggcattgatgacaaaatctcctttgacctgagccttgctcgagggctggattactacactggggtgatctatgaggcagtgctgctacagaccccagcccaggcaggggaagagcccctgggtgtgggcagtgtggctgctggaggacgctatgatgggctagtgggcatgttcgaccccaaagggcgcaaggtgccatgtgtggggctcagcattggggtggagcggattttctccatcgtggaacagagactagaggctttggaggagaagatacggaccacggagacacaggtgcttgtggcatctgcacagaagaagctgctagaggaaagactaaagcttgtctcagaactgtgggatgctgggatcaaggctgagctgctgtacaagaagaacccaaagctactgaaccagttacagtactgtgaggaggcaggcatcccactggtggctatcatcggcgagcaggaactcaaggatggggtcatcaagctccgttcagtgacgagcagggaagaggtggatgtccgaagagaagaccttgtggaggaaatcaaaaggagaacaggccagcccctctgcatctgctgaactgaacaaactatcagaggaaaggaagtgggactggcactatttgaggttaagacaaactgcatatgtacttcaattgctttgcacttttccgtttcagcggaagacctgaagagtggtcagaacagagcctttgatttttattatggttattttattgattattactggcaaaaacggccaggtacaacacctttttcatacaaggcccaggaggcttagtccagtctgtgctcctgggctacaaggacccagcctgagatggtcccatctgcagggccccgtaccagttggagcagatgcctccccaccaccaattgccaaaggtccaataaaatgcctcaaccacgg

SEQ ID NO: 429 - DNA, 2646 bp, Homo sapiens
actctctgcccttgcagagctcactggaggaataaacctttgtagaggaaggtttgatgggctttcctggaagaagtactcataggaaaacccaaaagctcaacagatgctgtctccttggttaacattaggagctatgatctccatcttcccatggcattagaggtttagatactgaggatcagagaggcaagttcagcatcagaaggcaggaagaggcagaaatctggacaccgattcctaactctaaagctgcgtcatctctagtgcatctcatcagctcttcccaatggcaccaatcaactttagcatactggccagccggaatagatgtccttgggcattcttaagatctgagactgtgatggttaattttagggtatcagcttgactgggttgaggaatgcctcagtggctggtggcgtccatcattcctgggtgtgtctgtgagagtgtttccagaggagactcacatgtgagccagcgggctgagaaggagacccgttctcagtgtgagtgtgcactgtccaatcagctcaaggccaggctggggacaaacaggcagaagaaggaggattctctctcccacctttcaggagcaggatgccttttctccttggacatcagactacagggtctttggcttttggattctaggacttgtaccaatggcctcccggggccctcaggccttcagcctccaacgaaggtctgtgctgttggcctccctgattctgaggcttctggacttggactgaggcatgctacgggcttctctgattctccagcttgtggatggcctatcatgggacttctccacctctgtaatcacaagggccaatgccccctaatacctttcttttcatatatcctactggttctgtctgcctggggaaccttgactaatacagatatggagcatttgaaatgagaggatttctgatcctgttcttcaagaagcagtaggtcagagcatacctctttaaaataacttctggatagtttcacagttagaaagaatcagcttcaggtgatcttgaagatcccacttggattccactctccagctctcaggaagctctggcttccttacttcttctgggattttcctttcatgctggggagagatgctccctcaccactacccagcccatgggacacaccgagtctggtggaggatgctgtgacctgtggtgcttgtgattgcgtcttactgtgtcgcccagactgaagtgcagtggtacagtctcagctcactgcaacctcggcttcccaggctcaagcaatcctcctgcctcagtatcccaagtagctgggaaaacaggtaaaagggaagcaaaggaagaaagaagaaaagaagacaacccatgtaggatgttaaccaggtcactggttttattgtcacatgcttttaaaagaacatgcatgagtgagctgtctcactttccaatccaagaatgtttgattccactgtgatgaaaaattctgtgacctggcaggaaaacactacaagaagggcagaagcggaaaattctttctattttccaatatggctttctttgattcaagaaaggcctcctctcctccacatctctgtcctgctcatgaccccagaagatctcaggttgactgcatttgttctatgccttcctcaagcttcacctcttctgtgagcctcctgggtgggctccttctggctaaatcttcctcctcactgttgcctttttatcttatgcaagcacctgccttatctaaaggtacataccttttcatagaacacttgcctgtttacctagctatttccccatgactatgggctttttgagaggtgctgtgttatttatttatttatttatttatcattttgttttgagacggaatcttgctcttgttgctcaggttggagtgcaatggcgcgatcttggctcactgcaacctccgcctcccgggttcaagcgattctcctgcctcagcctcctgagtagctgggattacaggcacccaccaccatgcccagctacttttttttgtatttttagtagagaaagggtttcactatgttggccaggctggtctcgaactcctgacctcaggtgatccacccaccttggcctcccaaagtgttgggatcacaggcgtgagccaccttgcctggccactgtgttatttttttttacttctataccttcagcaccccaaacagtgcccaatacaaagttccacactaaatatttattgatggaataatgaatagggttgggggcactggcagggagggtgcccactgggctgaaattctggggcctgaatgcatcactcccttcgcctctggatgagaaaaaagagggacagtacccatgaggcccctagggaagccttctgcagaccaaaagacctctttgaacagagggcagaggaaacaggtctagagaaagtgaatgtgaagattcaggctttagaatgagccttgcagacctgctggcagtgacaagaattacctgtgtacagcaccttgtggttcccatgaccccatttagatctcatcatgaccctgttgggtggatgttattttctgctttacaggggagagaggccaaactcgtgatatgatctgtctgatatcacttacttaaacagttaagtggt

SEQ ID NO: 430 - DNA, 2681 bp, Homo sapiens
ggtccctgtctcaggacccctgagtctcggggccccaggagcccagggccaccagccgtggaggagccctggccttctgccttccacacccaatcccactccgtgctgctgggtccttctctacgacccaggctgcagtggctccacgggcgcaggccacacctgccatggagacagtgggcacagggcaggggaggtgggcgcacacagcctggctgccactgccatctcctgggcactgggggaactgcccccaccgccacacctgtgctctctgcagggggaaaagtgccaactcagacctggcgagctgagccactggggtctgaggggcccagatgccaccgtgagcagagccatgggggagatgcacagacacgcgtgtgaagcctgggggccctccttaccccttccctgccctctgtccccgccaactccaggccagccccaggagaggggctcagtggcgtctctggcacagaggagagggagtgtggccacctggacccctgcttctgggacagctgagcggcctttgagaaatgcagatcccccatccagactcaaacacaccctgcggctgcctctgctgcccctggagtttgggagcagcttcctcacccaaacccactcctgctctggtggccaagggggcagggacactcatgcggcatccctgctgccgcctagggctggagactgtccttagtaccctgagcagcacccagaatccaaagtctgtccccggaaagtgccctcagggccatgcggcgtctgacgtggcacagaagtggcctggatggggacacagaaccaaactgcactcatttcagccaagaaggctcctcttagcggcataagtctccctttctgttgccaggaaaagtgccctcccatcaagcaaggcttccgctaagcaaggctgcactgtgaggtccacacacacccaggcgatggaggggtgcgggctccgctcagcaccgcactgaactgagcccagcagcgcagtagggactggcttctccctgggaaaggcttcttgagaggctgaagctgcaggagagggtgatgagttgagaagctcagggtgggccctcctgggaggaccgcctgccctttctaacactgctggtcctcggaggccctcagccacttggcagctgcatcccccatacccgggacctccccgccaagttctcatttctccaatggcagccttcagagctgagaggccgagtcaagagggtgccatctcccaagttcccatgattcctggggagcgtctgtgtagctgcccacctggaccgaggtggtccccacactgaggccaattggttgggagtccggggttgacctgggcaggggacacatcaaaactgctcgaggccaagcgcggtggctcacgcctataatcccagcactttgggaggccaaggcaggtggatcacctgaggtcagaagtttgagaccagcctggccaacttggggaacccttgtctctaccaaaaatacaaaaatggttgggcgtggtggctcacacctgtaatcccagcaccttgggaggccaaggcaggtggatcacgaggtcaggagttcaagaccagcctggtcaagatggtgaaactccgtctctactaaaaatacaaaaattagccaggcgtggtggcgcgtgcctgtaatcccagcagctactcactcaggaggctgaggcaggagaatctcttgaacccggaaggcagaggttgcagtgagccaagatcgcgccactgaactccagcctgggtgacagagtgatactgtctcagaacagcaacaacaaaatgcccgctgctgctgggtccagaagagcttgaataactccatgttctttttctcaattttcatttcccagaactgggcacctccgggctgtgaaaagttagggaagtgtctgacacctccagaatccattcccaagaagtgcctctggtcccactagcacctgcgcagactcaggccaggcctagaatctccagttggccctgcaagtgcctggaggaaggatggctctggcctcggtcctcccccaaccctgcccaagccagacagacagcacctgcagacgcagggggactgcacaattccacctgcccaggacctgaccctggcgtgtgcttggccctcctcctcgcccacggcgcctcagatttcaggaccctcctcctcgcccacggcgcctcagacctcaggaccctgccgtctcacgcctttgtgaaccccaaatatctgagaccagtctcagtttattttgccaaggttaaggatgcacctgtgacagcctcaggaggtcctgacaacaggtgcccgaggtggctggggatacagtttgcctttatacatcttagggagacacaagatcagtatgtgtatggcgtacattggttcagtcagccttccactgaatacacgattgagtctggcccagtgaatccgcatttttatgtaaacagtaagggaacggggcaatcatataagcgtttgtctcaggggagccccagagggatgacttccagttccgtctgtcctttgtccacaaggaatttccctgggcgctaattatgagggaggcgtgtagcttcttatcattgtagctatgttatttagaaataaaacgggaggcaggtttgcctaattcccaggtt

SEQ ID NO: 431 - DNA, 2165 bp, Homo sapiens
acatgctctgtctggccctgtgaatcctcactcacccattcagatttctgttggtgtaaaacgacattccagctgctgaagctccgtgatctgctgtgtttttccagcccagatccaagagacctggatgctttttgccattctgatggtaaatgatgagacaggctaccatggatttcagcaccccttctgtgtttgatcagcaaagaggtgactcatctgaggaagttgacctgaccatggtttatcaagcagcctctaatggagatgtcaatgctctgactgcagtgattcgggaagacccttctatcctagaatgctgtgacagtgaaggatgcacgcccttgatgcatgcggtttctggacgtcaagcggacacagtgaagctgctgttgaagatgggagccaatattaacatgcaggatgcttatggccgcacaagtttatgcctggccacctacctgggctggcttgaaggctgtgtgagtctactcagaaacggtgccaagcacaatatcccagataaaaatggccgcctgccactgcatgctgccactgctgagcccgatatgaggctcctcacggtcctgttgcaacagtcgaacatcagcgagattaatcaccaggacaatgagggaatgacaccactccactgggcggctttccacaaccagcctcaacacacacaaatgctgctgaagaagggggcagaccccacccttgtggataaagactttaaaaccgctctccactgggcagtccagagtggaaataggattctgtgctccatcattctgagccatcaccaggggccgtccataatcaactatgatgatgagagtgggaagacatgtgtacatatcgcagcggcagcgggcttcagcgatattattcatgagctggcaagagtccctgagtgtaacctgcaggctctggatgtggatgacaggacacctctgcactgggctgcagctgcagggaaggccgaatgtgtccagtcactgctggagttgggaatggacagcaacctgcgggacatcaatgagagcacgcccttggcctatgccctgtactgcggtcacacggcgtgtgtcaaactcctctcccaagagagcagaacagagcctactcgaccccctccctcccagagcagtcggccccagaagaaggagagacggttcaacgtgctcaaccaaatattctgcaaaaacaagaaagaagagcagagagcccatcagaaggatcccagcagggaccgatacagagaggaggacacctcagaagtcaatgacatcatcaccacctttgatagcatcgtgggtaccaactgccaagaacagcctggtgatcaggtggctatggttgaatttaagaagaaaacctcagacaattcaaaatatctcttaccagaaaagaaaccgctggcccgtaaggggcttccaccaatcagaacgcagagtctcccacccatcaccctgggcaataacttcctaacagcctcccatagggccacttcccatgcaggcctgagctctgctcctcatcatatggcccagcgatctcagaaaagtcgaagtgagcaggatttattaaataacagaactggctgccagatgttactagataacccctggaagagtgattctaatcaggtattttcctacaaagtttggactgtgtcttcttctgataagctgctggacagattgctcagtgtccggcctggtcaccaagaggtctccgtgccaccacaccttcgccatctacataatccatcatcaggacaaaattttcagcatctttccccaaacagacacaaaatcagggatcttcctttcactcggaacaacctagctcccctaccagatcaaaaatttctatctggagaacctctgcggacaaaccgagtgcttcctgcaattccaagtcaacgaagacacagcacagcagcagaagagagtgaacattctgccaaccccaccagtgatgaaaattaactgtgggccactcgctgcagaaatgtagatgaatatgtattttcaactctcaaaggacaagattactccagtttgtaagaacgaagaccaatttagtaagctgcattctataagccatcagttttataactcgaaattctttattccaaataaagatactccctaaat

SEQ ID NO: 432 - DNA, 2217 bp, Homo sapiens
cactatgagatatcatctcacaccagttagaatggcaatcattaaaaagtcaggaaacaacaggtgctggagaggatgcggagaaataggaacacttttacactgttggtgggactgtaaactagttcaaccattgtggaagtcagtgtggcgattcctcagggatctagaactagaaataccatttgacccagccatcccattactgggtatatacccaaatgagtataaatcatgctgctataaagacacatgcacacgtatgtttattgtggcactattcacaatagcaaagacatggaatcaacctagatgcccatcagtggtggacttaataaagaaaatatggtacatatacatcatgggatactatacagctatttaaaaaaaacaaaaccgaaatcatgtcctttgcagcaacatggatgcagctggaggtcattatcctaagtgaattaaagcaggaacagaaagccaagtaccacgtgttctcacttaaaagtgggagctaaacattgagtacacatgggcataaacatggacacgagggcttacttgaggtggtgagggtaagaggaggatgagggtcaaaaaactgcctatcttgtactatggtcagttgctgggtgacgaaataatcagtacaccaaattccagtgacacagtttatccgtgtaacaaatgtacatatgtgcccccaaacctaaaatcaaaaaaaatatgtgtagaaaacaaagagcaaaatgaaggacctaaaacctaaaaaccatttatagtcaatatataaaaaggcttaataccccagtcaaaatcagatatggataaattttataaaaacaaagtaaacaaagagggtactgactcttgtgatagttggataccaagaaccatccctcactggggcatgctgtggctcacacctgttataccaacactttgggaacccaaggcaggagaggattgcttgagcccaggagtttggcactagcctgggcaacaaagtgagaccctgtctctagaaaaattaaaaaaattggccaggggtggtggtgtgtgtctgtggtcctagctactcgggaggctgagtcggggaagattgctcaagcccgggaggtcgaggctgcagtgagctgtgattgtgccattacactccagtctgggtgacagagcaagagcttatctcaaaaaagaaaaagactccatgatttaatctaatcaacttcaaaaacccaactcattcctccacacgccctgtgccttggccatagcatttacctcaccattctcctatgcattatctatttttagacctctgtctccctttgtttaaaatgttctcccagcctggataacatagcaagaccctgtctcaacaaaaaaaataaaaattagctgggtatggtggcatgtgcttgtggtcctagctacttgggaggctgaggtggaagaattacttgagcccaggatatttgaggttacagtgagctatggttgtgccactgtactccagcctgggcaacagagacccagtctggatgagagagaagagagaggggagagaggagagaaaaaagaaaagaaaagaaaaagaaaaagaaagaaagaacccatcatctatgagtgctgtcctcactgaacaccagaggctgggtattgagtttacatcagcttttaatgagctctcactaggtttcttcacccattcaatgggaaggtctgcttcagagccataattgtgttcaacgggactaggttgcaaggtttaataactcttctcttctttttaaaatttaattactttattatttcaccttttttttaaagccacatgtaggctgaattcatttaatttgacagaataacactccttactgctaatcctgatcaattttagctttgtgtgtctttgggttggatccactcagataagaggacaaaagagggccgggcatagtgactagtgcctgtaatcctagcactttgggaggccaaggtgggcggatcacctgaggtcaggacttcaaaaccagcctggccggcatggtgaaacccctgtctctactaaaaatacagggattggcctggcgtggtggtgggcgcctctaatctaagcaatttagtgatttgagctgggctcgggaggctgaggcaggagaatcgcgtgaaaacccaggaggcggagcttgcagtgagctgagatcgtgccattgcactcgc

SEQ ID NO: 433 - DNA, 2013 bp, Homo sapiens
ttttgttttttgttttttgtttttgtttttttttttgtggtggtggagggggcaatgctcagctcacaactcagaggctgcatactctaaatgctcagctcacaacttagagtctgcatactctaactctgggggagttgtattgagccccaactgtgttctgtggctccttgtgatttggagtctgccactctgtgggactaaggtgccacagctgctgcagagtgctagtggatatggggtttctgcctgtctttgggtattcacttcagtggcaggagcaaagcagctgggaggggagtgggggttacctgctggagactgtgtgctatttcactaaaggtggtgttggcttggggcaggatactggccagtaaaggttttgatgccttctctgtgccccccaagaaggaatgattgttcagagtgtgggaggataccctgttctccgcacagttttaccacaaaggccagggtggggctttctggctctctacccgccaaagcttcatctacaatagcaattgctgggagtggcaggggcatactacatttccattttctggtggggcaagcaaagccaaactcacctttgcagacatgtgccagcaaagtaatatggggagttgccatggtcttgggggaagctggagtatagggaagaaacatgtgagctggtgcagtcacaggggctgccttgccggagctcttcatgggtcaggcatggcccaccagtgcagatgctatggtatgggctcctagggtacctgagactgccctgtaagcagttgtggccagactggatccctgggagaggccagcagaccaaggagtgctcagttggatcagcttcttctgatttgcaagaccatcctgcagaaattaggtccaacagttcccctagggctaaagtctcttatgggagaaagttgagcctatggaaatggccgtcaatggccacactctactacaggtgctcttgcactaaaccctctgggtaccacatgagctgggttgctgccccacctctttgcctgtcttctggttgctgcatctcagagacgtgtaggccagcaatcactcagtgcagtccgaccaggatggaggatctgtgcttttggccaaattaggggttcactggtaatgagcagtgggtagtttgtggaacccatggaggatggactggccctctctccttgggtaaactacagctcgtttgaggtgtgaataaggcacttagggtgttggatttttcattagtctgagggtagcaaggacagttctactgcagaggcaatggcaaaaatattttcagttgctcttggaggctctgtctagggagttgcgaagttgctactggctcaatagctctggcaatgattggctagtggcccaggcctggagaacttgcccagtgagaatatatgagaacaggcactcacgtaacagtctggccacttttctgaagggctgctgcagtatgctgggtgtccactgcagtttctagtcacctcagattttccagtacctgacaacattatcaccagtgaatactgtaaaacagcaacaatggcagcatgcccttttttctaagagctccatctaagggaggtatagaccggtttccagccccaaagcaactgtaggaggtagctggaaacccctgttgaaaggtcttacccagtgaggagaacatgactggggacccacttaagaaagcagtgtaggctgggcgcagtggctcatgcctgtaaccctagcactttgggaggccgaggcaggtggattgcctgagctcaggagttcaagaccagcctgggcaacatggtgaaatcccacctctactaaaatacaaaaaaagaaaattagccaggtgtggcggcatgcaccagtagtctcagctaatcgggaggctgaggcaggagaattgcttgaacccaggaggcagatgttgctgtgagcggagattgtgccactgcactccagcctggtgagagagcgagactccgtctc

SEQ ID NO: 434 - DNA, 2821 bp, Homo sapiens
agtttccagccgccgctctcctcagtgcccggtggcccaggagggcctgggagcccgaagccgtccccgagtcgctcctaggtcactggcgcgatgcgggccgtcctctcggctgatgggttggaagcccagcgaggctagaggccagtcccaaagtctccaggcatcagggctgcagcccaggagcctcaaggcggcccggcgggcgactggacggccggacaggtgagctcttgatcgtccgcggcctgatagtttgcacttggctctcccactttggggctccgtggaagccacgtcagagaggctgtgtttgtgtctgagcatgcatgcgagtggaggggagtggtgagtaatcccgcgtctcctctctgagttcggaacccatggaggaagaaagcagaggtgccagacaggcctctgataggcacctgcaggattggggcagagcggccgcagcgcaggagcgccggcaagcctggcccttcccgggaggccccctttgtccggttccaccctggcctgttgcctcacatgcaacaagtgtctgaatgtggcgctctcctggccgagggcagccctgggcggtgagtgggatgacaccccagcctgcagggtgcctgtaggtctccacccagatgggcaggattggaggtggccgcagcgctcgtgggctttccctcagcaggtgtctccatgctggcctccccgcctcagggcttcatcccactccgtgggcctgatctccctggggcacctgggatgtccatctgcgttagctggagctactccatggcctgtggcgtgccacacacagcggcatttcggtgtcattaggcacagctggaggtgcaaggaggagggcagcctcatgtccagttccatgtaacttgcttcttctgaataaaggcaatttgctaactttctcgctaaataggatttggtttctatggcttttaaagcttctccgataaaatacttgcaacaagggaactctctcctcctacactctcctgactgatggttcggaagtcctcctgccctctgagagcttgcagtttcttgtgaaaaagagaaactaagcagcaatagaacagacccggtgtctgcttgcgtggttaagacggtaaatgctaaatgtgtgacactgcctttagaaaccattttctccagcctggcttgctggctgcccgtctggtttgctgtgttgtgtctccagtggctttagcttccaacaggaaagcctggtagccgagcgaatctgtgacccaggaagtagcaattaaatgcctgggacgctgcctcgaggctggtgtgtgctctgaggtaagttccgatttgccaaagcacatctgtcgatctgtcgcccgagtcttcacaccctgactgcctccatcattttaaacatcgggagcagttgcctgcagcggggttcagatgccagccaggggcacagcctgtgaactgtgggtagatggcaaagtctagcatttctggcaaaggaaaaaacatttggtaactctctgagtaaatttctgactgagatgaagatacccattgtggggcagcatcctgaagcggaagcctgggctgtatgtttccaagaggaggagcaggagtggccacagccatgtacgccacgatgtacaccaggggctgcgtggccacagctctggtctgctggtctgctccctggagcccctccaccagtgctgggctgtggctgtggctgtctctggtttgtctttctgggaaaccttggccaggttggtgtgagggcagggctagccttggacatctgcacttcccatagcagcctctgggccagagctcacccgctgtgggcaggtgatcagggtgatcaggtcccacgggtcccctcctctgcacctggagccttctgggtgtagaacagaaaaataggagggggcaacccagaggcctcctgctctccaggaaggaatggatgctggacaggtccagggtggaggcagagggagtgaggggcccttgggggaacatctgtcctagagggcttgatttccaggctgcccaccccactcctacccctaatctggtgttcctcacctgcctccaggaagtcctcacctgaggtctgcagcgggtgtgccaagcgccagccccacatcacctgctcccaggcctgcccaggggatgggtcctgtggccagtaccctcggggtcagcttgacccagacccagcccagaacctgtcccatggccccaggaggacaggatggtcagggaagcccaagggatgagcccttttgtccacaagcttccctctgacatgggcaggctgcttgtgcgaccccacagcccccacctctcatgaacaatgggaatggggcaggcccctcgatgctgggctggatcctcccgcccctaagcaggtgcactctgtcccctttgagaagagaccaagggatacaagtgctgggtcctggcggggtgcccctcctccctgcctgtgggggtctcattactgcctcctgcccccaccacaaacaccccctagagaggccttcggaggcaggtactgagccctggggccagggtgccaggagcccaatggcaggtcttgggtgactgctggccctggggcaatggtgagaaagccaggcaggcagctgcaggaaggagctgaggagaaaggcggcagagcctcaaaagctgctggcggccgggcacagtggctcacacctggaatcccagcactttgggaggccgaggcgggcggatcacgaggtcaggagatcgagaccatcctggctaacacggtgaaacccccgtctctact

SEQ ID NO: 435 - DNA, 2891 bp, Homo sapiens
ctctttggggggtaagacaggaaggggagatgggccccaagttgttaccttaaaagggctgatggaagcaaagagaagaggaagtggttgtcggggtgagagctgggcccgcgccccacatggctgtcatacaggaagccctgctgaagcagctgtccccggaagaagccatttccaaacctctgctcctgcctggggccagttgggacaggctccctggcccctctccttttgggaggacccacccctgcagccccaccactcacactcgctctctggggagctgcctccacccccccagcccccatacacctgtcctggctccagggccagttgtgcccatggaagcctcactcggggaagctggggtgggggtgccaaccctaagggcagagacagactgagacagagaccggcgggaactctgccagggtcttgcacggcccccaacctctgccatgcgtggccagccctcctggggtttgcccaggccattttgggactggaacaagagaagaacaacccgcccccgtccccaccccaggccctggtccagctcccagggacaccacagctttcctctctgggcctctctgaaggaggtgtggggaggttggattgggtttgggaggcaaaagcacctccaaggccctgctgtgcctttagactggacgtgtggacaagaatgcgcccacggtctgtggccacacagcccctgtgctagacatcgcctggtgcccgcacaatgacaacgtcattgccagtggctccgaggactgcacagtcatggtgtgggagatcccagatgggggcctgatgctgcccctgcgggagcccgtcgtcaccctggagggccacaccaagcgtgtgggcattgtggcctggcacaccacagcccagaacgtgctgctcagtgcaggtgctgcgggaggaggggcttgggggtggctcgtggcctgcagtggatgagggcaggaggctcatggcttctgacactgtggggaacgtgcaggttgtgacaacgtgatcatggtgtgggacgtgggcactggggcggccatgctgacactgggcccagaggtgcacccagacacgatctacagtgtggactggagccgagatggaggcctcatttgtacctcctgccgtgacaagcgcgtgcgcatcatcgagccccgcaaaggcactgtcgtagctgagaaggaccgtccccacgaggggacccggcccgtgcgtgcagtgttcgtgtcggaggggaagatcctgaccacgggcttcagccgcatgagtgagcggcaggtggcgctgtgggacacagtgagtgctggggcaggaagccgagggcccccaggctgggaaccaagactggaggtttcgtccctgctctgccactcacctggcaggatggccatgggcctcagtttacccaggcgtgagatggttgttcccactggttggtcgggagggccctcacaggtcactgcccagggaagaccaccatcccagggcctgggatgttacctctcacctgtgtctacagaagcacctggaggagccgctgtccctgcaggagctggacaccagcagcggtgtcctgctgcccttctttgaccctgacaccaacatcgtctacctccgtggcaaggtggcctcgtcgggcggggtgggggtgggaggtgggcaggatgggcctggagagggccagggcagtgggcatccgctggtattgaccctccctccacacctgccacctacagggtgacagctcaatccggtactttgagatcacttccgaggcccctttcctgcactatctctccatgttcagttccaaggagtcccagcggggcatgggctacatgcccaaacgtggcctggaggtgaacaagtgtgagatcgccaggtgactgacccccggccctgaccgcagcatgctccttgggcagtgggcagtcccaagcccacccaaccagactgtgggccccgctcaccttccccttcccacaggttctacaagctgcacgagcggaggtgtgagcccattgccatgacagtgcctcgaaaggtgatgctcccccgccccaccctgggctccaggctgggcactgactttgcggtcttgtggggggtgtcctggcataagcgctttcctcactatccctggccttgcccacagtcggacctgttccaggaggacctgtacccacccaccgcagggcccgaccctgccctcacggctgaggagtggctggggggtcgggatgctgggcccctcctcatctccctcaaggatggctacgtacccccaaagagccgggagctgagggtcaaccggggcctggacaccgggcgcaggagggcagcaccagaggccagtggcactcccagctcggtgagagggctgggaagccagggaataaaactgggagggtggggtggggctggtgtttggggcacctcaaactcacaacattgggaatctttgtgggtccgggaatggtaatcctgaggcctcagaacacaggtttcagattgataggcctgcaggtctccaggcagcaaccagctgagcgactaaagggcccaaggccagggctctagggatggggctcagcagaggctggggtaaggggagccagggaggagctgggcctaatgcagcaccgggtccccaggatgccgtgtctcggctggaggaggagatgcggaagctccaggccacggtgcaggagctccagaagcgcttggacaggctggaggagacagtccaggccaagtagagccccgcagggcctccagcagggtcagccattcacacccatccactcacctcccattcccagccacatggcagagaaaaaaatcataataaaatggctttattttctggt

SEQ ID NO: 436 - DNA, 2398 bp, Homo sapiens
gtgcccgtcttccctgcgacggttttggggtggaacaggagtggctcctcagggggaaatgaaaggaactgaggagctccagtcgtgagaaggccaatgaagcaggcaccgccagttgggaaatggacctccttggatgctgcattgttttctctggcccagctcctgcttggggcctgatgtacaccctggatggtggctacaggtggggcaccctgtgctgctctgcatctccatccagtcccccatctccacccaaaacagctcagttccccagagaagctccctggaaaccgggaggctgacttcttcaccaactgcagaaccacctgaggccacctggcagaatgcgatccaggactgcacgtggcattccgctgccgtgtctcagtgggatccttccatccagaacggctcctccgtctttctcctcctctcataattttgacagttttaaagcatccaggctatttttgtctttcataaccttgacactcttgaagagtactggccaattattttgtagaatgtcctccaacttgagtttgtctagtgctttctcacaatgagaatgaggttttgtgtttttggtgagaacaccacagaagcaggttatacccttccccatgcattatatcaggaggcacatgtgatattgctgcatcccattactggagacgttaactttgagagatgatgtagcaaagatttctccattgtaaaatcctatttttccttctgaacttaatgagtatcttacaaggagctgtcttggagactatgtaaatatcttgtttatcatcatactttcaccaaccaattttggcattcattggtgattcttgtctgcaatattaattaccactgtgttttccaacagatgatttttctactttcataattccttctccatttattaattgtaattcagtggtaaggaagagctgtcccttctctcccaattacttatgcaattatttcagtatagactcatggatatttagtttattctaccagtgataatccatgaccaacatcatttgtatcattgttccaactgtcccaggtatggccaatgtaagcatcttcaagtcaccccttgtgtttgtttgaaatgcccttattctattttgagcacttcctttctgacataagatgttccaggattattttataatttcactgaccccaccctgtacttaatcatttctccaaagaactctgcttcctttattgagggaatgtatttagaatctaagatctgggtgctggatgtcctcattgttactgaggtgtcactgtgtctagggcctctcagcagacagagctagggaatatgggttaccaactctgaaactattttatgggtattctgagattgagcaaataagtaaatacattgtatttagtgggagggaggcatctcactgtcaaagagagaactacaaataaaaagggaagggcaaagtgaaccctattgtgttagattagaatcagaggcatcagcatgagctcctgatttttagtgtatgtacagattgacagatatagaaataaatatgacctggcaattccattcctaggcatatacctagcagaaatccatggtcataaaaaaaaacatggacaagaatgatcatgctgggagtggtggctcacgcctgtaatcccaacactttgggaggctgaggcaagcagattgcttgagtccaggagtttgagaccagcctgggcaacatggcgaaaccctgtctccactaaaaatacaaaaattagctgggtgtggtggtgcatgcctgtagttccagctacttgagaggctgaggtaggaggatggcttgagcctgggagtcagagactgaagggagccaagattgtaccactgcactccaacctggggaacagagtgagaccctgaagaaagaaagagagaaagagagaaagagaaaagaaagaagaaagaaaggaagaaagaaagaaagaaagaaagagaaagaaagaaaaaaagagagaaagaggaaaaaaaaaaaagaatgatcataggatcatagctgcactattatcatagtcctaagctgtaaaccacgcaaattcccgttgacaccagactaaagaatgaatgaccgaccactacatgcaacattatggatgaaaatacaattgcggaaagacattttctcaaaaaatgctgtgtgataccatttatataaagcacaaaccaggcaaattaatccatgtcacaagaactcagtatcaattttctgcaagagaaacgagggggtttctgagctgctggtagtgttctgtcatttggtctgggtgctggttgcattggtgtgtctaattcttaaaatgtatatacattattcatcagtaaaaagttttttaaaatattcat

SEQ ID NO: 437 - DNA, 4084 bp, Homo sapiens
acacacacacacaaacacacacacacacacacacacacacacacacacacacactcatggtaaccagttcaggatggacaaagaaacagtcacagtcttttttgggaacacactcccctgtgacacttagatcctaatgctgactccaattccctcctgggacctcccctctccttgcggcatgctgggctttcccttagaaaaccccatgtcatttccttcaatggaacatgaatcagcttcacccacagtgtctgcatgtctctgtccatagcaaacgtttttattaccttaaaatatagatctttaccttaactagccaagacctaggaccctttttccaagctcttttagatgaagtaataaatgcaaatattagagatgtgtatatgtgtataaatatatggagaaaagatgttgcctagttgtacaaattagctttaatacaactcctgatttaaattatttaattgtgagaagggcgattctaactcaacacaccaacgaaataaaagccttatccctctgctccgccaaaatatcccatttagagcctgcgtgtgtgtgtacacacacgtgtgcactcatccccacctgaccgtatcaaattattatttaaactagatatttttactttgttgcatagtagtaatggtttctggaatgaaaaaataaaaaacaggagaataaaactgtttaaatgtatctccgggtgaacgctgtggccactgcacggaccccgtcgatggcgcccagtacctgcgtctcaggaagaggttctggcggggcctccgcctgaggccgcgcccctgggacctgtcccgcgtccacgtgaatgcggagcgcagcattcaccatcccctccctgaaacagcggtccccgaggtgctccacaggcagggccgagctgggcaagggggagcccagcccctgcacgggccgccctgagcagcggggacgcaggaagagctcgctggctccaccagcccctaccccagatgcgggacctcagaccagcaaggacctggagcccccaccccacggttgccaggaggcggacaggggcggctcctggggggctaccacctcgaggccgttccgccagaacttgagcgacttgggaaggcacagtgtcctgcccttgaagaggaacctgtgtcctggaggcagcagcctgggagctcctcctctgaggacaccgcagaggcgagtgactctggcggcgcagcgctggctttcccgtccgcagaggagagctgtggggctgggtgagctggaccagggagcacagctggctgctctcggcctccgatggggagtggacagcttagggggttgcccccgtgccagccagcctgctggccactctgggcttcatcacaccctcacctgcctgcgcaggcacctagcactgcaggctggagcttctggccatgctggtcaacttccccaacgagcctctgctgcctgggaacagcaaggccagagctacaccgccctgcacttggcagccatgtaccttggagatggtgaagctgctagtgggaacataggacgccgatgttgacatcagggactacactgggaaaagggcctcccagcatgtgagtcagagcatcacagaagagattgagaccctgatgggagtcctggacaaggacgatggggagagcaccgccagcagcgggggtgagtactggaagatttaaaagctgccccctccatctcaccacctacaaactctcacacgtcctggaagatggggggaccctctccaccatcaccacttggctgaaggtggtccagacgtgaagccaaggattccaaggcgcacagcctcgggcaggactaatggacttaaaaaacacaggctcaacaaaatccacttcacaacccagatggttcatatcacaccctctttcaaggacccagagcagccactggaagagaaggagtaggaacgctctcttaaagtccacttatcctattccttcaaattaagaccaaagtccaatgtatttaggtaaaaaataatttcttttagaaaatgctaaggtttgtcttctgaaatttaataacagaaacaaaaaaagaacactagatgtaatgaagtgagaccagaaaagacaaactaaactatccttactaggttggaatggatggggtggagttcctatcaggctagcattctggggaaagctgtatttttttttttttggcggtggggggaaggtgtctcactctgtcgcccaggctggaatgcagtggcgccatctccgctcactgcaagctcagcccctcgggtttatgccattctccagccccagcctcccagtagctgggactacaggcgtccgccaccacacacggctaatttttttgtatttttagttgagacggtgtttcaccgtgttctccaggatggtctcgattcctgaattcgtgatccgcccgcctctgcctcccaaagtgctgggattacaggcgtgagccactgcgcctggccggatttctttttaagagattcatcataccttgacctgtgccccatttccctcctccacctgtctgacctggcattcctatttcgggagaccagaagtggggggaagagaagggatgactgtttctttgctttcaccattcctgcatgccatgcaaaggaaggaatattgcgcttttaaatatccgttttattaagtaagtggttactctttcaaagacaaaaaaaatgcaaattgttacaaaactggcagtatttgtaagtgcaagcactacacgctgccttgttcttttaccaattgcatttgcattttaaggtactacttgtacagccatggtggagaacagtttggaggttcctctaaacactgaaaatagaggtgccacatgatccagcaatcccactgttggatatataccccagaaataagaaatgagtatatcgaagaaattatctgcactcccatgttggttgcaccactgttgacaatagctaagatttggaagcaacctaagtgtccatcaacagattaatgtattaaagaaaatgtggtagatacacacagtggagtattattcagccctaaaaaagaatgagattcagtcatttgcaacaacatggaaggaactggatatcattatgttaagggaaataagccaagcacggaaaggcagacattgcatgttctcacttatttgtgggatctaaaaatcaaaacaattgaactcatggacatagtaagtactagggggctggggggggagacagggcacgggtaatgggtacaaaaataggcagaaggaatgaataagacatactatttgatagcacaacagggggactctagtcaataattgtacatttaaaaataactaaaagaatctaattggattgtaacacaaaggaaacatgcttaaagggatggatacccactctccatgatgtgattagttcatgctgcatgcctgtatcaaaacatctcatgcaccccataaatatatatgcttattatatactcacaaaaatgcttgaaaataaaaataaaggaactactgaaggtcaggtcagagtggaaatgtaaaaatactaattagagaataatgtgaatacaacaggaatcctgttggtattctatttatattgtaagcagcagttcaattgttttgaaaaagtaatttcaattttaatcactgaactaaagaaatgggcaaggctgacttccgtaatataggttctacctaaccatctctaacaccgctgtcaaggaggaccagtgttaaggtacattactaacaaccacacaaatttttaaaagaaaagaacactcttagcagcctatggtactttgaaatgaaatattgcctctcattctcacttgtgttgccattccaaaagtatgaatttgctgaggtttatattctgggtattatataaccattggttctgtttggcataaccctattaaatggtgcgcagagctgaattacctacagaaactttctggtttaattagcataaattggtataaatattagtgagcccatacttctgtgatataattaaaccaacttaatgattctc

SEQ ID NO: 438 - DNA, 2591 bp, Homo sapiens
gtgcaaagagctctttttgtaagacttactcagagataccaagaagatgaagaacaaaccagcacccaacctcatagggcaccaagcaaggaagaagatgatacagttaactggtattccagtagtgaagaggaagaaggaagcagtgtcaaatcaatactgaaaacattacagaaacaaacagaaactttaaggaatcagcaacaaccttccacagaactcagcactcctgctgatccaagacttgctaaagagaaaagtaaaggaaaccaagtggttgaccctaggcttaggactatcccaaggcaagacattagaaagccttctgagtctgccccactggatcttagacttgcgtgggatcccaggaaattgagagggaatggaagtggtcacataggctcttctgttggtggagcaaagtttgatttgcatcatgcaaatgctggcactaatgtcaaacacaaaagaggcgatgatgatgatgaagatacagaaagagaactgagagaaaaagctttcttaatacctttggatgcctcacctggcataatgctccaggatccaaggtcacaattgagacagttcagtcacattaaaatggacattactctaaccaaacccaactttgcaaaacacatcgtgtgggctcccgaagacttacttccagtacctttacctaaacctgatccagtgtcttcaatcaatttacctctgcccccacttatagctgaccagaggctaaatagattatggaatacaaaaagtgatcttcatcaaaacacagtgtccattgatccaaaattagcagccaaagccaaaattaacacaacaaacagagaaggctacctagaacaatttggagactcacacggttcaggagctaaattaggagatcctagactacaaaaaaattttgatcctaggcttcacagactgcccaatacagagtctcatcaagtggttatgaaggattcacatgcatcaaagggtgcccctcacttacccagatcaaaccctggttcatcacagccctcaggggcaggaactagcaattctggttccggggctctgcctccatatgcccctaaactctcttcctcagctggccttccactgggaacttccacttcagttcttagtggtattagtttgtatgaccctagggatcacggttcatcatccacatcagagctagcaacagcttcttcaggagaaaactcaaagaaccagaaaaaaagtggtggcttaaaaagtagtgacaaaactgaaccttctcctggagaagccatccttccacaaaaacccagtccaaacgtgggagtcactcttgaggggccagctgacccacaggcggacgttcccaggagttctggtaaggttcaggtcccagcagtgcacagccttcctgttcaggcattaacaggcttaattaggccacagtacagtgatccaaggcaggcaaggcagccaggacaggggagcccgaccccagataatgatcccggtagagaaacagatgacaaatctctgaaagaggtttttaaaacttttgatccaaccgcttcaccattttgttagctattgtgtaactgagcaattcttttcactcttgtgactatctcagtcctctgctgttttgtaactggtttacctctatagtttatttatttttaaattataaacacttttcagctgctagtatcagaaccacatgaagttatagcctctaaagcctgtggtattttatataatatttttataactttaagagactgtagtaattgacctaaaaacttatgttagcttcagtaaaagtacttttattgtaaataaacaatcatgaactcaacactctgcctgaatatatgccagttgtctttcataatcaatgtttagataaatgattgccactttttatatggttgtttagtttcaagcaatatgatgtacattacttttgagaaacagtattttgactaggacctctcttatttgtcagcacagaactgattaatatgtaatgctacctgctaattaaaatgtaaaatcaagtaaagaaaacattttaaaattacaattagcagagcagttcatgtttaagggcatcacttttattagtattggcaatattatttgtgtaaatgaagcatttgaatgtcatatctttttaaagtattttattgtatactgtatcatagaagttggaggtatataaatagaacattttgctaaagtgaaaaatttccaagttctctagcataactttttacatttaatttttcatatgaaatagcaattagttactgctgtgttacattgtgatgtttatgtatgtcaatgtttttgtctttaacagcataatttatattgctttttcaaatgatgtagctgcattaattgtgttcatcatgactttggcgatttttaacaaaatttttaaagacccagtgagagtctgtagtgattattacacggataatgttttaaatgtctaggtcctgtatttttttcttaaatagcaagaaaatacagattgctagtatagtcaacagtatttggctatcaataaagaatctctttaagatctc

SEQ ID NO: 439 - DNA, 2496 bp, Homo sapiens
aagaaaccttggaggaagaacggcattaaagatcaaaagcatgatgactcctgatgaaaacatcaccaaatgatgaacccacgagcaaaaagggatttctacttggcggcacctgacttgctggatcctaaatctgccgctcagaactccaaaccgaggctctcgttttccacgaaacccacagtgcttgcttcccgggtggagagtgacacgaccattaatgttatgaaatggaagacggtctccacgatattcctggtggttgtcctctatctgatcatcggagccaccgtgttcaaagcattggagcagcctcatgagatttcacagaggaccaccattgtgatccagaagcaaacattcatatcccaacattcctgtgtcaattcgacggagctggatgaactcattcaggatttggaaacatctcaccacgcacagaaggcggcaaaatattctgtatcatctatgccttactgggaattcccctctttggttttctcttggctggagttggagatcagctaggcaccatatttggaaaaggaattgccaaagtggaagatacgtttattaagtggaatgttagtcagaccaagattcgcatcatctcaacaatcatatttatactatttggctgtgtactctttgtggctctgcctgcgatcatattcaaacacatagaaggctggagtgccctggacgccatttattttgtggttatcactctaacaactattggatttggtgactacgttgcaggtggatccgatattgaatatctggacttctataagcctgtcgtgtggttctggatccttgtagggcttgcttactttgctgctgtcctgagcatgattggagattggctccgagtgatatctaaaaagacaaaagaagaggtgggagagttcagagcacacgctgctgagtggacagccaacgtcacagccgaattcaaagaaaccaggaggcgactgagtgtggagatttatgacaagttccagcgggccacctccatcaagcggaagctctcggcagaactggctggaaaccacaatcaggagctgactccttgtaggaggaccctgtcagtgaaccacctgaccagcgagagggatgtcttgcctcccttactgaagactgagagtatctatctgaatggtttgacgccacactgtgctggtgaagagattgctgtgattgagaacatcaaatagccctctctttaaataaccttaggcatagccataggtgaggacttctctatgctctttatgactgttgctggtagcattttttaaattgtgcatgagctcaaagggggaacaaaatagatacacccattatggtcatctatcatcaagagaatttggaattctgagccagcactttctttctgatgatgcttgttgaacggtccactttctttgatgagtggaatgacaagcaatgtctgatgcctttttgtgcccagactgttttcctctctctttccctaatgtgccataaggcctcagaatgaatgagaattgtttctggtaacaatgtagctttgagggatcagttcttaacttttcagggtctacctaactgagcctagatatggaccatttatggatgacaacaattttttttttgtaaatgacaagaaattcttatgcagccttttacctaagaaattttctgtcagtgccttatcttatgaagaaacagaacctctctagctaatgtgtggtttctccttccctgcccccacccctaggctcacctctgcagtcttttaccccagttctcccatttgaataccataccttgctggaaacagtgtgtaaaatgactgaagtgatgatgcccgaagatgaaatagatgccaaattagatggacattgaagcaacactcagcgttgcctagcgttaaaggcactgcagagaaatgaggtgcagaggtggcccctctgagtatttatttgactcaggtaccagtggtacatatatacagtgtaattatgaccaggctggtaaaattggctgctcgcaaacaatccccttttttcctggcagtatttggaatttatcatttattaataactatacatttttaaaatgcagaaagaaaataatttccctaaatataattgcaaactgatttcttttacttttttgtgtctgggggtgggagctgtatctgaataagtggcattcagattagggtcttgaaaaataaacccagaatctttaaaagaagcaaataaactaatagacgcttattttccaaaatttaaatttaagctagaaatgtaaatattcaattaatttgttaaaagtacttttataaagttaaaaaaaatccaaccaaaattttagaaagtcaggctcttttagaaagaaagctacacccatttcctcaaataactgttccgaaaatttatatggtggaatgcgccatgtataaactgtgaattgtattgacaaataaagtttgtaattaaagtc

SEQ ID NO: 440 - DNA, 2011 bp, Homo sapiens
tatgcgctccaagaagcccaagaaacatcccaaagtggccgtgaaagccaagccctcgccccggctcaccatctttgacgaggaggtggaccctgatgaggggctctttggcccgggcaggaagctgtctccacaggacccctcggaggacgtgtcatccatggaccccctgaagctatttgatgatcctgacctcggcggggccatccccctgggtgactccctcctgctgccggccgcctgtgagagtggagggcccacacccagcctcagccacagggacgcctccaaggaactgttcaggtaccacctgtccccagcggcgcttggccagctctgagagtgtcctggacagagccaagggcccggctcattgcccagtctcagccccagcctcctctgaggggaggaccccaggcctgtgaaaagtagaagcctgtgggtgcacattgggtgagaggcggtgaagggggctgagggggaggatccgcagcccagggctgctcagctagttccagaaagagagaactttgtgtgcacaaccagtctttcttttcacaatcatattttaacagtttatgtaaagaataattaaattatataattgcaagagcaggtataactggcataagcaagtttgggaacaaattaaacggactcatggcagcatgcagcccacccagcgagggggcaaagtgcagatgtcctggtgatggcctctctgccggagggcccggtcagcagctttcacagaaggaagggagaatgaggcctcagctgtcacatggaggtcaattggcagaacctgtgccggtgacagctcctatttcctgagtccttgctgtgtacgcagtaagccagactccttacacgctctcttatgtaatcttcacgacagccccctaaggtggatgctattttctccatattataagaaatcaagtgtgggacgccacctggctaagacccctgctctgcccctggcctggcctctccacttcatcagggactgtctgagcacttggctgggtgatctgcctccccacccagccccccagttctccccaggcctttacctccactggccacattctcagcagactcagtgttgtgcgtgtctccagctcccactccatgctccaggacacaggactgtgcctgggattcagaggaagccaggccgcctctttccaggaacggcttatgtgacaccaaggcatgcaggccctggaggctgtcatctgtacccctcattagcagcctcgggctattagacagccctgcaagtgcccgccaagcctgagtcaccgtgacggcttctggtatttacatgtccccaaggcccctggcatctgttcactctcatcctgtgtcctcgctcctgacatcccagcgggctggaagaaaccaggattgttattttattagagggaaaccgaggcacagggaaatgaaatactagagtctgcctgcggagcagcagggccaggccgagcatgtctaggagtccatgtgtcccagtggggtggctctcgtgggacctttctggcctagtttattctaaatccgttacttcccaacctgtgttctgcagaacgtggtacagtggggtggtcaaaggctatcttcaaaggggctctgtggctgatgaattggggaaatgccacaaaaagcagggctcgtagtgcgcgggccagcaccacatggcacttcacgttctcattcatccctgggccccccgctctgtggtgccccttagcatcccgcagagcgcttggggagtccctgctcaaaaagtgtgggtcccgcacccccaccttcactttagcagacatctgctaatgaaaggattaactgcttttcttttttttaaattcagacaaattcaaaaagagccgtaacactgggattagcttcttgagagcaggaaccacattcattctttgtgtctgccctgtgactatccagggagtagttggacttcctcataataaagaatgttctgatagcc

SEQ ID NO: 441 - DNA, 2676 bp, Homo sapiens
ttacaatagctaccatgtacttaatgtttactacaagccaggaacaattttaagcactctataggaattaacttacataaaacagattattttattattcaatttacagaccaagtttggtgtgtataccatttttaaatgaatttgtgttttattagttacctatagttttcttcttcagtgacatatccacagctttagtttagcacaagcagggcattaaaatctgtttaatgaatgcacggttatattttgtctcggaatgtatagtcttctttatttataccagattttgatttcatctccatttttcctatgcttattctttccgtgttctaatagactgaggtcctcttctctgggactttcctaaaggctgctttagatttgtggtagtaggaatgggactgacagagtggatgaagtcaagtgctgtgtgtgcagagagggagactttgatgacaatggctatcagccctgcttatgactctctgctctgttttgcttcttgtaggctttcagttctgaaatggcaaagaggtccaagatgctgagtttgaacaattacagtgtcccccagtcaaccagagaggagaaaagagaaaatgggcttgaagctagatctcctgccatcaatctgatgggattcaacgtggaagagatgtgtgaggcccacgcatggatccaaagaatcctgagtctccagaaccaccacatcattgagaataatcatattctgtaccttgggagaaaggaacatgacattttgtctcagcttcagaaaacttcaagtgtctccatcacagaaattatcagcccaggaaggacagagttagagattgaaggagcccgggctgacctcattgaggtggttatgaacattgaagatatgctttgtaaagtacaggaggaaatggcaaggaaaaaggagcgaggcctttggcgctcgttaggacagtggactattcagcaacaaaaaacccaagacgaaatgaaagaaaatatcatatttctgaaatgtcctgtgcctccaactcaagagcttctagatcaaaagaaacagtttgaaaaatgtggtttgcaggttctaaaggtatacctaacaaaggggaagatttggctcattttgttgttaattaacttgtttctgtagccaaaggaaaagctcacctgctgatgattctaagctggctgctcatggacttggaatcctaggtcagtaagactgaaaagagagcagggcagggcaggcacgagggatatagttggaatcgggaggtaggaatgacatcaggacacacagaagcaaggattccagatccaggaagcccgtctttgagcaaaataaaagaagtggaatagcatttatcacactgtgttataattgtttacctatttttctatctcactaaactatgagcttaagagggcagagactatgtctaggtcagtgaatttttgttaaaggaatttattagagaaggggcagggaattttgaagaacgaatcaaaataggagaggattagagggaggagagactcttttgcaactttctatgaaaagcgaattgcatgcaaagtagtattatgcacataagctcctttatttttgaagcagtatagcaggcaatttaaagagcggttctctagcctctttttcagtctttcttttctatggttctaggtggagaagatagacaatgaggtccttatggctgcctttcaaagaaagaagaaaatgatggaagaaaaactgcacaggcaacctgtgagccataggctgtttcagcaagtcccataccagttctgcaatgtggtatgcagagttggctttcaaagaatgtactcgacaccttgcgatccaaaatacggagctggcatatacttcaccaagaacctcaaaaacctggcagagaaggccaagaaaatctctgctgcagataagctgatctatgtgtttgaggctgaagtactcacaggcttcttctgccagggacatccgttaaatattgttcccccaccactgagtcctggagctatagatggtcatgacagtgtggttgacaatgtctccagccctgaaacctttgttatttttagtggcatgcaggctatacctcagtatttgtggacatgcacccaggaatatgtacagtcacaagattactcatcaggaccaatgagaccctttgcacagcatccttggaggggattcgcaagtggcagccctgttgattaatctctacatcattttaacagctggtatggccttaccttgggtgaactaaccaaataatgaccatcgatggctcaaagagtggcttgaatatatcccatgggttatctgtatggactgactgggttattgaaaggactagccacatactagcatcttagtgcctttatctgtctttatgtcttggggttggggtaggtagataccaaatgaaacactttcaggaccttccttcctcttgcagttgttctttaatctcctttactagaggagataaatattttgcatataatgaagaaatttttctagtatataacgcaggccttttattttctaaaatgatgatagtataaaaatgttaggataacagaatgattttagattttccagagaatattataaagtgctttaggtatgaaaataaatcatctttgtctgat

SEQ ID NO: 442 - DNA, 2271 bp, Homo sapiens
tactaactcggcatggccagctcgacagagagccagtttgttaaacagcttggtgggggagttcatccgtcttgatgttgccctgaatctacaacttcatattcaatatgctaaataatcctcttttcttttcgtgtgattcatgatagtgtcatcctcatcaagctttatctttctcatttcttgcaattttctcttaaggacttgcacacgaagtctgtatgtccgtagggctttgtacatcactcttgcaaaaggactctcttcgtcttgctttcagacttcttcaggtcacaatgtaaaaggtgtttcttattgtggatcacagctgaagaattttgaagctgctcagctaaaggactttccctctgcgaagctgtgattctctgaagtggccaaagaaattatgcagtaagaccctttccagttttcatcctgggtgtttctgaacaggaacatatctcattgaagtatttgcacctctacctacagacaaggaaaaggcttggagcacctccattcattgtgccaacaggacctgaatgaccgattgtttcttgcttactacttgtggtcaactaagtagagattcataagacctttatagaaccactgacaacactgtgaccaaggaaacttccatcgatagaagagtggctgtgacccgaaggaatgtctgacccccacagcagtcctctcctgccagagccactttccagcagatacaaactctacgaggcagagtttaccagcccgagctggccctcgacatccccggatactcacccagctctgcccctcctggaaatgcctgaagaaaaggatctccggtcttccaatgaagacagtcacattgtgaagatcgaaaagctcaatgaaaggagtaaaaggaaagacgacggggtggcccatcgggactcagcaggccaaaggtgcatctgcctctccaaagcagtgggctacctcacgggcgacatgaaggagtacaggatctggctgaaagacaagcaccttgccctccagttcatagactgggtcctgagagggaccgctcaggtgatgttcgtcaacaatcctctcagcggcctcatcatcttcatagggctgctgatccagaatccctggtggacaatcactgggggcctggggacagtggtctcgaccttaacagctctcgccttgggccaagacaggtctgccattgcctcaggactccatgggtacaacgggatgctggtgggactgctgatggccgtgttctcggagaagttagactactactggtggcttctgtttcctgtgaccttcacagccatgtcctgcccagttctttctagtgccttgaattccatcttcagcaagtgggacctcccggtcttcactctgcccttcaacattgcagtcaccttgtaccttgcagccacaggccactacaacctcttcttccccacaacactggtagagcctgtgtcttcagtgcccaatatcacctggacagagatggaaatgcccctgctgttacaagccatccctgttggggtcggccaggtgtatggctgtgacaatccctggacaggcggcgtgttcctggtggctctgttcatctcctcgccactcatctgcttgcatgcagccattggctcaatcgtggggctgctagcagccctgtcagtggccacacccttcgagaccatctacacaggcctctggagctacaactgcgtcctctcctgcatcgccatcggaggcatgttctatgccctcacctggcagactcacctgctggccctcatctgtgccctgttctgtgcatacatggaagcagccatctccaacatcatgtcagtggtgggcgtgccaccaggcacctgggccttctgccttgccaccatcatcttcctgctcctgacgacaaacaacccagccatcttcagactcccactcagcaaagtcacctaccccgaggccaaccgcatctactacctgacagtgaaaagcggtgaagaagagaaggcccccagcggtgaatagccatgttcggggaagaaacgctctttgcctgacctgatgtcctctccctgtgttctctgctctggttcaatcagttgcagcactcaccttctttgcctctccttgcacctgtgtagaaccaagcacacctgtaactttctttccctgaagctgattttcattctctgccagaatctccataactatctattgtgcgacattaagggatgttggtattacagtaaaatttccggagttagc

SEQ ID NO: 443 - DNA, 2293 bp, Homo sapiens
ttcttgagtagctgggactacaggcgcgtgccaccatgcccagctaatttttgtatttttagtagagatggggtttcaccttgttggccaggatggtcttgatgtcttgaccttgtgatccgcctgcctcagcctcccagagtgctgggattacaggcatgagccactgtgcccagcctaaaacagttattttctttaaagtcttgcttactgttcagaggaaattgttttattgtctccaggaaaatccagaagtatggttcatccgacctgtttcaccctctttactgaaaattttggccctggaagctacctacctgttaccccttcgcttggcactcctagatgagatgatgtctgacctaaccaccctggtggatggttacctaaacacgtatcgcgaagggtctgcagaccggcttggaggcactgagcctacatgtatggagctgccagaggaactgcttcaactcaaggacttccagaagcagcgcagggagaaagctgcaagagaatatagggtgaatgcacagggactcctgataaggacagtgctacagccaaagaaattagtgacagagacagcagggaaagaggagaaagtcaaaggcttcttatttggtaaaaattttaggatagataaagctccaagttttacatctcaagactttcacggggatgtgaatttactgaaagaagaatctttgaataaacaagctacaaatcctcaacatctacctcccacagaggaaggggaaactagtgaggattccagtaacaaactcatttgcacaaagtcaaaggggtcagaggaccagagaataactcagaaagaacactttatgacacccaaacatgagtttcaggcaagtttatctttgaaagaggagacagaacagttattgatggtggaaaacaaggaagatttaaaatgcacaaaacaggctgtttcaatgtcttcctttcctcaggaaaccagagtgtctccaagtgacactttttatcctatcagaaaggctgtggtttccacactccctccctgtccagccttggagaagatcgattcctggataagtccttttctaaatctgccctagagatgggcagtttgttcttaaggccatgcagatggcttatttcctttgccatcagggctttccacagtgcccaggtttctcatgttgtaaatgtagtaatgcttcagtcacaggggaaaattatatcctcttgcttactcctgtgttcctggtatgcggagaatgagaatgaataagttaaataatggaagaagtataatttctgattatgtcactgtgtagaaatgttctcagtgaccagagtgcattatttttcataatttgggtttagaggatttgaagaaaggaagaatcttgggcttagtatcaggaagactccatcattttcaaattttgttttgcttcttgacttttggattcctttgaagagacctggtaaaactattaacaattcatttaaaaaattggtacctgataactttaccagtacttttttcctttttatttatttgttttatttatttttttttaccgctccttgtggagcagggctacaccataggcagtgtgcccagagtaaccacttttttcctttttaaaatataatattaactttatgtttgaatgttgaatgttttgtctgtctcttaggcaaataatgttataggaatcaataatttaatttttgttttatttgttttttgatggagtctcactgtgtcacccaggctggagtgtagtggtgtaatctctgctcactgcaacctccgcctcccgggttcaagcaattctcctgcctcagcctcctgagtagctgggattacaggtgcgtaccaccacgcccggctaatttttgtatttttagtagagatggggtttcaccatgttggccaggctggtctcgaactcctgactgaccttgtggtccacctgccttggccttccaaagtgctgggattacaggtgtgaggcacggtgcccagccaatatctttattttaatttgtttttatttcctttatttttagctggttttgtccattttcctaacaaagcagggaccctgggtttctttttagtctgtctgttatataaacttgaagcctgactccattctatttgcctggagttagtatactttcttagggtgaaaggaaggcagcttgtattgagccttttaaagtattgaatgcttgcaaattgctaacattcttttgtgtaaaataaccaataaacctgttttgtcatactctactt

SEQ ID NO: 444 - DNA, 2598 bp, Homo sapiens
ttggctccggttgccgagctgctcccaggagattcgttttcagaggatctgagaaaaagccggcagggttgatggcagctctttcttctcggtgccctcgcagtgcagcaggccccgcttatttgcaagaagcagccaggtcagcccactgggcctccccacctcttgtgccccttcgcacatttcagagctctctcttttcctctgggtcctcccattcaagagaggaggaggaggagggggtgagcctgttgcgaacggcgttggtggggcaggggccggttcccctgtttctggggagccttttctgtgctggttgcaggcaggggccctcagtgtggagctgtggtgagcctgtgccccgtcgtatttgggtcacagcctccgtgacccctagcccccgccaggcactccacccctgcagtgattcgcttgatattttaaaagcactccatcttctgcctgctgccttctctccattcatctgggtccaggttttcgccgagccatctaataaagaatccaggggggagaatgatgggggcgaggagagggaaagtgctaacatttattaagtgcccgctgggtgcccagcacttcctcaacaactagagcagcggtctttctgctttctttcagctgcataaccctttcctccatccaaaatcgcaagcctaacctggccgtgtaaacaaacaccagggaagcgcctctgatggaaggggatggggcacctaaggccctgtctctcaccatgtagcatcctccccactcctaacagacactttggtgcttccatgaaacctggatctaaaagctctgtgctcattaaatctacatataactctccaaggaaatagtatccccatttttataataccaagctaaaggccagagagggagagtgtaggatcacacaatttttttttttttttgagatggcgtttcactgtcacccaggctatagtgcaatggcgtgatctcagctcactgcaacctccacctccctgattcaagtgattctcctgcctcagccttctgagtagctgggattataggcgcgcgccaccacgcccagctaatttttgtattttaatagagacggggtttcaccatattggccaggctggtctccgagctcctgacctcaggtgatccgcctgctttggcctctcaaagtgctgggattataggcgtgagccaccgcgtccggcccagggacacgattattaaagggcagagagccagactggggaggcaggtgtgctccattcccaagcccatgcttgccctggctctgccgggaagacagtaggtgctttgcttcctgagaaagggcaggaagaggcgtggctcctccagctgtacagacgaccaggccagatccacatggccccgtttggtgcttggatgtctggtaaactgcctgccaaggaggaacgcagaggtgaagcacctggtccgacccatcatttcacgctgaatcgcctgttgacccatctcacttgactgactcctgggatggaggcctggctccctccaaggcagccccttgcgttggaagaaaggcaatggtgtgaagcctgtctggttgtaccctccagctgcgggtccttactccagctctcagaaccagaaggaatctgtctaattgctcatctactggagagcccttgagaggggcttcttcaaggtcctgggcactccagaatgttcccctccacttaaaaaacacaaggatggtctccaggcacctgaggaaacacagtctcctgccctttaggatcagccacctctgaggccaagacctgacccagattccggtacccttcacagaaggagccaccacagtggagaaggaagctcatggcttttgggcaagagcctctttgaaaaggaggaagagctcgcaaagggtgacggcagagagatgcccagaatcttgcaggaggaaggagaatgcagcctaacttgctggaaggattcaggagacgtgtgagtaagagccaagatttcccagatcagcctacagccaagataagcacagctttctacccaacctgcacctcaccacagagaatggaagaatcactcagccatcctgtatattgtagcaatagtgtatggttattttttctaggcactgagttttgggatgatttgttatgcagcaacagctggctgctacagagattgtgcccaccctcacagccccctggatctgtgtgctcgcactgagttttgggatgatttgttatgcagcaacagctggctgccacagagattgtgcccaccctcacagccccctggatctgtgtgctctcactgaaaagcaaaagtaacttctgtttttctcttctctgtggccaccagggctgctgcccaaacagaaaggcaatttgcttagtggtggaggttctgacctccagagtcagacagtcctggaatcctatcccagctgtgtgacctgcagttggcttcttaaccactctgtgcctcagtgtctccatctacaaaaggcacagtttctaccccatcaggttgtggtaaggactagaaaagacattggaagtaaagtgcgtgacaccaaagtgctcc

SEQ ID NO: 445 - DNA, 3651 bp, Homo sapiens
catgcgctccacgaggcgcccaagttcaccgtggagaccctggagcacacggtcaacaacgactcggaggtctggggtctcctgcagccctaccagcacctgatctgcgggaagaacgccagcggggtgctgtgcctaccagacagcctgaatcttcacagagacccacagcggtcaaacaagccaggggaactgcccatgttcagccagtcggagctgaggaccatcgagcagtctttgctggccacgcgcgtaggcagcatcgccgaattgagtgacctggtgtcccgtgcaatgcatcacctgcagcccctcaatgccaagcaccacggcaatggcacccccctgcaccacaagcagggggcactgtactgggagcccgaggccctgtacaccctttgctatttcatgcactgcccacaaatggaatgggaaaaccccaacgtggagccttccaaagtcaacctccaggtggaaaggcccttcctcgtgctgccgccgctgatggagtggatccgggtggccgtggcgcacgccggccaccgccgcagcttctccatggacagcgacgacgtccgccaggcggcccggctgctgctgcccggcgtggactgcgagccgcgccagctcagggccgacgactgcttttgtgcatctcgaaagctggatgcggtggccatcgaagccaagtttaagcaggacctgggtttccggatgctgaactgtggacgaacagacctggtgaagcaggcagtgtctctgctggggcccgatgggatcaacaccatgagcgaacagggcatgactcccctgatgtatgcctgcgtccgtggggacgaggcgatggtccagatgctgctggatgccggagctgacctgaatgtggaggttgtcagtactcctcataaatatccatccgtccaccccgagacccgccattggacggctctgacttttgctgtgttgcatggacatattcctgtagttcagctcctcctggatgctggggccaaggtggaaggctcagtggagcatggcgaggagaactactcggaaacacccctccagctggcagctgctgtaggaaattttgagctggttagtttgctgttggagcgtggtgccgatcccctgataggaaccatgtacaggaatggaatttctacaaccccccagggtgatatgaactctttcagccaggctgcagcccacggacacaggaatgtgttccgcaaactgctcgcccagccagagaaggagaagagtgatatcctgtccctggaggagattctggccgaggggactgacctggcggagacagccccgccccccttgtgcgccagccgcaacagcaaggccaaactgagggccctgagggaagccatgtatcacagcgctgagcatggctacgtggatgtcacaattgatatcaggagcataggcgtcccgtggactctgcacacgtggctggagtctttgcggatcgccttccagcagcaccgcaggcctctcatccagtgcttgttaaaggagtttaagaccattcaggaggaggaatacacggaggagctcgttacccaaggcctgcccctgatgtttgagatcctgaaagcgagcaagaatgaagtgatcagccagcagctgtgcgtcatcttcacacactgctacgggccctaccccatccccaagctcacagaaatcaaacggaaacagacctcgcgcttggatcctcattttcttaacaataaagaaatgtctgatgttacatttctggtagaaggaagaccattttatgctcacaaagtgctgttatttacagcctctccaaggttcaaagcactcctctccagcaagccgacaaatgacggcacctgcatagagattggttatgtgaaatactccatctttcagctggttatgcagtatctctactatggtggcccagagtcactgctcattaaaaacaatgagatcatggaggtaagggatccattgtggtgttggctatcataggtcccttgggtgagtggcacttctgtaaactcgggtcaccagcctgcatggaagtgtctggaaggacccgtgttgggttttcatttggatgaagacttggggctcttgttccttcctgactcctcagtcctcccaaacaggaagggcttctcatcagagaccttccctggcaggctggggtgctagtgcacttgcttgcctgactgcttttagtagccactgagtgaaacccaattttaactggcattggtggtaagggggcagggaagggaaggaatttgactgaaaagtctgaggctacagctgaggcgttaatagtgatatcatcaggaaatatcctagatgacgtcttctcccttgtcactaataaaagaattatatcccctaaaaacatccctcaaatcacaacactgtctgttcttccaagatatggaagctgagggcagattacagtctcctcctggctttcctcaaactgagcatcccacagtcatgaagcccacgcctgcttccttcactctccccagccccctgtctgcctcttgtaattcaactggttctagccccgcctgtctaggagtcttgtttctgcctgcttttgtccaaagccaagattttcccctgttccttgccaaaagtggaaatcttgttcattttcctaattgaaactgggagctttgaaccagaagccaaaaatcacccccaattaatcctcagcaaaagagccaggatctcggtcagttatctgacgtctggggggtacctggctgatgagagatgtcaggacacaatcaactgttcaagagcagacctcacacagtggttacaacacggaagctgggccagactagtctaaatccaggctccactgcttctgagctgtgtgactgtggacaagttatttaacctcatatcctcagcttccttgcccataaaatggggataactatctacctcactgggttttttagaggatcttaaaatatgctaaggtgcttagaacagtgcctggcacacagtgatcgccaataggactatgtattcactgcaggcccacttatcctttcttcctattctgtgaaaccttccgtggtcactctctccccacccaaacacacacatggacacacagtgactctcttgtctccctggactactcctctgatggttttagtctcgaggatgtgggcttatttgtaaacaaaagtgcgctggtgtttacaactaatttttgtgtgtgtgtgaaacagtctcactctgcccccaggctggagtgcagtggtgcaatttcggctcactgcaacctctgcctcctgggttcacaccattctcctgcctcggcctcccgagtagctaggattacaggcacctgccaccacacccagctaatttgttgtatttttagtagagacggggtttcaccatgttggccagatggtctcgaactcctgacctcagcctcccaaagtgttgggattacaggcatgagccactgcacacggctgtttacaactaactgatcacaaccagttatggatttctgtattccttctccactcccactgcttcatttgtctagccttaacaaaaaaaaaaaaaaaaaaaaaaaaaaaaaaaaaaaaaaaaaaaaaaaaaaag

SEQ ID NO: 446 - DNA, 3299 bp, Homo sapiens
ccttgggattatttaatctggctcctcttgtggttatctttgagaaggcaccgtggtcctagactctttgccctcaatagggcatctgctaaaagctttttaaaacttatcattagctgggtgtggtggcacacacctgtagtcccagctgttcaggaggttgaggcaggaggatcacttgagtccaggaggctcagtgaggctgcagtgagctgtgaccacacctgtgaataaccagtgcactccagcctgggtaatggagtgagaccctgtctctcagaaataaataaataaatctttgcagggagaacaggggagacgattcctttcttaaatgcatctccttgacgcccacaggcccacccactccctggccctccatagtctcctcctgggcccaaatgtgaggacagtacagcctcagccaggagcccttctgattccttgttctcagactcccattggaatacgatctggggccgttcagtcatttggagtggtttttcgtcacttgacttctcggaatgtgttatctcttatttttatctctggaaattgttggtgtccgtggtcccaggatgctggaggtggaaattccttgggtttctttcattatacttgctcgggctggcccatctggtgagtctgccagctgtgtgaacccaggtgctgtttgaagcccttccccagtaaacaagtgcgtcaagtctgagtgagacacttggcaccgtcacaccgctctccttccacatcccctcttgtacgttctccagcgacacatccccagggttggacagggcaccctcatattggcttcagggacataggagggccagtcctgaccccacgttgtgtgtgtgactttggtcacgtggcccaacctctctgagtctatcccccctcccctcctttaaggtaaagacatgaagtgcttgttgtgaagattaaataagctaataatgtcaagtaaatgttagctttgcagtaatctttcctgtccgccacgttactgcttttttcgagacccttttctggagttactcccagcaagctgttactcagacgtcctgttggttaataaagctgtccctgcagcagttctgctattgtatagactcagtcttaaaatagtgggcttgatgtgacatatttcttcataatattgtgtatgtgcagcctctgtgtaattgcattatgcacctttattgcatagttgaagcagtggcaggaaaggatgccatatgtgttactgggagattattcagtgggtattttttctcactcttccgtttcagtaccagtgaaggacaagaaacttctggaggtcaaactgggggagctgccaagctggatcttgatgcgggacttcagtcctagtggcattttcggagcgtttcaaagaggtcagagccttgtggatgtctgtaaatgaaagcaaatctctgggtcttcagatctcttttttgccatgaattaatttgggcaatgaaggccttgttgtctgaaagcagtaagttatgtagaggatgacagggagggatgctaggccttggacttctgtggttgattggccctttcaaaggctggctctgagatattacagccaagaacatgtttcctgttgcttggaatcagtatgtctgcctctgtcttagagaaatcctaagacttctttaagaggaaaatgaattggaaccgtagtgggcattagtctataatatgatgctctcctccctgccagaacttcaggacaaatatttgaaatggcctatcttggcctggtgtggtggcttatgcctgtaatcccggcacttcgggaggccaaggctggaggattgcttgagccgagtttagaccagcctaggcaatatggagagaccccatctctataaaaaaaaccacacaagaaaaattagctggctgtggtggtgcatgcctgtagtcccagctactcaggaggctataagctcacagccaaaggggagaggtggaatccaggtaggcctagttcaggagctggtatgtgcttatagttcaggctatggggatgagagaccttactggcatttgtgcttgtcatctttatcagccagtgaatgcagggcgaggggcttaaacagccagagcaggactaggtccctgaatgtcagccagactcaactgtgtgctcaacttcactcaaatgtgaagcccagcagggcagtgagcgcctcttgcgtttgcaggttactaccggtactacaacaagtacatcaatgtgaagaaggggagcatctcggggattaccatggtgctggcatgctacgtgctctttagctactccttttcctacaagcatctcagtgagtgcctctgcggcgtcttgcctttagttcccatgagagggtggtggtgactgatttcattagatacagcagcccaccttcttctgaggctgagggacctttagttaaagttccttatgtttccacctaaaagaattggagggacctatcagagtacagtatgtgggatattgtttgaaatgagaaaattgtgacaaagagaacacaggaaaatcaagatgaagccagggtaaagagagtacttagaagcattctttaaaatacagcacactgtgaaaatttggctcgattttcctagtagccaatgcagaaagagaaatgagttgagtgggataatctggtaccccagaaaagcatggctgttccggctctgaggcttgagaggagcttgtctggtgggagattggcgggaggtgtcggtggcagcctctgactaggctgtttctgacagtgtagtgtacaccccctacccccacctcactcccattctgtggcaccagggcggtcctgcctctgaaggacgggttctctggggctgtttgtctgagcgtgtgttccctctgttccttctggaaagaaagtggttggccaggtggcaggttggctcctgaggtgtctttgtgccccccgggtctgctgattctgcagagacaccggcaggcgggtcatgggtcatctctgaagggaattctcaggaaggctttgtgtgatctcagcctgcttcctgccatgctgtgccttcactgtaaccttttaagatacttaccatcttgccttcctgacttcagagcacgagcggctccgcaaataccactgaagaggacacactctgcacccccccaccccacgaccttggcccgagcccctccgtgaggaacacaatctcaatcgttgctgaatcctttcatatcctaataggaattaacctccaaataaaacatgactggtacgtgt

SEQ ID NO: 447 - DNA, 3827 bp, Homo sapiens
atctggaaggggagcggtagaacgtcagggtatccacctgcaccccactcccaagtagcttgaaaaagggaggacagtctttccccagcaggggtcggagggccccctcaggaagcctaaggtcgtgctagtgtggtgacccccatacattcctccctgctccccactgccaggaggaccactgtccccagccagccaaagtaatgacacattccagccctgcccagcatgctgacctttggcctctaaccctcagtgggcccccaggtcagggcaggggcactgagtggcctggctctgaggaagggagtcaggggaagcctgtcccgggaaggcccaggctgagaggccctggctctggccaggctgggatctgggtgggaggctggggctcttcttcttccatctccttggtgacacccagcccaggggcacccccttccccagcccccacctggagagacatggcccctgccaagctggtcccttcaaatggatcctttgtggactttagctcatttgtggaggaaccccaggtagggacgccccttgttcctcacccccaccccacttaggtcctgggcccccactgccaggctgggcccagcttgctcagtcaaggggctgccaggcccccagaaaacacttggagccatcgggtagcgatggtctatgccatggggaacacctccattggtgtggccaagctgcccccattcctatccacccctctccccaccccgtcctgtccatgcgcttccagggccccacggtccccaggaggacgcttcctggccaaagccccaagcctttggtgagaagccaattcccacttgacagaaggcgtccatccattcatctcattggccaaggacaaactctcctctgggacgtctgggactggcatttgtcccccactcaaattatcaaagctttctgctcagtcagttgtgtggggatggtgagggaagaggggtcacatgagggaggaaactgtatccatgcatgcatgataatgcgtggcagagactgcaacagggattgtgtgttcagagatcatatgcatatgtgtagggctggagcgtgtgtgtgtcttgagattgtgtgtgttgcagtcatcatatctatgtgttacagattgtgtatgttagccttgtgtatgtgtgcttgattgaggtggtgtatttgggttgaaattgtgtcatatgtgtgtgctatccatctcgtgtttagaggctgtatatgttagcttgtgtaagaatgtgttttcaaaacagtgtgtgtattgggagtgatgggtatgtgttaggtatgtgatgggttgtagaagcgtgtgtttgagagaattcagagacatttgaaggctgctgtgtgcatgtttgggggtctgaaaagacagttgtgtgcatggatgtgtgcgtggggagaaagaacgtgggtaagatgtcccttcccagccctgagaccactggtcacagttggccacctccaacgggagaccttgtccttggcctagagtcctcccacccttggggggctcctgcctgaggtcctcagaatcccactgcaatggacccaggcagcgccccaggaagccatgctgggcccccgccagggcctatcccaaaagcaggggccagggagggggcgacttgcctgcccctgaagcccttgttcccattggccccagtttgcattctgcaggttttccattttagtgggttctgcttttatttcagagacagacatgtgtcttctctgtccgtttccaataggtaaagccatatcagttagactgcaatactttaaacacgagacaaaacaatccatatgtttagggaaccagaaaagtcccctggtctgtcccttctttggggagcagggcctcgacagctccagctcccttgacctaccttcctccccgcaccccgcccccaccttgtgcccctgtgtccagccccccagggggcctgtgtctgtgtctgtgcctgtgtctgtgatggggagccgcctcgcacccctgttgtctgcttgtctctttgtgtctgttatcctgggcaggatggtcattctcaaaaaccctggggtcctgggccagagacaggcagggcccagtccaggggccccaggcctccccagtcccagtgtgcgagccccacttggacacaagtgttcagagaggtccccctctgccacttgacagggaccttcaaacctcgacagtgatgcaaggacacagagagtaccagataggtagcagagaccaaggcgcagggtgcttcagatgagcaagagaacccagtcgaaccagataccccaggtgggccggagggaccccagaccttcagagggctgccctggtgttctccacagtgcagtccctctgtattcccagagtgggatcggggctttcagccccaccctgatgcctgccctccaggatggctggtttagtctgggtccatgtcccagacccctctattctgctccaggacagcaggacttcaggtcttcctgggggtggatataggagaaaatttctgcctggcacacacctggctccaaccactgccaagtgatcactcttaggcccaggggaacacaatgactatcattactgatgcagacctggctgtggagagcagctaatgtgtggcccagagagcctgtctgtgtggagcacgtagtgcacagaatacgtgagagttgctctggcaggggcagaatcctcacaggatcgcctgggaggtgaggtgtgtgtgacccactggatgggagggcaatgagtgtgcacatacaaatggggcagtgtgcatgcaacacacttaggggaggagtggccccagaattcagcacgcacacaacacacaagggagagaacccccagatgagaaaataggaaggagcaatcatttgtagatgggtgaaaaaagaatgaggttcaagggagcgtgcaccaggtgaggtgagcgtgtgtgctctcagggaagggcccaggatcccatgcctgggaggagctgccagagagaagcaaaaaggcggctgtggatcgccctgggctgggcaccagtgacaggtcaggatctccaaacatggacgtcctcccctccaaatccagaagctcccagaaggtgtccttaactgcaaagctgtgcagggtactcctccagatggaatcaggaagtcgagacaccatcccaggtgtgtgtaagagagagagagagaacagggaggatacagaagtattgcagcccagatcccctatcagggggacagctggtgggcaaagcagccaccccacagccttgtggctagagtacagtggggtagaccctccagccccaatagccctagtacccagctggcagggttgcccacccctgctgtccacctgctccatcctctagggttccacaggcccctgaccgcacagggaggctggggccagcctggtctcccaggcctgaggacatgcctcccaccaaatgtcccctgctccagtcccactcctgtcaccccacgctctgcactggggagaaaacgggaggtgctcgtgctggccctgggtgggagcggggagtcctggtgagaccccggtgagatggaccatcctgcccccgtgggggatcccctttcccacatccgtgctgtgtcattgttgctctgcttcctttcaatgtgtcagtgcctggggggaggggaggagcaccccctcagcccccctgaacctgaccaaaagccatggctgttgctcccccctttgtatgatgcaaatgctgaaatgtacaaaatcaaccatgacaacaaagaaaaagaccttgtacagc

SEQ ID NO: 448 - DNA, 2452 bp, Homo sapiens
tttaaagggaactggagggaaacacatcagcatgttagtaagtggtctgttgtccaggtggtgaaatttcagatgattttcatttctcgtgcctgtgtctcaggtcctctggaaggcagacaccagggtggcattggaggtgcaggaggtttattcgaggaaatttgactgtgagagaggaaggagagagggagcaggaggaggcagggagagcctgggtctggctttgcaggttggacccgtatgagtggagagggtaggaaggaagtgcagtgctgagaaaggatcagccaggcctactggaaagcccagagcagagcttgccagatacaggaatcccacgtccattggaaatggcccagcaccggggtctgccgtgagcagcctgctgtgagagcatggcctgggcgtggaggctgtcagctcactgcagtgctgcagagggccgcacgatacccctccctggctgcgtggtccctgtcttggtgtgtcctgagtctgcatcactttgtaaagccccactcttctgcccaggtaccaaggaaaggcagatgcccccgtggccttggtggttcacatggccccagcatctgtgcttgtggacagcaggtaccagcagtggatggagaggtttgggcctgacacccagcacttggtcctgaatgagaactgtgcctcagttcacaaccttcgcagccacaagattcaaacccagctcaacctcatccacccggacatcttccccctgctcaccagtttccgctaaggagggccccaccctcagtgtgcccatggttcagggtgaatgcctcctcaagtaccagctccgtcccaggagggagtggcagagggatgccattattacttgcaatcctgaggaattcatagttgaggcgctgcagcttcccaacttccagcagagcgtgcaggagtacaggaggagtgcgcaggacggcccagccccagcagagaaaagaagtcagtacccagaaatcatcttccttggaacagggtctgccatcccgatgaagattcgaaatgtcagtgccacacttgtcaacataagccccgacacgtctctgctactggactgtggtgagggcacatttgggcagctgtgccgtcattacggagaccaggtggacagggtcctgggcaccctggctgctgtgtttgtgtcccacctgcacgcagatcaccacacgggcttgccaagtatcttgctgcagagagaacgcgccttggcatctttgggaaagccgcttcaccctttgctggtggttgcccccaaccagctcaaagcctggctccagcagtaccacaaccagtgccaggaggtcctgcaccacatcagtatgattcctgccaaatgccttcaggaaggggctgagatctccagtcctgcagtggaaagattgatcagttcgctgttgcgaacatgtgatttggaagagtttcagacctgtctggtgcggcactgcaagcatgcgtttggctgtgcgctggtgcacacctctggctggaaagtggtctattccggggacaccatgccctgcgaggctctggtccggatggggaaagatgccaccctcctgatacatgaagccaccctggaagatggtttggaagaggaagcagtggaaaagacacacagcacaacgtcccaagccatcagcgtggggatgcggatgaacgcggagttcattatgctgaaccacttcagccagcgctatgccaaggtccccctcttcagccccaacttcagcgagaaagtgggagttgcctttgaccacatgaaggtctgctttggagactttccaacaatgcccaagctgattcccccactgaaagccctgtttgctggcgacatcgaggagatggaggagcgcagggagaagcgggagctgcggcaggtgcgggcggccctcctgtccagggagctggcaggcggcctggaggatggggagcctcagcagaagcgggcccacacagaggagccacaggccaagaaggtcagagcccagtgaagatctgggagaccctgaactcagaaggctgtgtgtcttctgccccacgcacgcacccgtatctgccctccttgctggtagaagctgaagagcacggtcccccaggaggcagctcaggataggtggtatggagctgtgccgaggcttggggtcccacataagcactagtctatagatgcctcttaggactggtgcctggcacagctgcgggccaggaggctgccacacggaagcaagcagatgaactaatttcatttcaaggcagtttttaaagaagtcatggaaacagacggcggcacctttcctctaatccagcaaaatgattccctgcacaccagagacaagcagagtaacaggatcagtgggtctaagtgtccgagacttaacgaaaatagtatttcagctgcaataaagattgagtttgc

SEQ ID NO: 449 - DNA, 2412 bp, Homo sapiens
atggggttttgccatgttgggcaggctggtctcgaactcctgacctcaagtgatctgcctgccacggcctcccaaagtgctgggattacaggcatgagccaccgtgcctggctgaaagacaaagcttttacaactattcttaaattatcaacttttgatagataatatccttgttttctgtatcttgctttgatactgctttcaaggagataatctcattaaagcattttactaaaggccagtatagtgaatgtaatcacttttacacagaattgtgtcagcatgacaaatgtgactactgagacatcattctgttaacattagaataagtttgtaggtggtaatggaatatgtggcagttaacgatcatgagctaggagagtggaacacttgctgtctttttcatagctagtcataggtccttagcgtgtagtgatctttattatcttccaaggtgaagaaaggaaaaggctcgtatgttgagaagcataggaacttgagtcccgcaggtgttcaagtgggctaggctggtgtgggttttcagatgatcattgagtttttctcccaaatttgtataggcactagcacagtaatcctgtgcacttaaatctggcagcagctgtcaggggtgatgggctggtatggggaacccctcagtccccagaggagggtttacacaatattgcagggggctgttgccctggggttttcaagatgcaccattttatctcctagtgctgggctttgacaaacttcctctgtggggtaccatcctcatctcggtgggatgtgcagttttctgtgcccttatcgtctggttctttgtatgtcccaggatgaagagaaaaattgaacgagaaataaagtgtagtccttctgaaagccccttaatggaaaaaaagaatagcttgaaagaagaccatgaagaaacaaagttgtctgttggtgatattgaaaacaagcatcctgtttctgaggtagggcctgccactgtgcccctccaggctgtggtggaggagagaacagtctcattcaaacttggagatttggaggaagctccagagagagagaggcttcccagcgtggacttgaaagaggaaaccagcatagatagcaccgtgaatggtgcagtgcagttgcctaatgggaaccttgtccagttcagtcaagccgtcagcaaccaaataaactccagtggccactaccagtatcacaccgtgcataaggattccggcctgtacaaagagctactccataaattacatcttgccaaggtgggagattgcatgggagactccggtgacaaacccttaaggcgcaataatagctatacttcctataccatggcaatatgtggcatgcctctggattcattccgtgccaaagaaggtgaacagaagggcgaagaaatggagaagctgacatggcctaatgcagactccaagaagcgaattcgaatggacagttacaccagttactgcaatgctgtgtctgaccttcactcagcatctgagatagacatgagtgtcaaggcagagatgggtctaggtgacagaaaaggaagtaatggctctctagaagaatggtatgaccaggataagcctgaagtctctctcctcttccagttcctgcagatccttacagcctgctttgggtcattcgcccatggtggcaatgacgtaagcaatgccattgggcctctggttgctttatatttggtttatgacacaggagatgtttcttcaaaagtggcaacaccaatatggcttttgtgctaaatatgaattgtctaaaaattagctgtgtaaaatagcccgggttccactggctcctgctgaggtcccctttccttctgggctgtgaattcctgtacatatttctctactttttgtatcaggcttcaattccattatgttttaatgttgtctctgaagatgacttgtgatttttttttcttttttttaaaccatgaagagccgtttgacagagcatgctctgcgttgttggtttcaccagcttctgccctcacatgcacagggatttaacaacaaaaatataactacaacttcccttgtagtctcttatataagtagagtccttggtactctgccctcctgtcagtagtggcaggatctattggcatattcgggagcttcttagagggatgaggttctttgaacacagtgaaaatttaaattagtaacttttttgcaagcagtttattgactgttattgctaagaagaagtaagaaagaaaaagcctgttggcaatcttggttatttctttaagatttctggcagtgtgggatggatgaatgaagtggaatgtgaactttgggcaagttaaatgggacagccttccatgttcatttgtctacctcttaactgaataaaaaagcctacagtttttag

SEQ ID NO: 450 - DNA, 2081 bp, Homo sapiens
aatatgatgttagctgtgggcttatcgtacatgacccttactgtgttgaggtccattccttctgtgcctaatttattgagagtttttaatcatgaaaggatgtttaattttgttgaatacctttctccatcaattgagatgatcaggttgggcgtggtggctcacgcctgtggtcccagcactttgggaggctgaggtgggcagatcacaagatcaggagatggagaccatcctggctagtttttgtattttcagtggagatgggtcttcaccatgttggccaggctgctctcaaactcctgacctcaagtctgcctgccttcgcctcccaaggtgctgggattacagacatgagcctggcctggatgatctttttaatgtgttgttgaatttggtttgctggtcttgctttgtcacccaggctggagtgcagtggcataatcttggtttactgcaggccttaaactcctgggctcaagtaatcctcctgtctcagtcttttaaagtgctggtattacaggtgtgagccacattgcacctggccttattgaggatttttgtatctatgctgatgtagtcccattggtctataattttcttttcttgtagtgtccttgtctggctattgttcacgagcatgttgttcaatttctttgtatttgtgaaattttccaaaattctttttattatttctagtttcataccattgtggtcagaaaagatacttggtatgatttcagtcttctaaagtttattaagactcgttttgtggcctaacatgtgagttgtcctcaagaatgttccatgtgcacttgggaagaatgtattttctgctgctgttggatggaatgttctttatgtctgttagtttcctttggtctaaagtgtagttcaagtttgatgtttcctttttgattttctggctttattgaaagtggactattgaagtctcctactattattattattatggaaatggagtcctgctttgtcacccaggctggagtgcagtggcaaaatctcggctcactgaaacctcctcctcccgggttcgagtgattctcctccctcagcctcctgagtagctgagattacaggtgggagccaccatgtccagctaatttttgtatttttagtggggatgtgatttcgccatgttggccaggctggtcttgaacccttgagttccagtgatctgcccacgtcagcctcccagggtgctggggttgcaggtgtgagccaccacacctggcctaaagtcccctactattattgtattataatctctctctctctagatgtattgatatttgccttatgtatctagaagctttgatgttggatgtatttacagttgtcccttggtgtgggattgcttccagtacctctgtgtgtaacaaaagctgcaccattcaagtcccacagttgccctgcgaaacctctgtatatgaaaagttggccctccatgtacatgggtttcccatcctgtgagtactgtatttttgatcctcatttggttggaaaaaatctgcatataagtggacctgtgcagttcaaacccgtgttgttcaagggtcagctgtatatttacagttgttatattgtcttgataaattgatcctctgtcattatgtaatgatgttctttgtcttgttttacagtttttacttagtctgttttaagtatagctacccctgctctctttggtttccatttgcctgaaatgtctttttctagcctttcaccttcattctatgtgtgttcttaaatgtgaagttaatcttcataggccacatatagttgggtctgtttttaaatttttgatagtatccaacctaatgggtgtgaggtgataattctttgtggttttgatttgcatttctctaatgattagtgatgttgagcatctttacatatgattgttggccatttgtgtcccttctttggagactattcaaagtcctttacccattttaaaaatgaaggcatttgccctttgttgttgagttgtaggaattttaaaaatatattctggatagtaaatccttttcagatataagagtgcaaaaaaaaaaaaaaag

SEQ ID NO: 451 - DNA, 3137 bp, Homo sapiens
attcatgcactcttccatctttttgccattgtgccagctcaatttaaatgtatctgctctgtatctgttcaagtggagataatccatgcaaatcaggagccgtggctctcaatgcctggttcacagagaggactcagcttgaggaggtcactcgttcacagccgctcctcccattatatttttccccttattgcagaactgctgtatgtatacagtgactgaaaggactcaatttactgcaactgctgcctggctttacttacaacttttttttttttataaaggaacttacctccatctgtcttttcaaggttacagaccacttactctaaacttcacaaatggttctgaagagtatggagcctacgtagattcataagttacaagatcactgtttggcaatacgaggggatgtgtatctaaaatgacaaactgatcctggcacttgctacttattacagagcccaatgtttccaaaggacattaattttgatttctccaatgaaggcttgtggctgtccttatgctttacaaaacattaccaaatcagagccgaaaagaaaactggtatttatggcacaatgaaaaatttcatctttcccagaatgatatgaagatcaatgatgcagactgatggttttgatgaagctgggcatttataactagattcattaaggaatacaaagaaaatacttaaagggatcaataatggtgtcttctggttgcagaatgcgaagtctgtggtttatcattgtaatcagcttcttaccaaatacagaaggtttcagcagagcagctttaccatttgggctggtgaggcgagaattatcctgtgaaggttattctatagatctgcgatgcccgggcagtgatgtcatcatgattgagagcgctaactatggtcggacggatgacaagatttgtgatgctgacccatttcagatggagaatacagactgctacctccccgatgccttcaaaattatgactcaaaggtgcaacaatcgaacacagtgtatagtagttactgggtcagatgtgtttcctgatccatgtcctggaacatacaaataccttgaagtccaatatgaatgtgtcccttacagacattcactgaacaatgccagggatacaagtgccatggatactctaccgctaaatggtaattttaacaacagctactcgctgcacaagggtgactataatgacagcgtgcaagttgtggactgtggactaagtctgaatgatactgcttttgagaaaatgatcatttcagaattagtgcacaacaacttacggggcagcagcaagactcacaacctcgagctcacgctaccagtcaaacctgtgattggaggtagcagcagtgaagatgatgctattgtggcagatgcttcatctttaatgcacagcgacaacccagggctggagctccatcacaaagaactcgaggcaccacttattcctcagcggactcactcccttctgtaccaaccccagaagaaagtgaagtccgagggaactgacagctatgtctcccaactgacagcagaggctgaagatcacctacagtcccccaacagagactctctttatacaagcatgcccaatcttagagactctccctatccggagagcagccctgacatggaagaagacctctctccctccaggaggagtgagaatgaggacatttactataaaagcatgccaaatcttggagctggccatcagcttcagatgtgctaccagatcagcaggggcaatagtgatggttatataatccccattaacaaagaagggtgtattccagaaggagatgttagagaaggacaaatgcagctggttacaagtctttaatcatacagctaaggaattccaagggccacatgcgagtattaataaataaagacaccattggcctgacgcagctccctcaaactctgcttgaagagatgactcttgacctgtggttctctggtgtaaaaaagatgactgaaccttgcagttctgtgaatttttataaaacatacaaaaactttgtatatacacagagtatactaaagtgaattatttgttacaaagaaaagagatgccagccaggtattttaagattctgctgctgtttagagaaattgtgaaacaagcaaaacaaaactttccagccattttactgcagcagtctgtgaactaaatttgtaaatatggctgcaccatttttgtaggcctgcattgtattatatacaagacgtaggctttaaaatcctgtgggacaaatttactgtaccttactattcctgacaagacttggaaaagcaggagagatattctgcatcagtttgcagttcactgcaaatcttttacattaaggcaaagattgaaaacatgcttaaccactagcaatcaagccacaggccttatttcatatgtttcctcaactgtacaatgaactattctcatgaaaaatggctaaagaaattatattttgttctattgctagggtaaaataaatacatttgtgtccaactgaaatataattgtcattaaaataattttaaagagtgaagaaaatattgtgaaaagctcttggttgcacatgttatgaaatgttttttcttacactttgtcatggtaagttctactcattttcacttcttttccactgtatacagtgttctgctttgacaaagttagtctttattacttacatttaaatttcttattgccaaaaggacgtgttttatggggagaaacaaactctttgaagccagttatgtcatgccttgcacaaaagtgatgaaatctagaaaagattgtgtgtcacccctgtttattcttgaacagagggcaaagagggcactgggcacttctcacaaactttctagtgaacaaaaggtgcctattcttttttaaaaaaataaaataaaacataaatattactcttccatattccttctgcctatatttagtaattaatttattttatgataaagttctaatgaaatgtaaattgtttcagcaaaattctgcttttttttcatccctttgtgtaaacctgttaataatgagcccatcactaatatccagtgtaaagtttaacacggtttgacagtaaataaatgtgaattttttcaagt

SEQ ID NO: 452 - DNA, 2468 bp, Homo sapiens
aggaaatggaactgaagaactctgtcttttgacatcaggaaaacttagctattctctatcatggagcttagatgaaaatggtcttcctctgatacctatgccacaatcattaagatcttcttactgcagtatgttaaggaatgtagatgcaagaagtgttcctggaattccatggctcatgaatgaacagaagctttttgaatgggcaaatgaagtcagaattgatccaaataatccagaatattctgatttaatggaatctgttacgtacatgagacttaaggggcaggatattccaaagtattttcgtcttgaacagttgcaagatgaatttaacttcgtttctgaagaggaaatggcaaagagtaaacgtttccagctattgcaacttagaaatgcaggtcaattagataatttccttctacagcaaatgcccctccatgatacagagattccagatttagtcttccagccaggtgcagtgactcatgcctgtaatctcggcactctggggagctgaggcagaaggatagtttgagtccaggagtttgagaccaacctgggcgaaatggagtatgaaagtcagaaagagaaggaggtatccgtttcagatgtaaattctattacagcacaaaggattaattctgccaattttctgaaaaaggtgagaaggttgataatgaagagaattgttaaaattagcaaatgtaacttgtcagatattgtgaatgattatgaagaaattgtatctacaagccaattgacagatgcagtttgtaagtttgttgaaccacggagaaagttaaaacctcagaggaaagaaaggaaaaaagtcacagcgcaggcgatctctgacggagatattaagattcttgtccgaatagtgagggcctataatattcctaccagaaaaacaacaattaatggcttctgctgccaactgccctattccatgccactgactctctcagtactggaagcagaaaggtggagaaaatgccccaggaaagctgcgaagcaaatgtggaatgatccttggatatgcctacttgtttgaaatcatctatatcttgcctcagacatagagaaacaatcaaatcagtagcctcagatgagaccttacatgaggatactgtacatccattcgtggaagtttctttccagcacactgtatacaaaaccaatacagcaagtggatctcatccatgctggaatgaagaaattaaagtagattttgtctcaccaggacatgattatagcttctcaagcttatctaaaataaaagataacatatatatcaacatttttgatgaaatgatgactgaaaaacatgaggatcactgtctcaagagctgtagtggtcactcatatataagaaagaattggcttggatgcattgtcttccctttttctgctcttctgcaacaatctgaggatcgaaaggactctgaagagtaaagtgatggaatggcgacctaaacacccaacacattggaatcgacagtgtacttttattttgcgacaaatccttcctaagctggaatttggcataggaagctttgtttcatctgaaggagataatgaatttgaaagaatactacaattttattgggtcacgggatttcccatccagatgccatacattgatgtacagtcaattattgatgctgtttatcaaactggaattcactctgctgaatttccccagacagaatttgctttagctgtatacattcacccatacccaaacaacatattatctgtgtgggtctatttggcttccttagttcaacatcaatgaaaaggaagcagagcaaagtaaaagattgtactatagtcctctagtaccaacaaaaacttttctggtaccttgagattttgctgtttattctcaagtccagctaagtgctgggcccaatttttgattcacttacagagctgggcactatggagactcgcacccctgagtgagtctttgaggaggagtctagatgagcttctcaccagagacctctccaggaaggacctttggatagtctggctttcttgggtcactgtctgcagtaggtcttattctgggaaagaagcaattttggcctcttctcctaagaccaatgtttctcaaattgtagaattcacaccacctccatttgaatcatctggagagccttgttgaaaatgcagattactagatcctcctcaagacccactgaatcagcacctctgggagtgaagctacagactctgcattattttcaacaagctccccagataattctgatgcactgttatgagggagagcccagccttatagaatgttgtcactactaaactaaggctggtacgtttgatgctgggtctgatacaatttcagatggaagctgctcgagtggaaaactaaggtcattgcctctcatggataaaatgttatttcactggtaaagaaaaataaaataaaatctaccatg

SEQ ID NO: 453 - DNA, 2515 bp, Homo sapiens
ataataaacggatggttttacccccaagaacccttcttctcattgactgatgtgtttgcagagagctcagaactgctctcacaggctgtaaaaagctataaaaatgtaaactatcattgacatcatctgcaagaggaatttctcatactgacattcctcttctcacgatggggattcatgtcagcctgtgcttggtaggggaagaggccaggggagtgtaaaatatgaggatgcaggatcaggcgggctctgatttgcaagcagccgaggcagatgccaatgatcatgcagagaaggagtttattgaagaatgctgcgagctcctacagctgtgatgaggtgggtgagccaagcccacttccaggaacggtgtcccaaatcaccccacaggacagtgggcctgatgggaaaccggcagcattgcagccaccgaacggggaaggcacccatcatatggggatgctcccacagcacagagaggtgcccatcatatggagatgctcccactgcacagatactcccattgcacagatactcccacagcacagagaggtgcccatcatatggggatgctcccactgcacagatactcccattgcacagatactcccaccgcacagagaggcacccatgatatggggatgctcccactgcacagatgctcccacggcacagaaaggcacccatcatatggggatgttcccactgcacagatactcccattgcacagatactcccaccgcacagagaggcacccatcatatggggatgctcccactgcacagatgctcccacggcacagagaggcacccatcatatggggatgctcccactgcacagatactcccattgcacagatactcccaccgcacagagaggcacccatcatatggggatgctcccactgcacagatgctcccacggcacagagaggcacccatcatatggggatgatcccactgcacagatactcccattgcacagatgctcccaccacacagagaggcgcccatcatatggggatgctcccactgcacagatactcccattgcacagatgctcccaccgcacagagaggcacccatgatatggggatgctcccactgcacagatgctcccaccacacagagaggcgcccttcatatggggatgatcccactgcacagatgctcccactgcacagatgatctcattgcacagatgctcccactgacagagaggcacccatcatatggggatgctcccactgcacagatgctcccacggcacagagaggcgcccatcatatggggatgctcccactgcacagatactcccgttgcacagatgctcccaccgcacagagaggcgcccatcatatggggatgatcccactgcacagatactcccaccatgcagagaggctcccatgatatggggatgctcccactgcacaaatgttcccactgcacagatactctcaccacacagagaggcgcccatcatatggggatgatcccacggcacagatgatcccattgcacagatgctaccactgcacagagaggcacccatcatgtggggatactcttgctgcacagatgctccccacacacagagatgccccagttacgctggaccaaacccaactgccaccagcgccaatacccattgtgttccaggcacttcactttgtagccactgtgtcctccctcaccacccaagctgggcatcgctgggtgatgaattctagggcagcctcctctctcagggtggacatcacaatggtgcagtctgtcactgtctggtccctggtggcaaagggaccgggtaaacccgttgtcaggccaccttggggctgtgagatgtctgtaaggtcggtagtgccagtatggtaaaggcatttgaggggtgggcaggtcggtgcacaagatcagcgtccaccctgctgtcaaccagggcagcaggagcatggccacctcagctgcaaatcaggagggtttccattattggacccaaagatcgcagaaaacccagtggaggcagtttgcaggcggtactaaccacacaatgcatttgctctgacacaggaccagggcacgtagtagacgggcaggggtcagggaacctgcctggggttctgggccaggctacatagggataaagcaagccccttaaccgactggatcccaggatcctggcccataaagggagagggttggaagaagatcttccacatcccttttgccctaacctggcagcatacacccaaactggggggtagtgttggctttgtggttttaataaggttaaaagcaggccaagtcttagctcaagaagctggcaggctgagttaattccggagaaaacaaacgggaagcccaagaccttggacatagatcttttattccctcctccttgaaattctccatccccaagcgcttattaatgtggaatttgctgcttgggggagaaccaactctccgacttcagaaacatttgtaagagcaaatttaataaagctaagaataatacc

SEQ ID NO: 454 - DNA, 3087 bp, Homo sapiens
gtatttttagtagagacggggtttcaccatgttgggcaggctggtctgaactcctgacctcaagtgattcgtcagcctcagcctcccaaagtcccgggattacaggcgtgagccactgtgcccccacctatccccatttttcaaatgagatgactgaggttcaaagtagttcagtacctgccccaaagccacaaagcctgtgctactctgcccccaagaattagtgatttccaggctgtgcctggctctgctagctagcagctgtgtgaccttggcaagtccgtttgcctctctgagcctatctacctcctctgtataatgggtctggtagtcttcacctacctcaccagctgctgtggagctccgacgagatggtgactgtgaaagcacttgacaaactgaaggcactggacatgccttgtggtcagtgtggcctcaacccagatgtccagtgatttccagggcacaggggctttgagtgggatggccaaagaagacacctccatccaactgggagccacccctgggtcacaaacactccattgcttggtccctcgcagtagctcgaggtcagaagttgactgcagcttgattcacagcccctcgctcagagcagggaggtgggactggcagcacagcaaagacatcgctccttgggggcctccctgttgcatatttcaattaaggcaggtttacagccccccagcgtctgtccggagggggcctgagcagcaggcctggcagcacccactgctcctgcctgaagaggtgctatccagccccggctgtggacatacagtgagattgtacaggccggtctggagcagctgcaggggatatgatctggataagactgagcagacccaggaggctctgcaatgtagagcttattcctcaagctcatggtgagattggagccctaaagagttagccagggtgcagccaccagtgtggaaatccagggatggcgcaggccatggccagctcttcccagctcacgtctgagaaccaagggtctgagcctctctatcagccccaggaaatcctcagccatttggtgctgatcagcgatagggctctggttcacaggatgagtgccagggctcctctggggagaggggccagctgcattccgccccaccctgagagtgagaagggggcagtccccgaccaggaatgggcctacctggtgctaagaatggacataacagttctccctctgaggcttgcatttcatctgtcatggcaagagcactttcaggctcacagtttctcatcttttcaacagtcagggaaaagaaacctatggaatagttcgcatttcacagaggaagaaactgagggccagagctaggggtctctgacacagccatgggatcctgcaccccacactggctctatgtgactctgtagtagtggctaatgtccatcagtcgccccctgctcccctgcctggccatttgcccccaaatagggcagtggtgggagtatatcctggaggagggggaagtgggatataggtagtacttggctgacttcacaattttgctacacccagtctggacctcctgacagtggagtgggatccctgtggcttcctttttcttgtttttgttttgttttgttttttttagatggagtctccctctatcatccaggctggagtgcaatggtgcgatttcagctcactgcaacttccacctcccaggttcaaacaattctcctgtctcagccacctgagtagcttggactacaggcacccgccaccaccccagctactaagttttgtatttttagtagagatggggtttcaccacatggccaggatggtcttgatctcttgaccttgtgatctgcccaccttggcctcgcaaagcactggggttacaggcgtgggccactacgcctggccaatttttttttgttttgtttttttgagatggagtcttgctccatctcccaggctggagagcaatggcgtgatctcagctcactgcaacctctgcctcctgggttcaagcgattctcctgcctcagcctcccaagtagctgggattacaggcacccaccatcatgcccgggttaatttttgtattttcttagagatggggtttcactatgttggccagcctcatctttgaactcctgacctccgatgatccacctgccttggcctcccaaagtgatgggattacaggcgtgagccaccgcacctggccccagtggcttcttcagacttgaaacacaaaatgtggccagctagggatagagagaattctgactttcaacactgctgagccatggcatgggctgcttctgggtagtgagctccctgtccttggggtagacacagccatcccttgggtccttcctccagaccttccaggtacagccctttgctgctcttccctgcctccaaacctttgccagtttttgagtttctttacccaggatgttccatcagatctctctgcttccgggaagtcctattccactgaccacctactgtgtgcacaggcttgtgctgagtggtgctgtggaggggcagaagggagctggaacctggtgatggagagaagtcacagcatgatgaataactcatgtccactgggcacgtgctaggcactgggcattgttctaagtgtatgtcttatctcatttactcctcacagcacgtatgagataagcaatcttacttatgtctaagtagcttccagatgaggaaactgaggctctgggaagtgaagtaacttgcctaaggaaacacaggatgggctatggaaccaggattcaaccacaaacacagtgacttagcatcatctactgcaaacatccactgcagttaaaatgcctggagtgggtggcctggtcactggaggtgagggtcggggctgggtcgtctgagagccaggcgggtcttcggggtgaggggagtgttggggtgaggaaacatgtgaacatgcctcagtctttggagaacttagttactgttaacctgaatgtcaccacccctgactcggagactggcaccaaatggattatgggttcaataaatgtttgttgaatgaataaacgagccccatttgc

SEQ ID NO: 455 - DNA, 2783 bp, Homo sapiens
gctgctgccggctgcgccatccagcacccagactccagcaccggccgaggacccccactccggctgcagggaccctgtcccagcgagaccgcaggcatgtcatccgaaaagtcaggtaaaaacaataacaaaacctcccaccccctccactgtctccagactctccgtcccccttgccccaaccccctcccttacccctcctcagctgtggttctatttcattccccttctctccagctctcaacactcccccagtccccctcctctttctgtctccccctttctcttcctttcctctttccagtggcagcctctgccccttgccaacaacatggtcaggggggtaggttgagagggtgaaggaggtacagccaggttttgcagggatggcatcattgggagtgacagatggacaatcactggctggcatggagacatcctgtgaggaaatatggagacatgaccagatgggggttgtcaagggagcaaaatccagagggctcttcttaatctgccctaaaagaggtcccgagattctcacagaggctggggcactcctccccccactgaaggaacagcagagtggaacacatgtaatcccacatgtgtttatacaactgttgaattgagcacatattaacacagggttgcatgtctacgcatacgcacacacaggactagctcggataggccagcccaaaggcagctatagcaaaggagaggggattaggtctgcaggtgagagctgggtgcatggtgatgaaaaagacagaaaagaagcagaccagagttgtgacctcaaaactagattggaaggaagaaggaggggggcagatggcctagatacagcccctctcttgcccctcaaattagagatggtttctcacccgtctctctctatgtgtctctcccattatctttctccatccctgaccggctgtgtttccccttaccccctcctcaactcatcactgtgtcatctttcctcttatactctcctccactcacctcccccaggactcccagactcagtccctcacacttctccgccgccctacaatgcccctcagcctccagccgaacccccagccccaccgccacaggcagccccttcctcacaccatcaccaccaccaccactaccatcagtctggcaccgccaccctcccgcgcttaggggcagggggcctggcctcttccgcggccaccgctcagcgcggtccctcctcctctgccacgctgccgaggcccccccaccacgcccctcccggccctgctgccggggcacccccacccggctgcgctaccttgccccgcatgccacccgacccttacctgcaggagactcgcttcgagggcccacttcccccgccgccgcccgctgccgccgccccgcccccgccggcgccagcccagactgcccaggcccctggcttcgtggtgcccacgcacgcggggactgtgggcacgctgccgctggggggctacgtagcgcccggataccccctgcagctgcagccttgcactgcttacgtgccggtctacccggtgggcacgccatatgcaggcgggaccccggggggaacaggagtgacctccactctccccccgccgccccagggcccagggctggccctactggagccgaggcgcccgccacacgactacatgcccatcgcggtgctgaccaccatctgttgcttctggcctactggcatcattgccatcttcaaggccgtgcaggtgcgcacggccttggcccgcggagacatggtgtcggccgagatcgcttcacgcgaggcccggaacttctccttcatctccctggccgtgggcatcgcggccatggtgctctgtaccatcctcaccgtagtcatcatcatcgccgcgcagcaccacgagaactactgggatccctaaaaacgcccctggtccggccccactctgcgcccctcgatctcccaggctctttctgcagtcataccgcggacccaatgggcgccctgcacacccgtttctggggccgtcagacttggatacatcgtaaactccgcctccacggaacgtctcgccttgcgagcaagctcggaatccagttcctcaggaacccctccaaaacccacacccccagggacgccgctttccgggatcccggccaaacgccggaccctcagtcgctccaggccccctcaccctcaaagtgtagcgcccccaaccgagcaacctcggtttggtccctaaaaccccgcctcctctataagcaccgccccagctctgacaaaaccccgcctccaggtcggcaggctccgccttcttttcttctccgcggggtgattcagtccagtgattgggtttgtggctccaggcctcgcccacagacggacagacccctccctttcttccggcaaaaggaccgagccctggggtagtaaggcccccacactcctgttttttgcaagtacatttttgtccctcctccacccaggtatctgcctattttcttgctaatcccagaacctttccttttgctttttttaaggacatttgggaagttcctggtgtaggacccttctccctgggataagaaacctgcctgtaaacgctctgtaaatactcccttccacccatcccagcccctgggcagccgggcagaagggaatccaggctatggacctcccaagtccccgctccccgctcccctcggcggccccgccttgttctgatctgtgtgtgagtgtgtgtgaacttctgaaagacaatattaaagagacttagttgatttat

SEQ ID NO: 456 - DNA, 2237 bp, Homo sapiens
ggccttttaagggcattccatgagcaggtaccacaccccaggtgaccacttgaggccactggtggaaaagcagcatgccctggggttcattttcagcctggtcgcgggcggcctcctgtgtgcccctttccctgatggtctggtgccctcggctccctccccacctcctgcccactgcttctcagtgtgatgtgggtgcagtgggtctgaaatgcggcctcctctgtccctttcctctgccggctcggccacccacctgcccacctgcctcatcctcccaggtgaggagctcatctacctggacccccacaccacgcagccagccgtggagcccactgatggctgcttcatcccggacgagagcttccactgccagcacccgccgtgccgcatgagcatcgcggagcttgacccgtccatcgctgtggggtttttctgtaagactgaagatgacttcaatgattggtgccagcaagtcaaaaagctgtctctgcttggaggtgccctgcccatgtttgagctggtggagctgcagccttcacatctggcctgccccgacgtcctgaacctgtccctagattcttctgatgtagagcgactggaaagattcttcgactcagaagatgaagactttgaaatcctgtccctttgaaaatcctggggtcgggggtggcacctgtgagagcctggggctcctggtgccgctgcgtttcatccatcccgcccgctcgcctgccgagggctgcgccccgtgctgcctccccccagagggccacccgctgtgctcgtggactgaggctgcgctgcccgggaggccttactgcttggtgtcagactgcccagctcagagtgcccgtcagggcctgtgcatccgcacgcggagccgtctgttaggagcttccagagtgttctctcgacactgccagccccgtgttagcacctgggcctcagtcccacttgctcccaggcgccggttctgtggttggtttggaattaaagtcctgtttgaagttgtcagacacagacatgaatttctgggcgctccctgagtcagagtctcagaagacctgtgcaggctggcgtgagaggagcggcagccacactgcggccccacgcccaaggactgggctgctctcgaggggggcgcgcccaccgctgtgtcctctctgcccagcctggcttaccaagggctacctcagtgggagatgaggttggaggaacgaaggcgaggttcctccttgctttggggagaaaagtattcaggaagtgggtgtgtgggaaacctgaagatggcgtgcacaggacacagcgtgggcggcctgggcagaagggcggctggctgtcctggagctgctgctggagcctgccctcagagtgtccctttccagcgctgtggcattctgtggcagcttccccaggtgtggtgacggggggggggcggggcctccacctgtgacagccaggcttgagggtggacggcgtgcctctcccaggagccttccccatgtccttgccttgctgagaattgccctcccatgccgctgaggtgttaggtggtttagggccaaaaggggaaaaccacttgagtcttgtggtgtgtggtgggcagacaccacagggtggcatcacctggtggcatttccagaacctcagccccgattccagcacccaccaccgcctgaccctgtgtaacctgctgtcccgggtcccagagtgcactctgccccgctgctctgctgcctgtcctgggaaagtatctttgccccactaggaaatgtaaacaggagggcttggggagcgtgggcacttttctcatgagcagctactgcggcgttggcaggactcgctgctgctgctgctgcttgtgtaggtcggggagccagagatccccgaggacgcgcgccggacagtcggcactgaccggcccacctggtagcagaggacacccccagccccccaagcattgaagacatagtgtatttcctcgtatcctttctcccttgggtgtagttggggtggggaagcagggaaggctggtgcgatctccattccttgggctccacgtccgagttcatggtgcgccgctgtgctgggagctgcagtggtaatgtgtgggacaccttgaccaaaggggagctttgtctcgtgtgttttgaaaaaggcttaatgaagagaatgttgttcattcttagtagtatagtttgcaattcttaatggcaaataataagtttcagtag

SEQ ID NO: 457 - DNA, 2554 bp, Homo sapiens
gcagggattggggatcccggtgctgggagttggcccaggtgggagggactggcccagagcggtgccaggcacaggtgtgagtaagggtcctgggggaggcggggtggtagtggtggcaggggcccacagcgcccagggtgggcctccttccagaccacctcttccactcttggcagcatggcgatggcccgtggcagcatcgagctcggtgttgaaacttgtggaggtcattcatcctcaaaggctgagctcacacaggctgtgcctgccccggcccggccccggcccctctcccccggcctccccactgggcagcaccccagcagctgtgtccctccgcccacttccctggctcaccttagcgtcgtcccccaggaagggcctcagtgtggctggcgggtcccctctgcgggccgtggagggcagtgcaggcaccaggcctcgtggggagagcgtgggccatgggtcgggggtcctcttgccgccccaccctcccttactgaggctcggaggggaagccgctggaggacctgcacctggtacccctcacagcgagacgggctgctttccgggggagctgaggggttctccagagcaggcagctgtggggtgtggggttcccgttggcctccccaccccaaaaccaccctgcagggccagagatgccagtgtctggcaattctgcaacttagggtggctgagctgggtgggggacggacctcttggggcgaggggagagtgtccacagagcatccccagcgtggtccacgctagtgccccagggagccgccagcctcatcctctgtccacccagaccgccctggtgacgtggctggtttccctcctgccttcctggcacctcattggggacgtctgttgtgaaaactaagagagagctccacccctctgtgccctcctcctgtcctgagtcggggtggggggggctggccttggaggggacgtcccctcctcaggctcggagagatttgtctccgtaactggggactttaaatatcgcctctttcactttgacttaatttttgcatgacccttggagaaaggaaaaagtcaaggcctcggttcagagcatcataaagcacagcagccccgagacatcccagagcctcatgggcccagcctttctccctcacagcgggggcggggcaacagccgcatcctcctggccaagctcgccaggagctggaggagctggagaaagcatcctgtcttccctttttcctgtcgggtgccagagaaacatttgctcgggggccacatggaagcaaagaactcagaagctttgcttagagagtaaaaatgtccaaactgcatgtaaaaaaaagtttaatgtcatttagaatcagaggaaaatctgatgccgagaagtgctgcatggttattttaaaaactagaagatacagaaaagattaatgaagaaaatagactagccggcatcccacagtctgattctgtattataattggaaatgtcactcctcactgtggaaatcgaggaagcctcaggataaggaagggggcaggagaggacaggcgtctgaagacatggacgtgggcccatccctgccacggtcctgaggctgcagggggcccacagccctctgtgggctccgtttccctgtccggaaacagggttaggactaactggaattccctctctgctaagcattctccaacccaagggctcacatccacgattgtgaccccttaagggagggaagaggctggggtgatgggaggagcccaggacggcctgggggcagggagctgggaccaagcactcgggggcgggcaccacaggtcacgccttcgcccaccccccaccccggctgatggatcctctgaccctgcgtcctgtcccgaaacgcacctctcccttggaagctatccccagagagagcaggagccactgtggccccatggttcggagccaccacagcaaagtgaattaagggaggtggctcagacctcggctagaagcctcggtggcactcgggagggacttcacaaaccaggatgcggacggggaaagcgccagggcttttcctgtagatgtggggcgggctctgggagtcagttaaggaacacagaattcaggaaggcagtgagccctgggctgaggcagctcccgcacaggcagccacaccacccggggcttccagaggggcagctccagtacaggcagcggcaccacccggggcttccagcgggtccatgtggagagtccctcgaacaaagccctctggccggcacctggcggggctgagcacacgctaggcctcagtcatcctcattggctgtgtcatcctgtaaacaaagatttctcctaacaggctctcaaaatcaacctgcaggatttccccttagaatctaagtgagatctcttgcttcaaataagccttaaagttctccctccagggctgggcgcagtggctcactcctgtaatcccagcactttgggaggctgaggcaagtgggttgctcgaactcaggagtttgataccagcctgggcaacatggtgaaaccccgtctctac

SEQ ID NO: 458 - DNA, 3310 bp, Homo sapiens
agtgtcaatgcggcgctcccgctgaaggagggaaacgcggcgcgtccagtaggggagactgcattgctgagtcctggccctctgaggggacgactgtgcctgagtgctgctgtgccactgggacccgcctctgccatgaaagccatgccctggaactggacctgccttctctcccacctcctcatggtgggcatgggctcctccactttgctcacccggcagccagccccgctgtcccagaagcagcggtcatttgtcacattccgaggagagcccgccgagggtttcaatcacctggtggtggatgagaggacaggacacatttacttgggggccgtcaatcggatttacaagctctccagcgacctgaaggtcttggtgacgcatgagacagggccggacgaggacaaccccaagtgttacccaccccgcatcgtccagacctgcaatgagcccctgaccaccaccaacaatgtcaacaagatgctcctcatagactacaaggagaacaggctgattgcctgtgggagcctgtaccaaggcatctgcaagctgctgaggctggaggacctcttcaagctgggggagccttatcataagaaggagcactatctgtcaggtgtcaacgagagcggctcagtctttggagtgatcgtctcctacagcaacctggatgacaagctgttcattgccacggcagtggatgggaagcccgagtattttcccaccatctccagccggaaactgaccaagaactctgaggcggatggcatgttcgcgtacgtcttccatgatgagttcgtggcctcgatgattaagatcccttcggacaccttcaccatcatccctgactttgatatctactatgtctatggttttagcagtggcaactttgtctactttttgaccctccaacctgagatggtgtctccaccaggctccaccaccaaggagcaggtgtatacatccaagctcgtgaggctttgcaaggaggacacagccttcaactcctatgtagaggtgcccattggctgtgagcgcagtggggtggagtaccgcctgctgcaggctgcctacctgtccaaagcgggggccgtgcttggcaggacccttggagtccatccagatgatgacctgctcttcaccgtcttctccaagggccagaagcggaaaatgaaatccctggatgagtcggccctgtgcatcttcatcttgaagcagataaatgaccgcattaaggagcggctgcagtcttgttaccggggcgagggcacgctggacctggcctggctcaaggtgaaggacatcccctgcagcagtgcgctcttaaccattgacgataacttctgtggcctggacatgaatgctcccctgggagtgtccgacatggtgcgtggaattcccgtcttcacggaggacagggaccgcatgacgtctgtcatcgcatatgtctacaagaaccactctctggcctttgtgggcaccaaaagtggcaagctgaagaaggtgcctggtaccagcctctgccctacccttgagctacagacgggaccccgatcccacagagcaacagtgactctggaactcctgttctccagctgttcatcaaactgagaaaaacttcagagctgtgtaggcttatttagtgtgttgtcagccttggatattggaaaatggaaacagatgagacacatctacctccctgtgaccccagccatacatcatagctcatgtcctgccaccccaagtccttagggaaaaaagactttggagaatgtgtctctgcttagcttggctaggtagttggtctcttttctctgccccaagcgtcccctgggtaattttggacaatggagtgtaggcatgtttgactcttgtggtgttatcacttgtatatgtcagtgaaactaactgattctcccatcggaatatagttatctcttgggcctgatatatggtaggataaccttatgctcatctgtccacttctgcagccaagtcgcctggccagtgtgtgtgtgtgtgtgtgtgtgtgtgtgtgtgtgtgtgtgtatgcttatctgtgtttaaaggtgtgtgtgcatacacagggcagagaggatggagcccaccgtactgcagcatcatgtaattaactcagtgctcagaaccatcccagcctctgcgggaaagagaaaaggaagccaacagtgcctgatgagctgatcatatgtgcaaaagctctgttggcatctggtccaggagagcacccaaaaaaagttaattggtgttgtccagtctcctttccttaagactatggttacaacaaagcgtgagcagtgtctcctgcatggccactatccagcgcaattccataattcccccatagagccggtggggaggaggaggtgagtggcgaaggaagtggaaacacttggtgtcatgtgctcctatcatttctactagcttactgggaaataaagtgtagtcaagagtgtatgaaggcaagatgtaaaattagcgactggtgctaatctggttacttgaaaacaagtgaaagtgctgtagatttgttctgttgctaagaaccaccacactaaacctcgtatagttcctggaggatacacaacagtgtaattctctttagggtgtgccacaggttcctggcctgtgggagggaatgaatcaggagggctcttgagaaccttcatctgtgtgcttgcactgaaagtgagtcccaaagctggagatttagtgagagcgggcaacccctctgtgtctcaccgtccatattctggaggcagaggtttgtaacaggccatgtgcacctgcatagggatgggtaaagcaaggactttgaaagagttgaaaagcattataaacagttgttcagaaatacgtcccaggagttccatgtgaaactggctctgtgtgcattgaagcatggctgttgggaattctaactggtccaacactcctgcaaaacaatgtgtaaatatttaggaagaaacttgaaaatagtcaaatcctttgaactggtgacaattttttaaagaatcaattctaatttgtttcaagggtaataatcaccaagatacacatttcagcatttatttagtctatcaaaaattggaattgatatatacactcatttataggagaatggttaggtagatttggtatatttatgtagtcattgaaaacttagtttataaaggccaatcttgtaactgattcttgtgtgataacattcagtgaaaaagcatgagacaattagaaagcatgatacaatgaataaaataaaaactggaaagagaaccatcaaaatgct

SEQ ID NO: 459 - DNA, 4064 bp, Homo sapiens
acactaacttgtctgatgctgtctgccaatgtcatcctcaccacttgtgtcttacagagaaggaaatgggagagggaggttgtgtcttacagagaaggaaatgagagagggaggttggtagcaacatcagagtgacagttggctgtctctcatttcttggggtcatcagtctgatttgtttagagcctgggatcatcccagttcctggaagaatctttggaaaagggtccccttgttcttgggacatgtgtcatggtcactaagccccctttccctcaggctactgttgctcagggacacaatgagataccccaaggacatctagacctgacttttcatgaactctcttgcctctgtggtccccacattggagacctccctccctcctccttcccttgtgtgaaggagacacctcccgagcaatcctaactcatccagctcacttttaacaaagcaaagagcagagggcactgaagactggatggctgtgaatggtacaccttggggttgaaaccgtgttggcaggaacctggtgataaaagctgcctacttcctgggtgtgtgaatttgcacatatcttttcccctcactggacttcagaagcctactgtgaactggggacgatgctatctactttccctcctgaagcccttctaactttcaaatgtatggtcctggggccatgagtcctgcacagaaactgcagccttgccagattgcttcccttggtgcagaaaagtgtgtgtgtgtgtgtgtgtgaaatatacgtacggttttacgtcaaaaacagtcgaatatcagctatttcatatggttcaccctaatgtacctgcctctctctttggctttaggtctgagaatgacttgtctttgtcaaggtatactattgttagaaacgcattaccaaatgcatctcttctgtcggatcagcgtattcctagattaggaattcaaattaatgaaaattcacatatgaaaggaaaatccattgctatttctggagaggacctcagtcctgggcttttccctggcattgctacctgggtgggtgctcaccactcaggtgctggtgttggaaggcaggaggaggaagctgaaatcctgccgattaaggctaattaacagggtttaggtgcctaattatcatgactcagcccgggacttatggttagccgtgcaggccaggtgagtctcttatggacttcctctcagactgctctttctcattttgtcctgatgagatattgacagtcatgtccacccgcttcctcatccatttcccgtcttgggccctggaagtacgggggcctctgtaggctgcctagggagccctggctttgctcttcgtgttgggctcactccatgatcaggagccggtgggactggtccttcctgattcttactgtctgtggttccccatcccctacggggagcctgctttgggccttgagctggatagagagaagagctttggggcccagctggttataggagctgagcttttccacacctctctttgttaacccttggaaacagacctgcctttcacctgacccatcttcctacctgtctggtctgacctgccctctttgaaagcactcatcacctagttttactaggctgattggcagatgtggacatgacaggtgtctatcgagataggtgtctaactagttaggtgtctcaggattggacagcagaataccattccaggggtgcacagacaggcctctcctaccggaacatgagggatagacgtctgggcattctgaacccagaggtcagagtagtcacaagcggagccctggggagcgagggccccagggccgtggtgttccttgccctgcgctcactgaagtccaaggccaggtttcagaaatagtatgctgcctgttcctgagatccttcacacctggacaccaacccagacaaagcctgacttaaaattttgatactgtattcatcgtggaatttttcaataactctgatttttaaaaaatactgcattgcaatatgatttaccttgattactgaggctctttttttttttggcacccctttaaattttaacccaaggtgagggcctcactccactctatacccagccctgcctgcccctcacctggacctgtgagaggggcttaggtaccactgtgaaatacgttttaaatttttacttgcccttcccctcaggtcctgagtgaggcagtggctctctggcggtgctcgcatttaaataggagtgtgtaggcttacagcaatgaaacatctaggagcttttaactttggatctatacctgggtgtgacatttccttggtgttctctggctgcctttctggctctgcagccctgagggcacttgtgtgtgtgtgtgttctctggagaagggaagtgattatggcagagaggctcctttagattctcctcttaaacctctttggaacatgtttgaattccagaagtgaatgaacttcattcattctctcgtccagatttcagaagggactaaagtgaacggaggctttttcactccctggcatgctaagagccacattccctagctctgtgcctgcacagtgagtcttcagaatttggcccatcacaccctctgctagtatcgtttccaccaccctcctcatcctctgtcatctttatttcattctcatcgtttatctctacctccagttcagatgccatgctggctgtggctcttttcttcatcaccatcagagtgaggcaaagatgtatcctggcctagttataaagacgaataatacatgataagaaatcattaatttttttccacgtggggggcggtgctgtcctagtgattcatatatatataatttttgactccttacaataattctgggatgtgggtattacccccatttaagaatgtggaaaccaaggctctgatggctctgtaatttgcccagggtcacacagctaggaagcaagttgctgatctgcttggttccaaagtcacctctctttttcctctgagcacatttctaagccactacttagaagctcttgagataaagttggcctagctcaggtccaccgaggttttgagattgccctttgcccaaggaggagttgtgtccttggctcacctgtcatctgcctgtgactggacttgaaccctcgcacgtctcagctgacatccttgatgctgctggctgccttcctcgccctgtttcctctccatgactccaggggtttgaagcacacaggagctggacatgtcaattctgtagctcttctcccaataccactgaaggccgtgagcctctctcctgtttccagcctgcaggtgccctgttgctgctcttcattccagcttctcctcacttttctctcagtctcttgagcttggaagccttactgtagcttgtgtctcctccctgggcacttgaggtcaggcttttgcctttttgtcacattgagccacatgcctttgatacacagttgtagcaaagaagggaggtgatgaacttgctcactttcttttctgatttccctccctactcatcctgcactccccaccgaaacccagatatcttatagtctaaggcttgtagaggattaaggaaaggaattggagatgggttttacttagttcacagaaaagctttctttgggatttttcctcccccttagggcttttaagtctaggtgaagtgaaagttcacacatgtgtttgtttggttgctctgtaattagctactagtttttatccctagaccttctctgctccagtgtcttgttcatgtgtcctgaccccgtgtccttgaattcccactttgctttgggatttaagttattgtatgttgtcaacaatatttaaagatgaaaaagtcctgaaggaaacttaccagattctttcctttggcttttttttttttttctttcgaggtactgtaaattgttaactagggatgccaagcaggcttggttcaatggctaaacctcttattgtattacagtgtaatgctgatctcagcctggtctcaatgccagagcacacagagacttgaataaaactgttataacgatt

SEQ ID NO: 460 - DNA, 2258 bp, Homo sapiens
attttcttgactcttaattaagcactggaggtggtgtgtctaattagagagaaagacatctagagctacccatgcatcagtgtgtacagtttgtgcactgtatgaacacacagcagaggaggcaaatggggctcaaattcagccctaagcccagagcacctgctgagtctgcccagaaggggcacctttttctaattcgtctgtctaaagggaagcttttttttctaattctcacaagaaatcagagttgtaagaatttgggttcctgcaatcattttaaaattgattttattttttgttttttagagacaaaggctcgctctatcgcccaggctggagtgtggttggccctgcagacagctatgattctctagttaacctatttggattgaatcaatcaaacggtccttacaacccaatgtcccagtctggtttatagcccatgctataagccagtagttcttaaactttagccagcaacagaaccatctggagggcttgttaaaacaattgctgggctagaccctcagagtttctgagtcagtaggtttggggtggggcctgagaatatgcatttctaacaagtaccctagggatgctgacgttgcaggtccagggaccttactttgagaaccagtgctagacgctatagctataggcaaggatttattttggatcttttccatgtttccatgtttccatgtttccatgagagtctcactgagcctgtccagaacaaataaaaataggccacttcaggtaccccaaaatggagtggaagggtaatgctggtgggcgcttagcctgggtaccagtggcacatatggcccacagttcccagaattactttgaatatgggactgagaaggcactctgtggacaggagtcatttccattcatttgattcactgagtgtctgcatctgtgtgatgaaggagccactgttttcctggtcagcagctcagctgtgggtactgatggttgcagaagcttacatgaaattaacggtgtagttctcagaccactgctgagtgaaaaggctgcttgttttggctggggctatgtcagtgtatgcagggggagacccactctggggagtgcaaggtgtcctaatgatccacattcactaaagcccacagtgttgttttgtgctcagataaggaaaaggttttttgcacaatagactccttagttgttaaatgcctccacttcactcatcctaagtaaataagtgctctctttcgaaggtctccagattcggggagatctcctgtttcctttgatacattattctagccttgggctcctgttgtaatcccagaattctttttttttttttttaaagagacgaggtcttgttcggtcacccaggctggagtgcagtgctgcgatcatagctcactgcagcctccagctcctgggctcaagtgatcctttcacctcggtctcctgaatagctgagactgcggacatgcaccactgcgcccggcaaggggtggtttcaaatgttgtctgaatcaaaggactgcttttacttgacaggatgcttcagacagctttgatcttgaagtttgggataaattaggatgggtttgaaacccatctaacagagaatgatggagccatgcgtatcaactatgtaagcatcaaacatcctgaggttcctacttagtcaataattctgtggttattttagaccaagcttctataattacatcttcattatgcttggcagacagtgctatttccaacacaggaagcagcggccttgcctttgttgttgtccttctaggtagcagttgaagccaaatggacagaaagcccgagacaacatgaagttgttctacaagttattttggagaaattgacttaccataccactcatcaacccatgcaaaagcctgtctatgtccaatcagcagaatgtctcggaccacctaaaaagtaaaagaaggagactgaaataatagcatctttgatgaaaactatctggaagacaagttgttaacaattctggggatcttggtgattacagagttcttaatccctctgtccataggtgatgacaattacaggctgcctataggtcctatagtgctcacacacctccagcccttccccatggtgtacacacacttgcagtatattcatctctttgtcttatttgagagtagggctgggtgtgtgtacaaactaatgacaaatacttgacagtcacacagcagtgatacaaataaatatctaggttaattaccttg

SEQ ID NO: 461 - DNA, 2669 bp, Homo sapiens
agtgctgaagcgggggtggggcggaggcgagtctgcgggggttttggggggtgtcgaggcctctattctgccccagagcgctggcgaaggccccttctcagcccgccttttcctttctcccgctccttctcctctactaagtgtagacgcagggccccttggcctagcttcgatcgttcgaattcagagcacgtccttccgaggtgaaggaacgcgaaactccacccatccgattgctgttcggctgcgggcgggtcctttggtcgggctgaccctgggtgagcggcccggagccaagactcgaggtagggcctggcgggcgggtgatgtcacactcctctgtgacacgcgaggctcctcagttacttagccaacggcagaggcgggaagtgagaggagtctggggctggggctgccttccaggcccacggggcggccccgctcttttcggattggttacctttgggcaggtgaggtggctttgctttgcttggtcttgaggttttgtgggcgtctttctaagtctgctcagcaagggcgtcgttgggcagtttttatcttgggcctacttgctggacctgtggtaacaagtaggctttggtatctttgtatatttactgagtgtagaattactacccggtgccagcccgggctgcttggggtcatcagcctttcattgaccacccccacaacaaaaatcactatgaacttgagactgtgttctagcaacttgtgaatgtgtaacccagtagaagggctgactgtgcttgaaacagacaaggattttaaggtcaaagagtggagactgctgcacggactctggaaccatgaacatatttgatcgaaagatcaactttgatgcgcttttaaaattttctcatataaccccgtcaacgcagcagcacctgaagaaggtctatgcaagttttgccctttgtatgtttgtggcggctgcaggggcctatgtccatatggtcactcatttcattcaggctggcctgctgtctgccttgggctccctgatattgatgatttggctgatggcaacacctcatagccatgtaactgaacagaaaagactgggacttcttgctggatttgcattccttacaggagttggcctgggccctgccctggagttttgtattgctgtcaaccccagcatccttcccactgctttcatgggcacggcaatgatctttacctgcttcaccctcagtgcactctatgccaggcgccgtagctacctctttctgggaggtatcttgatgtcagccctgagcttgttgcttttgtcttccctggggaatgttttctttggatccatttggcttttccaggcaaacctgtatgtgggactggtggtcatgtgtggcttcgtcctttttgatactcaactcattattgaaaaggccgaacatggagatcaagattatatctggcactgcattgatctcttcttagatttcattactgtcttcagaaaactcatgatgatcctggccatgaatgaaaaggataagaagaaagagaagaaatgaagtgaccatccagcctttcccaattagacttcctctccttccacccctcatttcctttttgcacacattacaggtggtgtgttctgtgataatgaaaagcatcagaaaagcttttgtactttgtggtttcctctattttgaattttttgatcaaaaaactgattagcagaatatagtttggagtttggcttcatcttcctggggttcccctcactcccttttttgtcaaccccatctgtagcctcttcctctactcaggcagtcgacccgccacgatgagaagtgggaccagcagagggcgccaacttcaggagtccgctttcccaccaggcttcattcacccagtggacctgaactgtttggtagagccacccggcccttccttcctcattgttgtttggtatgcgcacagttcctgtgggactgggccgtgagttttccattggaaagaagttcagtggtcccattgttaactcagccccaaatctcaactgtcaggccctacaaagaaaatggagagcctcttctggtggatgctttgctccctctgagctgcccatgctggtctggcaaacacacctttctgctttgccttcacaaaagtaatgtgttccctttcccaccccttgcctgaccctcagggagtcagcctgcttccatccatgggtgggaagacttcagcacaaaggaaagactaattcttgtcaggcatttttgaaaaggctgattatgtgtatcaaggtacagcatcgtagggttcccctaaacttgccctgtttttgtttttttagtttgttatccccttactgagcggcctctactaggtggctgtgattaaatgtcccaagcaaggatagggaaggggaatggttgagcctctggagatcattgtaaccaatcctgccagacctgtttggggcagtggggagcaaacctagataaggacctgtttggggcagcagggagcaaaatctcctttaacaaccaagcagttcctcattcacatcaacagagctaggcctaagattttgagttaacatctcttgaagccaaactccaccttctgtgctttttgcttgggataatggagtttttctttagaaacagtgccaagaatgacaagatatt

SEQ ID NO: 462 - DNA, 2370 bp, Homo sapiens
tgatgaggcccttgccttcagctgcttcacggagctcatgaagaggatgaaccagaacttcccccacggaggcgccatggacacgcactttgcaaacatgagatcgttgatccagatcctggactcagagctgtttgagctgatgcatcagaacggggactatactcacttctacttctgctaccgctggttcctgctggatttcaagcgagaactcgtctatgatgacgtcttcttggtctgggagaccatctgggcagccaaacacgtctcctctgcgcactacgtcctgttcattgcgctggctctggtggaagtctaccgtgacatcattttggagaacaacatggatttcacagacatcatcaaattctttaatgaaatggctgagcgacacaacaccaagcaagtcctgaagctggcgcgggacctcgtgtacaaggtgcagactctgattgagaacaagtgaggggcacctcaccccggcagcctcagccaagctgcccctgccccgctcctctgcttacttttcccccattcttttgacgctaagccaccctggtcctgacgcctcccctcacttagaaaaggcatacaggaggccgggcatggtggctcacacctgtaatcccagcactttgggaggctaaggtgggcggatcacaaggtcaggagttttgagaccagcctggccaacatggtgaaaccccatctctactaaaaatacaaaaattagctgggtgtggtggcgggtgcctgtaatcccagctacttgggaggctgaggcaggagaatcacttgaacctgggaggtggaggttgcagtgagttgagatcacgccactgcactccagcccgggcgacagttcaagactccatctcaaaaaaaaaagaaaaggcacacaagagtccctcacacatctctcttggagtctgggattccatctgttgtattttctccttttttctcctctgtctgatgccagaagatacttgttttcttcttttcaagaaaagtatctccccacataggcggtggacccaaaaagtgtaggcatgagacggtcagagctctttggggtcctgctcagagtcccccaggcagggcagagtctgtatcctgctgccatcttgcaagggaaaaccgcctctccttccaagtattgggtcttggaaaggtgtgtgtttggtgaaagccacttaatggtggtggggtgcagcttttctctaagtgcagttactcactcaggacaaaggaggaaaaggaaggcagaggtcagccagggtagagggtgatgtctgttttccttgggaaacatctgctgatgaactgggtccagggccatgctaggtctgggaacaatcctctccaggtcttcacacagagtatcaccaatccacaaacagacccgaagtgaactagtttactctgcctacctgtcctttcaatagagcagtctttcccgctcttctgttctgagaatgcacccggaatgggggaaacccagcaagcagcagagagaaaggctcttcccgggagacctgccgcctctagggtggtcagagaatagcagctgggattttggagagggagaggataggtaaagcagcgtattgaagcatttgcggaggggtgtattagtcctcccaccctgagcacaccaggacggggatgcatccttgccttgcgtgcttgtaaaggcttctttcccttggtatagcaacttcaactgcacctgaacctccaacctctgcccagcctctggtgcagggtggatagaggtctagccagcccttacttcctgaagagagctctgtgggaaactcgaggctacagtagcttcccggctcccagctcctaccctacccccaccaaagcagaaacgggagacggcaacgttctggctgccattagacttacgtctccctcccctacgtcccctagcttcccaagacaggaagaaatgtgcaaaaggcccctccggagaaaactgtattttgccgttcagctgttctttacagaggatgttattttagtgagacccaggtcctagaccttctgattcctatttatttttttaacagactagtctcaaagtacagcacaaaatctcttctctgccttctcttgtgatgttccagagagcatctgtggttgtgatttggaataagtcatatttatttggtttactgtgcctattcagatctctgtatgttgtgtgtgtttctgtgtcctggaattggatgcgtgggactcgttctgtccgcggagtgcactctttttttcagtgtggcccacatatcttgtaaatgtttgctgaagagttgtgtctatatatagagaaaatatatataaacagagaaatatgtg

SEQ ID NO: 463 - DNA, 3042 bp, Homo sapiens
gcgagtcgccggtcgccggtcgcggcggagcctgggcgctgagtgaagaaaatgaggcacgaggaattgttaaccaagaccttccaaggcccagctgttgtgtgtgggactccgaccagccacgtatacatgtttaagaatggcagtggggactcgggggactcttctgaagaagagtctcaccgtgtggttttgcggccccggggcaaggagcgccacaagagcggtgtccaccagcctccccaggcgggagcaggtgacgtggtgctgctgcagcgggagctggcccaggaggacagcctcaacaagctggcgctgcagtatggctgcaaagtaagacacccctcaggggccctgccccgctccgtttcaaggaacacggggaactcactgcagggtgggtgcccttgccgcccttcttaaccctgccaggccgtcaggagaggcctgctgtagcagccaaggactcccctatttagccagaattggaatgcaggtgggagtacctttagttcccaaccctggcccccaaagagggagggttagcgcatttctttctctgcagggaacttctccttttcctgttttctccacactgaaattctgaaaccttttttcttctttcgagcacattttattttagacctaatggggctggagataccaggcagaatttaattccggatttctatgcattcagagtgattaacaatggcaaagttgcagatatcaagaaagtcaacaacttcatcagagaacaagacttatatgctttgaaatctgttaagattccagtgagaaaccatgggatcctgatggagacccacaaagaactgaaaccccttctgagcccgtcttccgagaccacagtgaccgtggaactgccagaggcagacagagcaggcgcgggcaccggtgcccaggccggccaactgatgggcttctttaaggggattgaccaggatattgagcgtgcagtgcagtcagaaatctttctacatgaaagttactgcatggacacctcccatcagccactgctcccggcacctccgaagacgcctatggatggtgcagattgtggcattcagtggtggaatgctgttttcatcatgctgctgattggtattgtcttgcctgtcttttatttggtctactttaaaatacaagctagtggtgagacccctaatagcttgaacacaactgtcatccccaatggctcgatggcaatgggtacagttccagggcaagcccccagactagcagttgcagtgccagccgtcacttctgcagacagccagttcagtcagaccacccaagcggggagctaagctttgtttttaaagactcggcccagctttagcaattggctgttgatgtgcctcagctgtcactggcgatgtcctaggggtgctgcattttgcttccggggaaggatggacacttttcagaagtcactgcagtattcccaattgcactggccctgggcatggccttacccagtctaagctggcaggatctaaaacagcagcgacctcggcccctatccagagaggtgcagcaagagagccatttccctgtgacatttagtggactggccagttcatagcagcactgtgaggacccccaagttggacgtgctcggagggaaagatttatggcctctgtcgagggacctgcagcgtgagagccagtggcatctgcgcggcttgcctggctcttgctgtatcctcacttcctgtggagcggggattggctctgagaaggagtgttctctgtctgcctggcaaaggtgctgtggaataggcttggcatgccaccctgttttagagagtgacagttacagttgtaacaagcctacttcatattggccccctcagttagcctttttgaggcaatgccatttctagagttgaaaaagccctggacccaaactgcggcactgttgaataaagggcagtcctactcctgtccttttagagtggcttagtgtgacacacaggcatctcccaggccaagcacacacaggctgcgcccagttccgcaggagccgtcccacagcgtggctctctggattctcccacttgtcctccttggaaggagctcttgctggccagtgtttggaggggaggatgagtgcctgtcactgaggcctcactatggttggcgtctgaagctgggcggtcgtcaggcctgtgctgagagccgcagcccctgtgcacacctaacacagggcgctccccctgctgcttccctggctcagttcttcggagctccagagtgagaaggccgcttcgtcctttttctctgggtgatgcccttagaataacactatatgcaatgtaactcacaatgttccaggaccaaagacttgatggaggggctagaggcgacccttgttgtaaaaggcgatcagaacacctgagggaggaaggggcttgcagttttcccagcccttctcgctgccaaggcagcagtggtgctgtggatgggctggggactgcgggacagagcctgctactacttgggagttggtgctgccctgtggcatggaggggtgggaggggctgagatggctgctggcccggcctccaagagttctggacaggaggcagacactgcccagatgctcggtggagggacagtgatggcctttgactcatgaggcctggagaaaagtatcaaaggtctcaccatgtaagagtgatttctgatttctctcctttcagttgtgtgaaaaaacagctggcctgggttccattagcaaattaaatcatcttcaatcttaaattagagaccagaatgatcttcaggataaaaagaacttctgaatctctgcaataggaaatgtttcgatcatgcaagtgctttcccagccaaatgtctgtgctctctgtgtcactgagggccacaggttcctctaacatctgtcactgtcacttcaccaggcaggccttggagttccatgacaaaatcacttttgtcagacaaagaatgtatcctttacttttctcaaatggaataaaattatttcttctgtggagg

SEQ ID NO: 464 - DNA, 2038 bp, Homo sapiens
tttgcttccaagctcctctgacggcctggagctgtgttgattaagccccgtggtcttgttttgggttcaccttcacttaagattctgcgtcctgttccctgtcactgtgtgtggatgaactgtggctgctctcctgtctgccctgcaccgtgatgggacatgccctgtcctgaccccttggccactgggcttgtcatgaggtccaagccctcacctgtcccactttcatgaccacttccttgtgttgggaggtgaacagtaccatctctacctctacaaacacatttgttcttgtcatagcatgacaggactcgcagggtttgtgggtaccaggcctgttgggaagaattatgtagattttccttaaaatggcctctctcagcaacttgtaaaacttgcctgtgagatgcgtccagagctccacaaactgctgggtgttctgaatgtcccacatacagctccaggtggttcacggcccagggtcactgtggcaagagggggccagcagggctgtgtttctgtctgtcacactttcctcttgttcaaaacacatgtatctcaagcagctatatacaaaactcataaaaattaaagatggtcagccagtgccaggaaatgtggaggaggagttggtcatagaatttccatggtgggacaagagaattacccatttggccttcaacgagaggttcccagagttgcatcctttcccttccctaacagctggttcatgtaggccttgtggtgctcattctgggagagggaagatgcgcccagaggctaggcggtatgccctgggagccatgagaacccagccaagccaggtgaacgcagcttctgctactgcacgtgcccttattatcatctgagcaagttttttaagtaccctgcaggtgggaccaacattttatagccatgtttcaaccattaatgacttttaaaccttctacaatcttgaagatctttataatccatctttctcgtgaagtacccacaggcctttgcagctgacactctcagagcatgggcagaatcactggtagagaaaaataaccaaaggggtctagacagagactttggctttatgctatagaatgtacattcagttggagagagcaccaccttattagtctgggccctatttcatcagagatggattttctgaggaacctgactactcagtagaacaactcaaaagaaactaaactttccatttcggtttggagtacagaacattttttaaaaagaattaaacacagtgaagtttaggttattcctgaatgacgccaggtttgctgactttcccatctggtcgaggttgccattcttgccatctaattgaaagtataatgggtttcaggtttttaggagttctaaagaattacgctttccatagagaataagaggaagaatgttctacatagtggggagagaggatgagggttggcagtgtggttaaagagcaaaaccaccaagaaagagtcagagccctgaggacgtctctgtccgcgtggttcttgattctgagccagaaggtgacttggtatagcacgggagttcaaaatgtggtgtcccaaaggaatcacagtgtggacctttacagttaatgacaggcactgtcccccagcttgggtggcaaaggccagtgagctcagggctgaggggcttaccctccggcagctcagagtccagaacatcttagtccggcagctcagaatcagggcaccttgcctcccggtgagctcactctgctgctagccttggtagaaaaggaacaggattatgggcagtattttatggctggcatgaaatagatacccttttctcctttgatagagatttccttctttaaatatgaaactgaagctttgaggacttaactagacttccttttgaaaagtttcagaaaagctcaggtgtggccaggcacgatggctcatgcctgtaatcccagcactttgggaggccgaggcgggcagatcacgaggtcaggagatcgagaccatcctggctaacacagtgaaaccccgtctctact

SEQ ID NO: 465 - DNA, 2497 bp, Homo sapiens
agcgggctaaaccccggtcccgccgtacccatgaaggaccacgacgccatcaagctcttcgtggggcagatcccgcggggcttggacgagcaggacctcaagccgctgttcgaggagttcggccgcatctacgagctgacggtgctgaaggaccggctcaccggcctccacaaaggctgtgccttcctcacctactgcgcccgggactctgctctcaaggcccagagtgcactgcacgagcagaagaccctgccagggaggaccgaaagctgtttgtggggatgctgggcaagcagcagggtgaggaggacgtcagacgcctgttccagccctttggccacatcgaggagtgcacggtcctgcggagtcctgacggcaccagtaaaggctgtgcctttgtgaagttcgggagtcaaggggaagctcaggcggccatccggggtctgcacggcagccggaccatggcgggcgcctcgtccagcctcgtggtcaagctggcggacaccgaccgggagcgcgcgctgcggcggatgcagcagatggccggccacctgggcgccttccaccccgcgccactgccgctaggggcctgcggcgcctacaccacggcgatcctgcagcaccaggcggccctgctggcggcggcacagggcccaggcctaggcccggtggcggcagtggcggcccagatgcaacacgtggcggcctttagcctggtagctgcgcctctgttgcccgcggcagcagccaactccccgcctggcagcggccctggcaccctcccaggtcttccggcgcccatcggggtcaatggattcggccctctgaccccccagaccaatggccagccgggctccgacacgctctacaataacgggctctccccttatccagcccagagccccggcgtggctgaccccctgcagcaggcctacgctgggatgcaccactacgcagcagcctatccgtcggcctatgccccagtgagcacagcttttccccagcagccttcagccctgccccagcagcagagagaaggccccgaaggctgtaacctcttcatctatcacctgcctcaggagtttggtgatgcggaactcatacagacattcctgccctttggagccgttgtctctgctaaagtctttgtggatcgagccaccaaccagagcaagtgttttgggtttgttagttttgacaatccaactagtgcccagactgctattcaggcgatgaatggctttcaaattggcatgaagaggctcaaggtccagctaaagcggcccaaggatgccaaccggccttactgacctgctttcactgaccagccacagaaagaaacagaagagtgagaagaaaggagaggaaaagcacagaaacgcttgagcagcccttcccgaaggagcagctgcggacggaggtggatcggacccaaggctggtgcctggggctaaggccactctaaggattgtttttatcaagtgggttgttctgtgcctgcagcatagagcgcaggctggcagagcaaatagggctggtgaggagtgactgtccaggggaaccagcagagggcgttgggggtgccaagggcttctccgcaagggaagcccagatttacttctttcaaaatcatatcattccttagagtttagggaccaaaggactattgcttttttaagaatatatatatctatataaattaaaacaaagaaacaaacaaacaaaaaacaagacaaacaactacaaaaaaagacagtatagagtctcataaaagctgcctttaaatatccctaggagacagggtgaaggagacccttgacagccccagcctaggcagatgggggctgtggaaagattgttctgtgtctcattccctcttaagccactcccccaccctgcccttttaaaaataattaaggatttgaggtctaggctcacatgcaggtaattagaacgttatggaagcagtgaacccacaatccacaatccccaaactcagagtgcatcccagaagaggccccaggcagagctcaggttggccctggcctttgccatcccgggaggccccctagccagcaagagtgggattgcctttcctgtggaaccactgcttccccaggcgggaagaaagagggagttctggccacctgagcctttcccttgccaatccaggtagacagaggccctgcctttggctgagctgagacacctcctgtttcccttccccttgaaccagtcccagtgtccccttgctccaggctaccttctgtctcttagtctaagtttgcccacctgtaaagtagattcaggatatctgtagagggctgtgacaacagacttggaaggtttgctactgtatatactgccattgagaaggggaaatttttcaatatgtagaagcttcagaattagaggtccctctttaccccagacctgggagggaagtagatgttttgccaaaatacttcttcattcctttaaaaactacatctttcct

SEQ ID NO: 466 - DNA, 3965 bp, Homo sapiens
aggctgcatatgatcagccatttgatgacttagggacataggataattaccctggagcatgactgaatcagaattcacaattaatttctccagactgtgggcctcttagtagttcatggttttagcttagtagttcatggttttagtgatctgtcttttcagtcggtatcacctgtcactcctcagttcgttagctactagcaggaaatgtagtctaaaaaaaatcctcctgtagcattcccagaggtgaccttgctgttgggtctctggaaagcctggcttagagcggcaggaatgccaggggcgagtctatggtggtttatgtctcagcctaaataaagcggcaggctgcatccctctgaggggcctatgaaaaaagaggagtctgaaaggaacaagattcctgctacagagaaccaagcgcttctggccaaggaggtggggtcgcatttgaggggcttaagtcacttcatactccgacgatacctctcagtgccgacccaggagcaggcatcaggtgtgtgccacactgggcgacccacctcccaccaccccagagagctttcccacaggaagccggaccctgcactttgggcatttttcccggggtgcctgtttcttgcactaacccaagcttttttcacatcacatagggcagctgggtctatcccactaggcccacggccttctagcttttccttttgtcaaagctcttaatggtcatcactcactcaaacttttttaaaagacatgattttgttcttcctcctggggatatttaaaaaccagttaagccacttgcacatttttttccacttatgcaatttttgaatgctggttagacatgatttttaaatgcagcaagtcaaccaaagtatcaacaatgcaaggagcaggagttttcctggtaggccacggaagggcctagtggcaggagacagaaaagaggggacaggtttgggtcacggtcctgggggcagctgaggatcaggttgcaaatgccccagatgtgcctgagagagcggcagcagccagcatggaggggagcagtggcgttctcagcaccagtgtgttaaggtggggctcacaatttcttggggccttccctgggttacagcagcgagtttggagggggcttttctcttcccaaatctgaggtcagacaacagtgcttatgtgacctacccttggagggcagagatgggccattctccatgggcccccagggctggaatggagttccaaactgcagaagaccatgcccctagaggctccagagaccgtgaactttttcaatgacacgtttgaaaatctattacaaattaatatcagtacctgattttttgaagatgaagctgacaggtattaaatgaaaacggaagcactcttaattaggaacctttgccacatgatggcccatgtttatttggagttggggggagaacattccttatctgacttggtaaccaggaagccttagaaactcttggggaaggaatcctcaggaattaggtcaaggagctgcagatggatcaagggaggctttcctctgggagaaaaatctcccaaggcatcggaccgagaccctgactgggtgcgaagagaccgcagagtgaggggcaggcagcgggcatcctgaccccaggcccatctgtccccacgttctgagttccaccaaagacccaaaatgcagtgttttagaattgtgtaatattccttaagagaccaagagacatcctccagtgtcttcaaactgggactgttcccacttacctgagataaggagatttgttccctgtcttgacgtcccatcacctgtatgtcatagtcggccccttccaggaaggccccgcgaggagaacctgctcctaatcagagccttatgcgttcccaaccctgaccccgccatccatccctccgtggggctgtgttcccagatgtctttggattctgtttaaaatgtccttgttaagacattccaaggtttgaactccgctcctagctaaacctcctccttgtttacagggactgaaatagccacattttgaccttctgttcagtctgggatcatctgtggtagtgtgactacattcctttcccatgcaaggatcccatttacatggcagttatggaaggcccagaaaaccagacttgctcccgccctcctcctgcctatgttccttctcccttcagattagccctcctaggcagccattccgcctgctcaggggctggggcgttgggaagctgcgtggttcattacccaggaaagctggagccaccatatccccctcatcagggctgcagctacccatggaggctcagggtgcccctgggctggtgtacagaacccaaagttggtcccctggcctgctcccaggccagacaccatcaaccccaggggcccatgtctcagtgccacatgccataaatgacccaccactcctgttttgtgtgtcctacagtctaagtgtctgaatggagggtttgcatttgggccacctgcaagtgactggggtttgaggagaaggaaaaggtctcaggaaaataatgcaggatgatccctgtcaaagctaaagtggcctggtcagtgagaacccttgtgaggagctcagaggaggaagcccttaagatctccagaggcatgagttctgaaagacagtgtggcctgtatatgctgaggggactagtaacagaagagaggaagtaagaacaggcacggcacgctctgctgaaagtagactgcggccaggcttttgaaggccttgaaggatgtgttagggatttggaagccactggaaagatgagcaggggtggagagtgatttaggaatgttgttgtcatgctgcccaaagcaaagtagatgaagattcgaggtagaagcacacttctgcacaggtggccctaagatggtgatggtggagtggaaggagcagatgagccaagaggacaggaaatgaggtcggtgtaaagggcagggacaggccaggggtgcacagggatgagtctggatttggctgccttgagggctgtctacagtaagcatacttaagcggatgtgctagaactaatgtcattatttatttgccacaacctaaagagacaggcaagtattagtcgcccgtcacagagaaggtccagggtgtccagggcccactgtggaaagctctgcctggcttgcccctgctccgccggccgttacccgctacccactcatactgtcgtccaaaaactgggcagtgaaaagtcacaggtcagatacaaattggacagatttggtgtgaacatttacaagctcatcccatacgctatgtttcagtggtcacctaaatattctcatttcaggactttttaaaacacattttcccaaatctaacttgggacaaaatctaacttgggacatttaaataggttatcaataattatctgtttatggcctctttcggcacacaaataagcatctccctgtacaaaattctagtgtatgctgagctgattgattgccttctgcatacaccttttctacaacttctcaaacgtgtgtgacatgctggtaagatggcaggaaaaggagtgactgaataatacaatatagctgagatgtgtttcaagaaaacctctgggccagggtaggggtttgtgagcgggagccaaggacttgccccatgtttctaatcaaggtgagaccactgacacatgtggtcagcaaatatgttctatacacacatccgcacactgtcatctaacccatccgttctcccatccacagcatctccaggacaaagccatcgcaactagggaggggttgacacctgctctcctaacatgttttctttctgtttcaggcttgaaaaacccttgcccagttttgatcccttcaagactttgtcacagcctctatcacacatctgtttttctcgaagaaaaaaatataattaataaaaatgttttactcttttacactg

SEQ ID NO: 467 - DNA, 2573 bp, Homo sapiens
gttaatcctagctgtgtgcagtctctcttacccttctgtgcccagctcagtcttccctagggctgggtgtattaggactggctttgtcccacagcttggggccatcggtcctgtctcccctctgctggccgggcacagctgtggtgaggttgggcagctgaacagtgttggctttcatgaggaggcagaaagcagaggctggcctcagactcatacagaaggtgggggttggctgggtacgagggatgtggagcacaaaagcctctcatcccccattaaccagggcaccaagcccacaggtgtccccagcccactggatcagaaagagttcagtaagaccggaagctcctggtacgggtttctcccagttctctagggaaggccacctgcaggtcactgaaacttcaagcaccagggaagatctaacatttgagtcccttccaggccatcagaggcctagtcagccacatgggaaacttccaagacctgactcaggcatcattccaccatggctaaggcaccagccggggaagacttgaaagaaaggggcaggagctcagatgaagagaaatcctaagttacctttctaggtcaaggcctgtccctggccatctctgaacttcagctagagcttcaagtctgtgcctggagctcctgggaaggctactcaccttgaacaccacgcttgacaggacagcatggtgcatgccgctgcatccgtgagcagtgtgtctcctgcatgcagaaagggagcagagaaggccaggggcttttgctaaaaatagtggccagaccagagctctggagccacctgtcccacctcaaatgggtctgggggtcaggaggcagggttttatctctgtctaccatctccctcgaacccacactgcaacaggaactgtgagagtctttgtaagtaaactgccctgtctaggtcagtacccacctgagctttggacgcacacagcttttagtacccacctgagctttggacacacacagcttctagtgatttctggggccccaccgtaaagtgagcatgctttctgaactcgcttctctgtgactgatgttaggctgggcccagaggcacagccggggcctgcctagcactcacatgctggacaggtctgggagaggcagagtgccccacctgccactaggctgggtgcccacagcccgcatgcagcagcttgctgcaccccaagtccaggtcgggctcagctctggctcacagactggagacaatgcagatgccagagcaaagggccaggaagggtcaaaacattttattctctttttttttttcttttttaataaagttaaacagtaaaacaaaaattcacaagctgcctccctgtccacccccgcctccctcccctgccctcggtcttcggcattggttccctttgctccaccccactcacagagacacagggcatccaactgagaaaacgaaactgctctaagcacacggagacgtgatgaagggaggaggtgaactgtttccacattcaagattaaactgagtgaatctgcattttctgggttctgggtggttgcccttcattagccaaattgaaaaaagaaattccctggaccagatgctgaaagagaaaagaggggttggtagttggctatggattttctaaggaagatcactttgctctgattatggaaaagtcttcaagggctgcttcaaactcaaacacagagagaaactctatgggtatcaaacagctcaggctgtttttgggtgcaagagggagcacgtgactgtattatacatgggtagcttctgacctcagcattatctatatagtacctttgctcttgcagagaagccttggtactaggcagttagagatgcctccctgaccctgcagagatgcggtggctaaaggtcccaaggcaaggggtgcctgggaaccttcctgtcttcatccttagcaacagccgagtggatagatgccctgctagatgagaattcagctgcccccgctcatgggcccctctgactcccaaagagctgcctaagaggcaatgagtgtgttggcttgtgatctgggaactcccaagaacagcaggcccacctaccttcaaagctgaagccgccaggaccgccaaagaatgccttgaagatattgtttggatcaaaatctgtagagcagggcaagtaacatggaagggaagaaaaggtgaaaaattagaaatgttcgaagagaactgatgacactgagaacagatctccaaagctttcctggagagtctcactcccctcctttcccaacacttcagactgcaagtgagcaaacctgccccatcccgtgcaaaacatgctacctgatcccactcctaggacatgttcccttctccttccaactgctgccccaaaggaagctttctctgcttcagcttgcttcattgggctgttttctcaacaaatggaatgccatttgcacttacacaagactttccccatactctgtctccctataatgctggagcggctactaaaaaggataaaatgtatcacttaaatgttaccaaaaataaatataagagcaagatct

SEQ ID NO: 468 - DNA, 2194 bp, Homo sapiens
tttaccaataatcaaataaaagcaaattagagccacaatagtatttttgcccattttcttagcaaagacttaaaagtttgataatgtccttgtttggcaggaatgtaggtagaatgatcagctggcactttttctggaggatattttggcaatattaaaccattttaaatacgaatcatctctgacccaccaattttacactaaaaacattattacaaggaaattagagaaatttataaagatggatattctaggatgtacactatagcattaacagcagaggactaaaaacagcctaaatgttcattattatgggattgtttaaacaaattatgataaagtcaatgcagtattgtctgttaaggatgaagaatataggaaaacacctccatagtatattaagtgagaaaataaacatacaaaacactaggctgggcgcggttgcagacgcctgtaatcccagcactttgggaggctgaggcgggcagatcacctgaggtcaggagttcgagaccagcctgaccaacatggagaaaccctgtctctactaaaaataaaattagccaggcgtggtggcgcgtgcctgtaatctcagcctcctgagtagctgggactacaggcgtgtgccaccacacctggctaaattttgtatttttagtagagacagggtttcaccatattggccaggctggtctcaaactcttgacctcgtgatccgcccacctcggcctcccagagtgctgggattacaggcgtgggccaccgcacctggcctagaaggggaataccttttaacttggtgtaagaattgtcaggctgccccttgaaagtgtgtgaacatcacagaccatgttttagagcctagattcctgacttaaatggagagttggactctaaagttcatgatgtataaaattatgtgatgtatgaaattgcagcccccaatgtagctttcatgactctgcgtagcatgtgtaataccagcaaaatggtgacttgtgccaaaatttttttttactttttggtcttcttttccctttctcagaacgtccccacaatcggtgtcattgccgttgtcttagccacacatctgtgcgatgaagtcagtttggcgggttttggatatgacctcaatcaacccagaacacctttgcactacttcgacagtcaatgcatggctgctatgaactttcagaccatgcataatgtgacaacggaaaccaagttcctcttaaagctggtcaaagagggagtggtgaaagatctcagtggaggcattgatcgtgaattttgaacacagaaaacctcagttgaaaatgcaactctaactctgagagctgtttttgacagccttcttgatgtatttctccatcctgcagatactttgaagtgcagctcatgtttttaacttttaatttaaaaacacaaaaaaaattttagctcttcccactttttttttcctatttatttgaggtcagtgtttgtttttgcacaccattttgtaaatgaaacttaagaattgaattggaaagacttctcaaagagaattgtatgtaacgatgttgtattgatttttaagaaagtaatttaatttgtaaaacttctgctcgtttacactgcacattgaatacaggtaactaattggaaggagaggggaggtcactcttttgatggtggccctgaacctcattctggttccctgctgcgctgcttggtgtgacccacggaggatccactcccaggatgacgtgctccgtagctctgctgctgatactgggtctgcgatgcagcggcgtgaggcctgggctggttggagaaggtcacaacccttctctgttggtctgccttctgctgaaagactcgagaaccaaccagggaagctgtcctggaggtccctggtcggagagggacatagaatctgtgacctctgacaactgtgaagccaccctgggctacagaaaccacagtcttcccagcaattattacaattcttgaattccttggggattttttactgccctttcaaagcacttaagtgttagatctaacgtgttccagtgtctgtctgaggtgacttaaaaaatcagaacaaaacttctattatccagagtcatgggagagtacaccctttccaggaataatgttttgggaaacactgaaatgaaatcttcccagtattataaattgtgtattt

SEQ ID NO: 469 - DNA, 2373 bp, Homo sapiens
agcaagcctgcaaagggaacggggacgggcgtgaaccatttcctccaccagcagggtcctccgatgccgcagcatccaccccacaccttaaacctcatggtattagtgggcaatttaaaagataaagacacagggaagcgggactaattgggaaaacctgcagacatttgttttaatgcgtaatctgctaaataactacgggggtgggggtggggaaggaagagatccaaggaggcagaaggctgcggtcaaaatattttggggtggcaaagtcacgtaggatgtggctgtgggttctggcagcccagagattcagctcccgcctcctccctcagagcgagtccatagctaccctcacgtcccccgtggcggtcctcgccacgctccggagcgggttacccatgagggtgctagacctgggcagcgggaacctcgaagaggtggagattgcaggctgggactccagatttcgggcagggatgcggggaagggaagacgcctcgctggaggcggaatggagggcaaggcgaaggaggatggtgcaggaaacggcgacaaggcgcccggccaggcccgcgagctaccgagacccgggttccaatcctccccccttccgcaaacgcccgggttcgaggtacctggcgggcaagggccgcagcggagcgaagcgggctggccatggggaggctgcggggacgcggggctgcagagagcggcagtggcacggagcgcgcggctggaagcgaaagcaggcggtgtggccaagccccggcgcacggcccatagggcgctgggtaccacgacctggggccgcgcgccaggtccaggcgcagggtacgacgcaacccctccagcatcccttggggaggagcctccaaccgtctcgtcccagtctgtctgcagtcgctaaaaccgaagcggttgtccctgtcaccggggtcgcttgcggaggcccgagaatgcgcgccacgaacgagcgcctttccaagcgcagatatttcgcgagcatccttgtttattaaacaacctctaggtgaatggccgggaagcgcccctcggtcaaggctaaggaaacctcggagaaactacattagggcagcttttccaccgactccaaatccaactgacaaaaagctgtttctgccctcgagagtttgcgggcggggattgacatttgtgcgtctgctcttgtctgccactgaccgctatgtgcaaactgaagggggagaacgtgaatccagcttttagatttccctgcgccacctacccaaaccgaatttgtaactcggggtgttatggggctaccaggctcgcattccctaagggccatttctgcccaaagatctcaatgcctttcatcgttttcaggcaaagcagaccatcaagagctccaatcatactgttttcatagttttccgatgtaggctcgtgatcgcaatatttagaaagaggactggaaaagtgatgttagaagtactattcggtttagaaagggaaaggaggattggaatagctattgtcttatatgcagtgttcgcctggggcaacgtcagcctaaattatgagccttcctggtttttaaattaataggaagtggtaactggggctgacttgatcttggaaagagggggagggcagtttattctgggtgaaagcggttaaatccggtttggttttttaaatggtttcatacaacgctactgataatatactgtagctctaatcttatcaactcagaaaacctacacttttcctctcctttatacaaggcacagaaaggcctcttacgctggggtggggtcccaagctccaaagaccacagagtccaggcaggtcacgtaccaccatagagcggcgagtgtccctggaagtccagggtcgcttataagataagttttgtccttgttgttttgagacggagtctcgctctgtcgcccaggctggagtgcagtggcgcgatctcatctaattgcaacatccgcctccccggttcaagcaattctcccatctcagcctcccgagtagccgggactacaggcctgcgccaccacgccgggctaatttttgtattttttgtagagaccgggttttgctatgttgcccaggctggtctcaaactcctggactcaagccacccacctatctcagcctcccaaagtgctaggattacaggcgtgagccacggcgcccggcctccatctgtattaactgcttctatttcctccccattaagggcttctgtccaattattccacctaaataaggtctctaatagccttcattttgttcctgccaatggttttgcttctcgtgcattttcatggctgcacctatgtgctgatgactcccaaatatattttttcagtccatctg

SEQ ID NO: 470 - DNA, 2357 bp, Homo sapiens
gaggtagaggggggatacttttattctttctttccctagttgtttttttttgttttattttgttttgcccaactccttaccctagtttctttagtttttgctaccgtatgtgaaaaaaattgacaaagtatattagattggtcttgctatgttggaatttctgaactgccttttcagtacagtttgccctggacatacgtaacctaacagcagatgtaccacaatctctagaatcatgcttgtttgcctcccagctcttctacattgagaagcagatgatagccagtctacttatgcccctgagcttctgttttctcattaaaaaaaaaaaatgacactatcgcatcaactttttttgggtcaaatccgtgagaacacgtatatgaagaataagcacttgttaaaaatgagttaatttgaagaatattagtgtttcctaaatatgacagtggagggatatggtagaaaggaaactgttgagaacagaaaggacaagggaaattatagcagctacttttgtggatggactgtacctattaccatatttaacaattacatgtggcctagtaccatagtttattatattgtggatttttaaaagaatagatagacgttgaattattgatattctccctctctctctctaggatacttacagagagctacaatggaaaagtcctggatgctgtggaactttgttgaaagatggctaatagccttggcttcatggtcttgggctctctgccgtatttctcttttacctttaatagtgacttttcatctgtatggaggcattatcttacttttgttaatattcatatcaatagcaggtattctgtataaattccaggatgtattgctttattttccagaacagccatcctcttcacgtctttatgttcccatgcccactggcattccacatgaaaacattttcatcagaaccaaagatggaatacgtctgaatcttattttgatacgatacactggagacaattcaccctattccccaactataatttattttcatgggaatgcaggcaacataggtcacaggttgccaaatgcattacttatgttggttaacctcaaagttaaccttttgctggttgattatcgaggatatggaaaaagtgaaggagaagcaagtgaagaaggactctacttagattctgaagctgtgttagactacgtgatgactagacctgaccttgataaaacaaaaatttttctttttggccgttccttgggtggagcagtggctattcatttggcttctgaaaattcacataggatttcagccattatggtggagaacacatttttaagcataccacatatggccagcactttattttcattctttccgatgcgttaccttcctttatggtgctacaaaaataaatttttgtcctacagaaaaatctctcagtgtagaatgccttcacttttcatctctggactctcagatcaattaattccaccagtaatgatgaaacaactttatgaactctccccatctcggactaagagattagccatttttccagatgggactcacaatgacacatggcagtgccaaggctatttcactgcacttgaacagttcatcaaagaagtcgtaaagagccattctcctgaagaaatggcaaaaacttcatctaatgtaacaattatataatgtttccctttttgattattgcattgtattttaatttgtgcagaatgataaagaatgttccttttagaagtgtgttatgtctgtacctgtctgaagagtgacattaaactttgaaaggacttcactgctcctttacgatattccaaatagttttttacattggaaaaactaattcttgggattctttcatacattttcatcaaaactttcagtgtgattatgtattcatatcttcagtttaatatgtcagtataatagatattgttcaaaagtttcttgttgctaaagtggtgtaatctgttacacagatgaatagctagatgtggaaagagatatgtaaacaagaaacctttgggtattgtttcttaagtaaatattgggacaatcatggtaagcaaacttagttctgtaactgcatttttcaccttaaaagttaaatgaaatgcatgatggtattttattccttgaattatgcaatgcaacattttacatgtaaatagcactggtcatatactgatgtatatggttatctgggttatatctatttttatgtaaactctattttgtttttggcaagaagtgaaattgagacttatgtgcaggttgccattgaattttgctctggtgaatgctgagatccagctttttcttacaaataaatgggaccctgttttcc

SEQ ID NO: 471 - DNA, 2222 bp, Homo sapiens
ttcggccgcgcgcgggcggggccctggcagcaacgaaaatggcgagcctcgtagccttccgggcccggcggccgcattccgggagtcgccaggtgggagcccgccttccgtgtccccaaacgcccagagcccgggacacgggccggcggccgggtcaccaagccagttcccggaatcggctcgcgccggaatccagactcggcttgcaaagcccgctcctgccgtctctccgcagcgcgccctgccccccactgccggccctcttagcttcaaaaccaaattttgcctttcatcctgagagattaataccccgcaggtaaaaccgtggagacggagctgcggtgggtttcttttccacgcctcagtttcctcgtctgtgaaatgggaccaggcgcgcctgtgcttctccgggagtttattgcagggctggctggagagaatggctgggtggaagctgccaggaggaggcccaaggccgcccaccccgtgggcctcgtttgctgagcgggggtcagaggcgtgcgggacagggcgcgccccacggcggctctggaggcggcccggcccgtccctgtctcctcccctcgctccccctcccccggccttcccggaactctcctcgcccgctgggtggaggaggggcgagggccgactccgccgcccctggggtctccctcctcccacccccaccgcagagtctggcccgccctgggctttcctctcaggtccctttgggtctccagaagcccggaggtttcgcgcagactcgaacctgagatgacaccacccagcaccccaaatcctgcagagtgtggaggggatctggggagaaggcaggggctgcccgggcgctctggctgctgggggtgggggacagggcctgccggggaagcgggtcgggggaggactggagacccaggctcccctaggtacaacgaacctcgcgggagggaatacgccatccccgtacccacttccgaggacgtaggtcttttggcaccggcggcagccgcgttcccacacatctgggcggggccccgcagcatggcctggggagctgaggcttcgggatccggcacaaactaccattctaggtgtagacggaggaggtggggtgtgggaagcagggggccatggtctgagcagaccttctcacctctgggcctcccacctcctggggcaggacttacggggaaggacccgaggggagtggggtgtccatagggacacccaagggtctatccctgcgagctttgctttctactaaaccaataatcgcagtggtggtggcagtcgagacacggctcaaagagccggcaagaatagagcagagaccaggatcgccccaggcagggaaaaaatgaccagttctgtagagtgacccgaaggtgatggaatcactcgggcgtcctcctgggaaagagctgcctgctcccccgccgccgccagtacaccggcgcccatgccccgggggctggagagagcagccaggcacagcccctccagcttcctgggagtccaatttcccaaggtagaacggtggcggcagagcctggccctgtggtggggcagctgcaccccgatgagtggcttgcagttcctggagccctgcaggttgttggagaggcagggagcccttctccctcctgcctgccctcttgcacttcctctcccagaacccagcactactcccagaggctctgagctggagccctagaaggaggcgctgcaaggctccgtgctcctggagcttcgagtctatggtatgagttaaacagaagggtatctcctccatcagatctacaggagggtgtctgctccatcagacctggagcttccaaggcattttacccgaagctccagcacctggcccaaggctgggctgtgctgtgtcctcagtgaaagaatggatgagtcacagctgaatgactgaagagctgaaccaatgggaaaactgatgctcagaggcttgagcaacctaggccaggacctgtccttagaggcagaagcaggactcagaggaagagcaccctgaccacaaagccccagggtccagaaagactcagccactggagtctgtgtttcctgagtcgcctctcactgctggagctgtttatcatcgctccaactttcactaaaaaggaaaaactatcacttaaacaaagccattgaaaccccagcatcatgtgtggattttttaacataaataaatcatacaaact

SEQ ID NO: 472 - DNA, 3307 bp, Homo sapiens
ttttaaaatgctggtaatggtcttttttttcttttttttttttcttggtgattttaatgctttggaaaagatctcatggttttatctccaaaggaggaaattaatttgatgccatggaaattagttttctagtcgtatgccttgaatgagtgaagaatttctttttcatggtggtactaaatttggggaaagctatagaaactttcatctggaagcttacacttttcctcttttttgaaaatttggtgagagacttggatattttattattttctgtaaaagagtgtaatttgttgtacaggtctaatattgatccttttttggaagtatggaaagaatctgagtataaagcagaattacctctggatggcatgtattctcaaggacactgtcacagtgaaacagtttatttagaagcttgtgtttccaaagtgttgaatttgatattcacaaaattggcatgtgtaaactttattaaactttaagctatttcctaagatgaagatgacaaacttggagggaaacttcattcatttggtttatttttatttttatttttatttatttttatctttttgggacagaatctcgctctgtcccccaggttggagtgcggtggtgcggtctcggctcactgagacctctgcctcctgggttcaagcgattctcctgcttcaccctccgggtggctgggattacaggtgtgcaccaccacacccagctggtttttgtgtttttagtagagacggtttcgccacattggccaggttggtgtcgaactcctggcctcaaagtgatccgcccaccttggcctcccaaagtggagcccccgtgccccttgtttgtgacctgtcaatataaatatgctcagtaatggggggaggggtggggggtgaaaaaggaaatatgtttaatattaagactttggccttttagtgtaaactgatattcaaaaatttcttcatagaacatttgcttctttgcttgatcatttttctaattctgtacatctaaaatgcccagaatttgagttgctgttatagtctactaacatagaactttggagtaataagatgggaatttgtctctcttttgccaagacaagcattcgtaatctaacacagtattgttgccacgagtacgagtatgtgatagactgttgagaataaagaaagcaggcacagttggtcagtcctaagataaaggagatgtttttcttatatgtttgtgcattaaagaaaaaaaaaatcttgaatctgaccaatgatgttttttttccttgtaagaaaatttaacaaatgtttggcaagcttctggaatctaaatttgaaattatacatttgtcattttctttaaatatttcttcacctcagctttgattatgagaaatcactgtcctctgctgttcttttttttttttttttcttttgaggcggagtctcactctgtgccaggctggagtgcagtggtgcaatcttggctcactgcaacctccatttcctgggttcaaatgattctcctgccgcagcctcccgagtggctgggactgcaggtgcgtgccaccacacccagctagtttttgtatttttggtagagacagggtttcaccacgttgtccatggccaggatggtcttgatcttgaccttgtgatccgcccgcctcggcctcccaaggtgctgggattgcaggcgtgagccaccgtgcccggcctgtcctctgtggttttctgggcttatgttaaaattataactcaatcaccagtctttataaatttgcttttttatatttaaaccaaacctaatgctaattgtgatatgttatttattctcacctgatttgaatcattggattcaattaaatgagtttaattatcattaaataattctaagagaaataatgtctattcggatggtgggaattttctttctacatgcagccccattctgaatgaatgaaatcaaatcacgtgaagatcagggtcctagagtaacttaatattttgtacattggttatttgactcctcatttttatattacatgttatatcaagggagggggcataaaagaaatacaaaaattgcagaggtatctggaatgtacctatttgttaattctatttgtcatttcttttgtttcatcttttgagtaataagctgcttggaaaagtttctgttctttagctgattttttagctataaaaatgtatttgaaaagctcataaatttcaggattgaaaagataattgaaagttttaaaaaaacctaattcattgaagtaataaccaaataattttcaatcttgattcaactgtgattcaaatcttacaccatttgcccacttctatgaattttatgtataaaattttttaagagtcagagttttttttcttgattaattggatgtatttcacagaatttccaactgctcacgttagttttcttccttttagagttgatctctctaatgtattagatcttcatgcctttgatagtctctctggaataagtttgcagaaaaaacttcagcatgtgccaggaacacaacctcaccttgatcagagtattgttacaatcacatttgaagtaccaggaaatgcaaaggaagaacatcttaatatgtttattcagaatctcctgtgggaaaagaatgtgagaaacaaggacaatcactgcatggaggtcataaggctgaagggattggtgtcaatcaaagacaaatcacaacaagtgattgtccagggtgtccatgagctctatgatctggaggagactccagtgagctggaaggatgacactgagagaacaaatcgattggtcctccttggcagaaatttagataaggatatccttaaacagctgtttatagctactgtgacagaaacagaaaagcagtggacaacacatttcaaagaagatcaagtttgtacataacactagaggcatttcttatcaaaaggattggataataaaaataagtttctactgggtatatttcaagcatttatttattactttagttacgaattccaatatactttaaaatggtatttgttttacagcatacataaaatgtagcaaatcggtactgtaaaacatttaacattcatacagttatatataatatccttttttttaaagaatggtatttcacaaaaatgtcttttgaaattggctttggagtttacatatactgaacatgaaagtttataataatgatgatacaactttcaacattgtcattttttcttagaacttcagctgattgcagagatataatgattacattgttattaaatttttttaacac

SEQ ID NO: 473 - DNA, 4820 bp, Homo sapiens
atagatatcaagccatccagaaaatcttccttaggaattttaggctggttaatactgaaagcaaactttcaaggaaggtttaaaatggccaatttgaactttctagtgaaaaaatttggtgtctgagccaaattaaaatgccaatcattatattctaaccaaacttacagactttagttactagcaaataccagatatgattcttactgtataaaagttataattttagaataaaatggaggaataaccaccaacgtattgtagataggttgtgtctgtctccgaaactgcaatgctctcatacgctagaacagagcctacctacactttctgctcaattaataagcatcatataaatgaatgaatacattttaaaagaaaaacaacaaggagaaagaacaggaagaaagaacagggaaagaaaacagaaggtggggaagaggaaggaagagagggaggaaggggcagggtacttgagagaccatgaggatcccagatcagtcccacacatgattacactgaattatgaactaagatatttaccgaaacgttttccattaatgcatatttgacttgctttttctgacctaatgaatttgcaaaacgatgacaatcatgtagcaaatgtacatggactagtactcacaattaattttttattttctatgccagcaggagacaaagatgatagaagaatgaaattcatttttgacccagaaatcttattttagctactgctttatctgctcttaattttctaggagtggactttggggccgtcgtgccggatcctccctgaatgtggagcgatggggggttgcacacaggccgttctgccccagcagctaacaagaaagacccttgcattcctccctgcatctctcccttttgggtcctactaatgtctgttgaatttctcttttttccaaagcaaaatccttctctgcattttgtctgcttgtctgtttcccagagccgcaggactctctccttgtctggagttccagagagcccccactttctctttctaagctgtgttgtgtgtttcctggtacattctaggttccccaaggataaacatgactaaggattggaaaggaggaaaggccgcgcagattgttaatctgaaagtcaatccccggatttagctctcaaaaatgctttatttttggagaaaagcaatagagtaagacagaaggacttaacgcttgcagggaagtggctttctgccatgtagagccaggctggcaacctgccctctgccatcagggagtgagcatgaacctggaaacctctaggacgcaagagcgaggctggctgtcccctcgtgtgcagtgcttagaccttcttgccacacgtcccgtccctcacctcactggatagcccccgaatcaactgttcacacgaaagcagctgcctggttctgagtggccatgctcactcccaagcacaggctgaatgaaaagaaaactgtgcaagtagcttgtatggtgggaagcccccagcagaggctgagggtgcagccaggtgctctggaagccttgaggcctctggtgtcatcttcctcacctctaaataagagatgggctgggttggtcaaggtcctccctgtcctaaaacactttaatgaaatggaagaaaggctgcaggctgatagaggagggacagtctggtttggttccctcaagtcttcaggagagggctcaaggacagtctcccatttcttgttggcaaaatgtaaagtgcagtctggaccctgtccattgagtagagactcaggaggccaaccaagatccctgaaaagctaacagcgtggtcagccttcccacagacagtgcacccaccgtgggaggacacttcgccccccattgttaacgtccaccgcgcccagactcccacagcgagctccttcccttcctccccatgtttgcagtggagtttccactcgagaagacagcacagtagcaagtagaggctggtcctgggacactcgcacccatgtgtgtcaggaagcccctgcggtcacacggcccatgaggaagccagaggggctgctggggctgatgaggccagggcagggcggcctgctcttccataaatgacagctggcaccaaagcccagagctggcagcctccacctgaggagtggcatctccatgaacggcttgtgttctcgcacagccccattgcgtagatgaggaaactgaagctcagagaggttcctgcccttgcccaaggccacacagccggatgagctagaaaggtgctaggggactgggaggtgggggagctgagacgctgtcccgctgctgccaggatgcggccgccccccgtgccagccaggcctgcctcctccctctgtccggctcagcagccccggcctcctgttgctcccagtccgagctatggccaagggagactgattcctgctcaccctgggagagagctcaggattttgtctcaaaaccttataaaagatacgaggctcgacattttactaaggccgaggactcttgatctcccagacagatcctagaaccacagggcacatgtgaccagaatccaatctgtgcaaatcaatcagcaaaaggagcccccagcaaaggcgcaggccggggcctccggggaccggcacctacacagcgcacagccccccagggtccgagtcctccaaacccgtgtaggcaggagcctccttaccttgatttgcttgatgtttgctaatcttctcttgaacaccccacagcgtgaaggtaagcaactgttccctaaacgacttagatccttaaaatatgtgtggttgggccgcatatctcatgagagagcctccgcccaaaccagagccctcctctctctgcggccaacaccctggtagacctgggggagcagcctctcccgcccccaccccctcagcgtggtgctggcccgtggctcctgaaccactcaccagtccagtccggggcctgggcccttccccggggccctggtggcagctcccagtggctcaagcagcgtgcccagcaccgcgggtggaggttgagctccgtggtcttctcttgcagggggccgaaggccagagaccaggatttggctacggaggcagagcgtccgactataaatcggctcacaagggattcaagggagtcgatgcccagggcacgctttccaaaatttttaagctgggaggaagagatagtcgctctggatcacccatggctagacgctgaaaacccacctggttccggaatcctgtcctcagcttcttaatataactgccttaaaactttaatcccacttgcccctgttacctaattagagcagatgacccctcccctaatgcctgcggagttgtgcacgtagtagggtcaggccacggcagcctaccggcaatttccggccaacagttaaatgagaacatgaaaacagaaaacggttaaaactgtccctttctgtgtgaagatcacgttccttcccccgcaatgtgcccccagacgcacgtgggtcttcagggggccaggtgcacagacgtccctccacgttcacccctccacccttggactttcttttcgccgtggctgcggcacccttgcgcttttgctggtcactgccatggaggcacacagctgcagagacagagaggacgtgggcggcagagaggactgttgacatccaagcttcctttgtttttttttcctgtccttctctcacctcctaaagtagacttcatttttcctaacaggattagacagtcaaggagtggcttactacatgtgggagcttttggtatgtgacatgcgggctgggcagctgttagagtccaacgtggggcagcacagagagggggccacctccccaggccgtggctgcccacacaccccaattagctgaattcgcgtgtggcagagggaggaaaaggaggcaaacgtgggctgggcaatggcctcacataggaaacagggtcttcctggagatttggtgatggagatgtcaagcaggtggcctctggacgtcaccgttgccctgcatggtggccccagagcagcctctatgaacaacctcgtttccaaaccacagcccacagccggagagtccaggaagacttgcgcactcagagcagaagggtaggagtcctctagacagcctcgcagccgcgccagacgcccatagacactggctgtgaccgggcgtgctggcagcggcagtgcacagtggccagcactaaccctccctgagaagataaccggctcattcacttcctcccagaagacgcgtggtagcgagtaggcacaggcgtgcacctgctcccgaattactcaccgagacacacgggctgagcagacggccccgtggatggagacaaagagctcttctgaccatatccttcttaacacccgctggcatctcctttcgcgcctccctccctaacctactgacccaccttttgattttagcgcacctgtgattgataggccttccaaagagtcccacgctggcatcaccctccccgaggacggagatgaggagtagtcagcgtgatgccaaaacgcgtcttcctaatccaattctaattctgaatgtttcgtgtgggcttaataccatgtctattaatatatagcctcgatgatgagagagttacaaagaacaaaactccagacacaaacctccaaatttttcagcagaagcactctgcgtcgctgagctgaggtcggctctgcgatccatacgtggccgcacccacacagcacgtgctgtgacgatggctgaacggaaagtgtacactgttcctgaatattgaaataaaacaataaacttttaatggt

SEQ ID NO: 474 - DNA, 5487 bp, Homo sapiens
atttcaaaattttgggcaattttgtccacatgattttcctactgtatttgggaaaatttcttcctcgaccaaaatatggaaaccactggctcaaacgaggtccattatgcaacccaaaacagtatttccaccactcactcagataaaattacagagatatcctgaatcagcagaggaaaaggtgaaggttgaaccattggattcactcagcttatttcatcttaaaacggaatccaacgggaaggcattcactgataaagcttataattctcaggtacagttaacggtgaatgccaatcagaaagcccatcctttgacccagccctcctctccacctaaccagtgtgctaacgtgatggcaggcgatgaccaaatacggtttcagcaggttgttaaggagcaactcatgcatcagagactgccaacattgcctggtatctctcatgaaacacccttaccggagtcagcactaactctcaggaatgtaaatgtagtgtgttcaggtggaattacagtggtttctaccaaaagtgaagaggaagtctgttcatccagttttggaacatcagaattttccacagtggacagtgcacagaaaaattttaatgattatgccatgaacttctttactaaccctacaaaaaacctagtgtctataactaaagattctgaactgcccacctgcagctgtcttgatcgagttatacaaaaagacaaaggcccatattatacacaccttggggcaggaccaagtgttgctgctgtcagggaaatcatggagaataggtatggtcaaaaaggaaacgcaataaggatagaaatagtagtgtacaccggtaaagaagggaaaagctctcatgggtgtccaattgctaagtgggttttaagaagaagcagtgatgaagaaaaagttctttgtttggtccggcagcgtacaggccaccactgtccaactgctgtgatggtggtgctcatcatggtgtgggatggcatccctcttccaatggccgaccggctatacacagagctcacagagaatctaaagtcatacaatgggcaccctaccgacagaagatgcaccctcaatgaaaatcgtacctgtacatgtcaaggaattgatccagagacttgtggagcttcattctcttttggctgttcatggagtatgtactttaatggctgtaagtttggtagaagcccaagccccagaagatttagaattgatccaagctctcccttacatgaaaaaaaccttgaagataacttacagagtttggctacacgattagctccaatttataagcagtatgctccagtagcttaccaaaatcaggtggaatatgaaaatgttgcccgagaatgtcggcttggcagcaaggaaggtcgtcccttctctggggtcactgcttgcctggacttctgtgctcatccccacagggacattcacaacatgaataatggaagcactgtggtttgtaccttaactcgagaagataaccgctctttgggtgttattcctcaagatgagcagctccatgtgctacctctttataagctttcagacacagatgagtttggctccaaggaaggaatggaagccaagatcaaatctggggccatcgaggtcctggcaccccgccgcaaaaaaagaacgtgtttcactcagcctgttccccgttctggaaagaagagggctgcgatgatgacagaggttcttgcacataagataagggcagtggaaaagaaacctattccccgaatcaagcggaagaataactcaacaacaacaaacaacagtaagccttcgtcactgccaaccttagggagtaacactgagaccgtgcaacctgaagtaaaaagtgaaaccgaaccccattttatcttaaaaagttcagacaacactaaaacttattcgctgatgccatccgctcctcacccagtgaaagaggcatctccaggcttctcctggtccccgaagactgcttcagccacaccagctccaccgaagaatgacgcaacagcctcatgcgggttttcagaaagaagcagcactccccactgtacgatgccttcgggaagactcagtggtgccaatgcagctgctgctgatggccctggcatttcacagcttggcgaagtggctcctctccccaccctgtctgctcctgtgatggagcccctcattaattctgagccttccactggtgtgactgagccgctaacgcctcatcagccaaaccaccagccctccttcctcacctctcctcaagaccttgcctcttctccaatggaagaagatgagcagcattctgaagcagatgagcctccatcagacgaacccctatctgatgaccccctgtcacctgctgaggagaaattgccccacattgatgagtattggtcagacagtgagcacatctttttggatgcaaatattggtggggtggccatcgcacctgctcacggctcggttttgattgagtgtgcccggcgagagctgcacgctaccactcctgttgagcaccccaaccgtaatcatccaacccgcctctcccttgtcttttaccagcacaaaaacctaaataagccccaacatggttttgaactaaacaagattaagtttgaggctaaagaagctaagaataagaaaatgaaggcctcagagcaaaaagaccaggcagctaatgaaggtccagaacagtcctctgaagtaaatgaattgaaccaaattccttctcataaagcattaacattaacccatgacaatgttgtcaccgtgtccccttatgctctcacacacgttgcggggccctataaccattgggtctgaaggcttttctccccctcttaatgcctttgctagtgcagtgtattttttcaaggtgctgttaaaagaaagtcatgttgtcgtttactatcttcatctcacccatttcaagtctgaggtaaaaaaataataatgataacaaaacggggtgggtattcttaactgtgactatattttgacaattggtagaaggtgcacattttaagcaaaaataaaagttttatagttttaaatacataaagaaatgtttcagttaggcattaaccttgatagaatcactcagtttggtgctttaaattaagtctgtttactatgaaacaagagtcatttttagaggattttaacaggttcatgttctatgatgtaaaatcaagacacacagtgttaactctacacagcttctggtgcttaaccacatccacacagttaaaaataagctgaattattatttcatggtgccattgttccaacatcttccaatcattgctagaaaattggcatattcctttgaaataaacttatgaaatgttttctctcttaaaatatttctcctgtgtaaaataaatcattgttgttagtaatggttggaggctgttcataaatcatgtaaatatatattttaaaagcactttctatttttaaaagtaacttgaaataatatagtataagaatcctattgtctattgtttgtgcatatttgcatacaagagaaatcatttatccttgctgtgtagagttccatcttgttaactgcagtatgtattctaatcatgtatatggtttgtgttcttttactgtgtcctctcacattcaagtattagcaacttgcagtatataaaatagttagataatgagaagttgttaattatctctaaaattggaattaggaagcatatcaccaatattgattaacattctctttggaactaggtaagagtggtctcttcttattgaacaacctcaatttagtttcatcccacctttctcagtataatccatgagaggtgtttccaaaaggagatgagggaacaggataggtttcagaagagtcaaatgcttctaatgtctcaaggtgataaaatacaaaaactaagtagacagatatttgtactgaagtctgatacagaattagaaaaaaaaaattcttgttgaaatattttgaaaacaaattccctactatcatcacatgcctccccaaccccaagtcaaaaacaagaggaatggtactacaaacatggctttgtccattaagagctaattcatttgtttatcttagcatactagatttgggaaaatgataactcatcttttctgataattgcctatgttctaggtaacaggaaaacaggcattaagtttattttagtcttcccattttcttcctattactttattgactcattttattgcaaaacaaaaaggattacccaaacaacatgtttcgaacaaggagaattttcaatgaaatacttgattctgttaaaatgcagaggtgctataacattcaaagtgtcagattccttgggagtatggaaaacctaatggtgcttctcccttggaaatgccataggaagcccacaaccgctaacacttacaattttggtgcaaaagcaaacagttccagcaggctctctaaagaaaaactcattgtaacttattaaaataatatctggtgcaaagtatctgttttgagcttttgactaatccaagtaaaggaatatgaagggattgtaaaaaacaaaatgtccattgatagaccatcgtgtacaagtagatttctgcttgttgaatatgtaaaatagggtaattcattgacttgttttagtattttgtgtgccttagatttccgttttaagacatgtatatttttgtgagcctaaggtttcttatatacatataagtatataaataagtgattgtttattgcttcagctgcttcaacaagatatttactagtattagactatcaggaatacacccttgcgagattatgttttagattttaggccttagctcccactagaaattatttcttcaccagatttaatggataaagttttatggctctttatgcatccactcatctactcattcttcgagtctacacttattgaatgcctgcaaaatctaagtatcacttttatttttctttggatcaccacctatgacatagtaaacttgaagaataaaaactaccctcagaaatatttttaaaagaagtagcaaattatcttcagtataatccatggtaatgtatgcagtaattcaaattgatctctctctcaataggtttcttaacaatctaaacttgaaacatcaatgttaatttttggaactattgggatttgtgacgcttgttgcagtttaccaaaacaagtatttgaaaatatatagtatcaactgaaatgtttccattccgttgttgtagttaacatcatgaatggacttcttaagctgattaccccactgtgggaaccaaattggattcctactttgttggactctctttcctgattttaacaatttaccatcccattctctgccctgtgattttttttaaaagcttattcaatgttctgcagcattgtgattgtatgctggctacactgcttttagaatgctctttctcatgaagcaaggaaataaatttgtttgaaatg

SEQ ID NO: 475 - DNA, 3705 bp, Homo sapiens
actcacaagggccgggcccgaaccaccctgagcgcctcctccgagccaggctcgatccttcacactgggaacggagacactccggtccagtgtcacttgtcctcgagtaagaggagagggatgacaggcgagcaacggagtcacaagggctctgcagagaatgaagcgtgagtggtggtcgtggaaggcttcccggaggaggcggtgcggtagccgcggctcggatgacgcggaggagccagccagagaggggaggggcagaggccctccaggaggagggacccgtgagtgaggcgcgggggattcagcgcccccagcccgggaggaggtgccttctgagctccgggcgagcccctcccgcccttccaggcggagcgccgggcgtgggcagtgccagggcccctcgcggccgctgattgggtggtgcggccgagcggagcggctccgcgggcgccgattgtacgtgggctccttccctgtggatgacctggacacccaggagagcgtgtggctggtgcagcagcagctgtgggcgctgaaggactgtccccgacgccgggccgtcatcctgaaattcagccttcagggtctcaagatctacagcggggagggtgaggtgctgctgatggctcatgccctgaggcgcatactctactccacctggtgccctgccgactgccagtttgccttcatggctcgaaacccacggagcccagccagcaagctcttctgccacctctttgtgggcagccagccaggagaggtccagatcctgcacctgctgctgtgccgctctttccagctggcttacctcttgcagcaccctgaggagcgggcacagccagagccctgcccagggcccacaggggaggtgcccctgaagccactgtccagctctgggggcctggtgcgggagcccttcggccgtgatcaactctctcagaacgtccatgccctggtctcctttcggcggctgccagcagaggggctggtgggcagtgggaaggagctgccagagtcggaaggccgtgcccgccatgcccgcctggggaacccctactgctcgcccacgctggtgcgcaagaaggccattcgcagcaaggtgatccgctcgggggcctaccgcggctgcacctatgagacccagctgcagctgtcggctcgggaggcctttcctgccgcatgggaggcatggccccggggtcctggtggccactcgtgcctggtggagagcgagggcagcctgacggagaacatctgggccttcgctggcatctccaggccctgtgccctggccctgttgcggagagacgtgctgggggccttcctgctgtggcctgagctgggtgctagcggccagtggtgtctgtccgtgcgcacgcagtgcggcgtggtgccccaccaggtcttccggaaccacctgggccgctactgcttggagcacctgccggcagagttccccagcctggaggctctggtggagaaccacgcggttactgaacgtagcctcttctgtcccctcgacatgggccgcctgaaccccacctacgaggagcaggactgtgggcccccaggcaggccgccccggactctccggcccctcagccatgccaagtccgaggcagagctgcagggcctgggctaagaggtagggccccggtcccacaggccccgcctcaccccggctcctgggccccagcagcatctctgcccgtcctgcacccctctggttgccagttccatccagtcaccctgcccttggagcagtcttccatcgcgtcactgtccgtgggaggggagccctgagggtgggtatcgccaatggcttcttggagaacatgtggcctgctgagattccaggagggcaggtggagttgcaggcttcggataaccctttgggtggcttcggatgacctgctgtgtggcttcggatgctttgggacttctgggcttctgctttactcctggggcaggagcttgttcacggcaaagctgcagccctctcctaaggaggctaggccttggggcgctgactgggagtctccagaaagagggttttggggaggcaggagtgagcttttactctgggcaaagacctggagtgagccaccctgtctatgagagcagagatgactccatggagcttgtgggcaggaggctggggatgagccccatctaggctgacagagcagggctgtttctcacatgtatctgagagtgaaggaggggtgggaaggtgcagagagggcaggagggacagagggctgtacctaacgctcacgcacggtggactcctgtgtgcagaaagggatgcgcaccagcagacagggccaagaatctccatgctgtctccactcaaaacctcagggctgtgactcccgctttctcagaagggatgcgcaggctcaccccttccccctaggaatcaccagggcacccccacccccagctcatctcctttagccatttgacagggaggggccagcagtgagctgcaggcttagaggggtgaccagggcccttcccaactcgaccgcatgtggtttggtggctgccttgggagggaggctgtccgatgctgacattccccttagcatggccctgaccgtggctgtcaggggccaccttgcctcaccaggccagccccactgggaatggggtcagtcacagcagaaccgtcgaaaggtggacctgatgtgggccctgccgggggcgcttggcctcagcgggccatgggagacccagggaaacgactctagtgtgaggcagtggtcctgccagtgactgacaaaccctctttgtaagcaaacttgacaaataatgaatctactgaactcagttatagaacaagttcattttgcatgaacttctcttattgaagcagaagccacgtcatgagcctgggggctgccctctccccgtctgggagtgggacagaactgttcagtgccttgaaagtcacagatttctgactcctggaaggaactgggcagtcccaccagagcagaaagaaaggaggcaaacttggggagtgagaagccagcctcccagaggcccaggcctcgtgttccccacctccaaccctcccgtgaggagaggggcttggcctgggaccttgtaacttccttgcaagttaagtgagctatcctgtcacaaaagatagaaggaactgccctttgggacttcttttcactggaaacccagcactggttttatgttgagtgagtgggaagctgggactctgttttacagccatctgtactggagcctggacaaaccactggtctctatgggaggccccagcctcacatttccctggcaaggagagagaggtttagccatgtcctgggtctaggattacagcccagagatgggcacttaagaagacctggtcattggtccagacttgggccaaggctctcctctgtgagggatgggttttactggtgaattacctgtgtggagaagctatcagggccatgtttagcacactgaagggaccagtctccaccaagcactttaacatccctccagccagcatagattgatctcgtgttacagagagggcaaggtttttggcccctgtttgcagactccatgtcttaatcagagaccacagttttctctttgttccaatctgcgccacctcggtagccccactttccttgctgtgtggacttgaaacaaaataaaatgtgttgcttc

SEQ ID NO: 476 - DNA, 3747 bp, Homo sapiens
tcatataaggaagccctttagatggtacattcactaagacgtgtctgggtgtgatcctgtttgggaaaaacagaatcctaggttctaaacaagaaaagaacgcccttcccaaagggtccgcacactttctgctttgcagcggatcaagtgtccttgtgagggtgagacttccttcaagggaagggaagccattgctctctctgtagatagagcccagctggtaacgggggagccacccaactgcaggggggtgtatgttcaggtgtgaaaaacagaaaactgggtctgaacatgaagagttgcacagcagtagttcgaagaagctggcatctctttggcaaacaccaacctcagcaaatgcaactcctacacttcattcccaaggaccaggtgttgctccttaaggaactctgtatccctctctcctctccagaaccccattcctcccactggctgagcttttcctttcctttccgggtcacccatagaccctctccgtctgtaccagtgcgtctgtgttgtgagcgtgacgaagcctttcctgtgaagagctttcatgaactcattctcatactccttccccatttccacccatggtgtgactgttttgctattcaagactatctgtaaaaatgtacaaataaaagtgaaaactgaaaataaaggggagggagattgagattaaacaaatgcaatgatgtagcccttagttttctgaggacttctgtggacggccctaaaatcctgagttagggtgggatctgaagggagggataccattgacacaggaggtttttttctggttgtttctctcacagtcatcagtgtctgcttagaactctctgttctaaaggtttttccctgtaaagtagaatgcacttcccccaaaataaaagtaaatcagcaatgtttgaagggtcatggcaagggtcatgacaaagacctgactctggggtggcatgagtggccctgtcaccggctcactcagggccttgggggagtctcattacctcaccttgtctccacgtcttctcagccaaatggggatcaggggcttccagggctctgggggtgcgcagtccccttgtgtattttgctgctatttctagagagactttgagcccttgctagtgcgtgcttactgcatggaggtaaattaggagatgttttctctctgctactcctggcctctgctttcgcccctcagaaagtgaccttgagctagcagccagtttgcactcagagtccagagccttctatctaccgtttcattctcagattccttttcccacccactttgacgatctcattttactatcagtctctactgactgagctttgctgcactgggctggggtaggagaaagagcatccaaggagatgatgtgtgaattgctttgtaatttatgactctccatataaatgtggcttgcagtgtcagaagcagggagtctggccaagggttgctaccaaataagactgaagatggtggaggcagtggtggcgtggaggcagtaggcagaagatgtgggttgggagcagaggtaagatgaacggagctttgggaaggacagatggcagaagcaccagaaaatcctcagcaaggcagcagagaaggatcctcaaagcagtaaccctgaagtaataggaagtaggaaagaggagcagggattaggtaaatctgcagcataaacagctgtctccctgcaggactgagaagaccagctgccccagagaggggaggcacgtcgagcttggccagtgacccaacccatgattagaggcaccttcaatcccaactttcctctcctctgctgggtcacagtgatggaaccagcttcaggaaggtagtatagaccagcgtcatccaatggaaccatgatccaagccacatatgcaatttaaaatattctagtagccacattttttaaagtccaaagaaacagctaaaatcagtgaaattaatttttagactacattttaacctaacatgtcaaaaatagtatcacttcagcatggaatcaatataaaaattactgggatattttacattcttttttccaaatgaagtcttcaaaatccaatgtgattttcctcttagaaaacatctcagtctggcccagccctatttccagtgttcaatagccacacctgactactggttgctgtataggacagcacggacttaggttcttcattaggagactgatggggggggtccttcctggtgggtcactcactgccatagctcttgtcatagctgatgaaggcaggagtgagtcttattatgttggcctagagtagaaagcacagagctatgtcgaggctgctgtctcagcctctggaagttctgcttcacctgcttagtaagaggagatgaccactcctgtggactgcatgtcccatctgcccccagagggtgtcggcgctgccccagtcatgtcccttatgacctgtccaagtcctagaggccaaagcaggtcatattcttcagctgcaggaatgtcagctactgcctcccaccccttaacctgatccccttatcatatagtggggaaggggcaggcaggccttctctctgtcaagaacaaagatctctacaacatttcgtcacctgggccagtcacctgctaatatcatctcaccaatatttggagctgttttctgaatcccttaattttcttaaatatttatcttaaagtcaaatgctataaaggagataccctgggaagggcagtggccacaggcagactgggtctcctaggaggtggtggtgttggtgacaagttctacttggactgggactcaacccaccattgcctacctctcttccctgcctggagaccttccttaggattgaagaaacctcttttgtttgtgaaaaagataggtatcgagatcttaatggagagaacagaataaaatgcaaggagccaacccctgggtattctcaaagcatttcaacggtcagtataacaaggtttgattgatttaaaatataacattctgagccctgtgttactgagcaaaaatgagctgatttggtgagtatgttttatatatggtcattagacagggaccataactgacaaaactctcaaacgcctggagtgtttatggcccaccagattattgctcagtcaatataaatttatttacctttattttaatttgcatagtgctttctgattggtcagacaaggagtggtgtgtactgcaggattctaacaatgcctctgcccttggaggcagcaattcctgtggttattggtgctaaaataagataaaatattatgttaatttgttctgatatgatgtgaataaatgtgttgtttaatcttaacaagaatgctacatcttatcagatctattgtactgtctgttccttctcataattaattaattacaggaaaggcgattcaaaccagatcttgaaactattgtgatgttctgagaggtaaatttaacagggaagtgggaggggggatgaaaagggaaattgccaggttcctgtgactttgaaaggactgaggaagcagagagcatttggggacttcactgaaactgactgcatcttgcaattttctttttcgaattggcagaaatattgtatttccatcgattgaagaaaaacaagtgtctggtaattaattaaatgacttgttcatggaaaaaataaataatctgtcagttgtggaatgtaaactgattaaacaattaaataaagaagattatgttgtgtgtttt

SEQ ID NO: 477 - DNA, 3581 bp, Homo sapiens
agccagagaacacaagaaacaaccagtaactccaaagaaaggtcagggtttcaagaacattgtgcccccccggttgactgtgcagagcaagtacctctttggatggaggtcattctagctgaacagttgtcctactccctgccatccttctttccaccttccaagattggacactgcttctcatggggctccttggccctgggctggatcaagaccacaatttattatgtaagacatggggtgaagaatggtcaaggaaagttatggccgtgagtgacatggaattagatgaaaaggctcaagtttgctgaagagagtttaaatttggcttttgctcttggaaacgtcaaaataatcataagaagcacttgtgccttacagagcaaataatccacagagtgtcatattcattttgcaaacagggtcacaacagcagtcaaatagaagcctgaacacccagagagttaacatacagattccataaggataacaagggattgagcatgctggtgggtttttaagtcagatccacattgaaccctgtgacctaccggaggttataagtggaacccggggaaagcagcttttccatacaaaacaacaacaacacaacgacaacaaagaaaaccagactctgctggatgtctataatactcatttgcagtaaggctttcaagatacaggaatttttatagcatttgtattttaaggatttagggcaaatacatttttttttctacgtgataaaaagaaaattagtacttaaaaggttcaaaaatatattgattgagttatttttcttacataaataaattatattgatttttaggatttaacagctgaaaaaaccctttctgcttccactggaggcaaaactgaacaaaatgttagttaaatagagagagcagcatttctaagaaatctgtggtcagcattatagaccatctatgctacaaggatgtcattaaataggatttgttcaattactggattcttcttctatgatcagttatagaatttctggtttatatctctgattcataaaacttggactccactttttgaagatacatctgattgatttttttcagtcatgatttaacagacttctttgagatgctcattttaacatttacataatttataatcccaaatgtataaaagacaatgaaaaaagcatcataaataaataatgcaaaatgaaatagttatgtcagacttttggaccttctgataaattagcaaaactgtaacagaaaaagtaaaaaatacagtaaattgtgacaacaaaaagtgaaactggtactagtaacacttgcaacatttccaagggtcctgcgcagccctgcgcccccagagtactgaaccatgagcttacttcaagtctcagagtgtgaactacctgtgaagagtgagaccatcagaagggacgttaacatgaaggtgaaaggacatggggaagtgctgcttaggcaggttctttctcagttcctaaacatggagaagctgaggaagaagagaaaataatgttgacttgcaatgtagtttcgattaactgataatttggaatttgggtccaactgtaagatataaacagaatggagaaattaatggagaagtaacttttcatagctgtattataaagggtggcacacatttgacagcctcagacactcttgatcaaaggacctactagcaagtgtcaaagtgttgggcaactgtcttcttgcaggctccagaaagaaccttattcttggtgaaggaaagcctgaagtgaaaatccattcggtcctggtgctctttaaacacagagaggcaaattaatggctagagaaatctgtaagcgaaccaggtgagagcagagcgctggccgtgtgcttgtgaagcagcgtgtagctctacggagcgcgggtccttgccccacccccgtcgacagcaataactcatggtgggtaaagctttctcgcagcaagaggaatcttttcactggtgagagggatgtatagaaaataatgcctagtcagtcagtatttcttcttgctgcaggtgtctgaaaaaccaccaagggggaaattatattactaccggtaaggtttttgttttttataaagaaatgaatatatgtattttcaaccattagttatatacttctgtctgtactactcacttagtaatcatgataaaatagggaaatattttaactcaaaaatatgcaccagcacttcctttttctgtgctttttggttccctgtgacattcttcctgtgcaacccagctcacagaaaaagagctcctctttgtctctgttcttccacccttcaatggtaaaaccctagacagctttcttttgccatttttcctcctcaagtgagtgggaaacttggaagagaagggggtagggcgtgtcaccaagtactgtattaactatgattgctggaatgaactggataacagaatgagaattctgtgcctcctagactaggtagacaacacttatctaatgaagtggttagaccctgcaactattaacatctgttaccatagttctcagacaggaaatcaggtacgtaatcttacttatggaaacacaggttcttatggaggtgaagtgagggaagtaacaaacctttatgggataagaaacttacaagtcacaataatttcttaaatgaaaaaagttctaattggtgtcgttgttggagtctttgagtgccccctccccagcctgtgccccatgttctctctctgcgggcaaaggggcactgggttcggcacagttctcatcaccgctgggctccctttcacagctgggagcaggctctgggtgggagttggggttgtccccctttgtcttcttcttcttcctcttctggctctccagacctactatttccgagtgtctggcctgctgcatggctggcagagccatgcccataccaggggagaggaacatggatgggtaaatgagtccaggagatactcctgggatgagaaatgggttaaaagccacaggactactagtagttattgcaggttcagactgatcagaaaatggacctggaccaggcttgtcctcagctaaagtgtctgttttcacatcatggctactcggcttgtcttccgcagtcttttcagtcactgccgtaccacttttcgttgtgcttgatagagacgccggagcagtggaagtgcaggtggttgccatgggtggactgaggagtcccccaacaccaaacatctggggcacagcagccatgcctggcagcatcatgggcagcatgctcagggtacttttgacctcttcacctgttggcatcgtggcaaagccagctggaaaccccaccagcccggtgagggggatgcctggcatatttctcatgttctgaagtcctaccaggtccatcccagcaatcagtccattcatgaacagtggccccattccagagggagagtctgccacaatggaaggagccttcaggagttcgctccgaggccgcctccccctcctgcgggggcccgtatctcgaagaataggctcagccagagtgtgattgaacttgttttctggaagaaacccctgg

SEQ ID NO: 478 - DNA, 3705 bp, Homo sapiens
tgtccaggcctggcctctttcttgaggtggccaccaggcccaggccaggccctttgcccaagaagagagggtctgccctgcctcactcccctcttcagtcccagtagactctgctccctagccctgagcaggaggctgggagcagctctgtttcctaattcaggaccccactcatctagccctccaagagcctccgccaaattgtagccatgtaattggaacaacccataagtcctgcttcccagtccatgggagattccaagtggccactgcaggagtcactcacctccctctctccctgtaacttgccacctgcagttcttagggctgtggggtcagatggtggtggtgagaggccttggggctggggaaggagagtggactttggctcactctgccatgagaacaggacaccatcctgcccagcccagacggggttgctcctggtccaagaggctacctgctcgaaggcggagggtgggagcaggtgtgccagggctcagggctcagacttgggagggcctaggcagaagccccaagttctgttttctgaggtatgtgctgcccttggcttcagcatgagccttggtagcagaaggtgaggaacctcctctgccctggtccctgggtggaatcttcccatgtccttggccctgcctggggtgtgtggtgtgtgctcctgcatcttgtctgggagtgcagtgaccgggaccagaaccttccccacctcaattagggcttagccatctccctgtccccagcacccctccccagcccacagtggtggcctctgcctctttcctggagagagaaggacagtgcacggagaggtttccagagcacaaattgttggttcctagcacaaattagatggtttggagcacaatggtgaagcacactcccctccctcctcacctggggtccaatgttctgtctagtggcagcttttcccctggaacaggggtccccggagttcacaggcttatccccaggaagcctcactcctggggaaagacagataatttcactgcccctttgagccaccactcactctccttattacacaagcacagccgcccagtgtgcacatcatgtgcagacaccttggaaacctttcccaagccttcctggcccacagtggccagtgccataggcagtgctgtggacagtagaggctgccaaaggcaagggctggtcttcaggatggaggccagcctgtgcagaaggctgcagctgacaacagcgaccccacctgccattaccttcagggcctcctctggaagagaacccattctcagagtgcagccagggaggaacctgacccaagagtaaatgtctgcagagagatggatggatggatggatagatggatggatgggttggggagtgggggtggatggatggatagatggatggatggatggatggatgggttggggggtgggggtggatggatagatggatggatggatggacggatggggtgggggaaggaaggaaaggagggagaaaggagggaatactggctccatctttgagagctctggtgggcagggcagaaacaggccacagtgctcaacccggacaccctcacgaagggtcgcaagtcactcttgtggctcagattgctcttaggacctggagggacagaccagaatcagggtcccctcctttacccctgagttccttactgttcccccaagcctgggagcagtctatcccccaaccctgccatctcccttactcatccctcttccacagcttcccctttctagccccctctgccctacctgtctttcctgagtgtttgaggggagagagagacccacatctccccaaagagatgagcttttggggcacaacatcccaccgcagtccccctcacccgacaacacctcctacctggccccttgccaaatcccaagcagaattagcaacaggaaaagcagagccccaggagagacactctactatatatactcttctatatattctgtttctattgtatattcactctgtacatgtgggtgtaaatgctgttaaatgacaaacccaatattatactgtggctggtggactattttcatcctcagtgctgtacagatctattttcattgtatatttgatatatttttaattttgtagcgtgtggctgggccaggccccagcgggaggggctgagctggggctgtgtgcttgctaggtgtgggcgcgctagtgctcgttgtagccttttgctgtgtcttcgctgtgtgttagacgtagggcctagagctcggggtgtgtgtgtgcgtgctgtgtgtatggtgtgcacatacgtgagtgtgggtgtgtgtagcgtgctgatctgtgactcccagtgttcaccaccttcctgaagaccacgctccctccccctgcctcctcctcctcctcttggctctattgggagcctcagggccggcagggtgcttcgggagccccctgctacggggaaaggcatgtgtttcttgctggtgactcattgccttcacaccactgggtttgccagaaacagggaaggagggcgttaagggaaaaaaaaaatcctcaaatttatttaccagtcagcttcttgctgttcccagtagaatcgctagctcttctccagaggaaaagtactaggattcttaagatggcgagaccccaagagggatctcatagcactgctgcatttgccgttgacgcagtcctgacagtatttgaaaagggccgcctgccccctccccactgtgcttttgatgcctttggagtcaaaggcaggtggggtcacctgatgagctaagatccagccccagaatcctggaggagcaggaggtagcaggagaggaccaggtccccaagtcccttcacagggtccccacccccactggctttggtgctgtccacacagtgcccaccagaaggcagagggaactccagggcagggatgtgcctgaaagagtcaacagtcccctgatcccctacctctgcctgccctccagccccatcaccagcttcttgctcagggagacttccgccctcctcactgaggcaacatgaagcctgaggcccagatgggggctgaacaggtagggcacatcagttaatgccagtgaggtcagcttctgccctccagcaatacatgtgcaggggttgctgctttcccagtgccaggagaacccccgctccgagtcagcctgtgtgggtcatgaggctggggcccaggagacacggtcccaggcactgcacaggcctgcagtattaccaggcggaggggctgcttttctgcccttcctcacccccacgccccaccccactcccccagagtactccccactgtgaaaagagctggaaactaaactggttagaatgaacctggctccctgagcatccctggatccttcaaataggccctgagatgtgaggtctgctgcttcactggggcccgatgactttggctgggggagggggcctagggcctcttctcattgaaagctctgctttatacagacccaagcatacacaccaggccgtcactttgggttctggcataagttcagaacaattcaagtccatgtgtcccatggctggtcagagccctgggtcaaaaccactcagcccaggggaggggatgaggcattgtcaccctagacccctcttcctctctcccccaccatagtgtgcaataaagtgtctgttcttacc

SEQ ID NO: 479 - DNA, 5531 bp, Homo sapiens
gctccagcggtcggcatggcagctgctacctcgctgggacaggctctgggcccacgcgtgccgcgcagtccctacagaactgcagttgtcttgtcttctcggagtgctttcggctacttttcccttattactttagctcgatacacgttgggctgcctttcacattcggatattacgctgttcgagtgctgacgggaaaggcagccctttgacacgcacgcgaaatgtcgcctgacgagggcaaaggtgacagttactaccggaagtaccctatctcagataccctttagattttcccccattgaagaaaaacgaggcgggaaaaacgctgttagggtttaactcaggccctggctccttctcgaacgaattagcggaacacccgcaggagccttgtttggcttccacttttcggcccgcccagttctctgagcgtgcggcggacgacgccggtgattggttgagcgaatggaaacggctcggcgcggtggttggccagtgggaaattctgtacgttgtgattggtccacaggaacgactcggcgcgcgcgcgggagcgagctttgaaagttgagcacggcggcggcgagccggtgccctgggatcatggtggcgttgcggggccttggtagcggcctgcagccctggtgtccgctggatcttagactcgaatgggttgacacagtgtgggaactggatttcacagagactgagcctttggatcccagcatagaagcagagatcatagagactggattggctgcattcacaaaactctatgaaagccttttaccctttgctactggagaacatggatctatggagagtatctggaccttcttcattgagaacaatgtttcccatagtacactggtggcattgttctatcattttgttcaaatagttcataagaagaatgtcagtgtacagtatcgagaatatggccttcatgccgctgggctttactttttgctactagaagtaccaggcagtgtagccaatcaagtattccacccagtgatgtttgacaaatgcattcagactctaaagaagagctggccccaggaatctaacttgaatcggaaaagaaagaaagaacagcctaagagctctcaggctaaccccgggaggcatagaaaaaggggaaagccacccaggagagaagatattgagatggatgaaattatagaagaacaagaagatgagaatatttgtttttctgcccgggacctttctcaaattcgaaatgccatctttcaccttttaaagaattttttaaggcttctgccaaagttttccttgaaagaaaagccacaatgtgtacagaattgtatagaggtctttgtttcattaactaattttgagccagttcttcatgaatgtcatgttacacaagccagagctcttaaccaagcaaaatacataccagaactggcttattatggattgtatttgctgtgctctcccattcatggagaaggagataaggtcatcagttgtgttttccatcaaatgctcagtgtaatattaatgttagaagttggtgaaggatcccatcgtgccccccttgctgttacctcccaagtcatcaactgtagaaaccaggcggtccagtttatcagcgcccttgtggatgaattaaaggagagtatattcccagtcgtccgtatcttactgcagcacatctgtgccaaggtggtagataaatcagagtatcgtacttttgcagcccagtccctagtccagctgctcagtaaacttccttgtggggaatacgctatgttcattgcctggctttacaaatactcccgaagttccaagatcccacaccgggtttttactcttgatgttgtcttagctctgttagaactgcctgaaagagaggtggataacaccctctccttggagcatcagaagttcttaaagcataagttcctggtgcaggaaattatgtttgatcgttgcttagacaaggcgcctactgtccgcagcaaggcactgtccagctttgcacactgtctggagttgactgttaccagtgcgtcggagagtatcctggagctcctgattaacagtcctacgttttctgtaatagagagtcaccctggtaccttactgagaaattcatcagctttttcctaccaaaggcagacatctaaccgttccgaaccctcaggggagatcaacatagacagcagtggtgaaacagttggatctggagaaagatgtgtcatggcaatgctgagaaggaggatcagggatgagaagaccaacgttaggaagtctgcactgcaggtattagtgagtattttgaaacactgtgatgtctcaggcatgaaggaagacctgtggattctgcaggaccagtgtcgggaccctgcagtgtctgtccggaagcaggccctccagtctcttactgaactccttatggctcagcctagatgcgtgcagatccagaaagcctggttgcggggggtggtcccggtggtgatggactgcgagagcactgtgcaggagaaggccctggagttcctggaccagctgctgctgcagaacatccggcatcacagtcattttcactctggggacgacagccaggtcctcgcctgggcgcttcttactctcctcaccaccgaaagccaggaactgagccgatatttaaataaggcttttcatatctggtccaagaaagaaaaattctcacccacttttataaacaatgtaatatctcacactggcacggaacattcggcacctgcctggatgctgctctccaagattgctggctcctcacccaggctggactacagcagaataatacaatcttgggagaaaatcagcagtcagcagaatcccaattcaaacaccttaggacatattctctgtgtgattgggcatattgcaaagcatcttcctaagagcacccgggacaaagtgactgatgctgtcaagtgtaagctgaatggatttcagtggtctctagaggtgatcagttcagctgttgacgccttgcagaggctttgtagagcatctgcagagacaccagcagaggagcaggaattgctgacgcaggtgtgtggggatgtactctccacctgcgagcaccgcctctccaacatcgttctcaaggagaatggaacagggaatatggacgaagacctgttggtgaagtacatttttaccttaggggatatagcccagctgtgtccagccagggtggagaagcgcatcttccttctgattcagtccgtcctggcttcgtctgctgatgctgaccactcaccatcatctcaaggcagcagtgaggccccagcgtctcagccacccccccaggtcagaggttctgtcatgccctctgtgattagagcacatgccatcattaccttaggtaagctgtgcttacagcacgaggatctggcagagaagagcatcccagccctggtgcgagagctcgaggtgtgtgaggacgtggctgtccgcaacaacgtcatcattgtaatgtgcgatctctgcattcgctacaccatcatggtggacaagtatattcccaacatctccatgtgtctgaaggattccgacccattcatccggaagcagacactcatcttgcttaccaatctcttgcaggaggaatttgtgaaatggaagggctccctgttcttccgatttgtcagcactctgatcgattcacacccagacattgccagcttcggggagttttgcctggctcacctgttactgaagaggaaccctgtcatgttcttccaacacttcattgaatgtatttttcactttaataactatgagaagcatgagaagtacaacaagttcccccagtcagagagagcacttcacagatgaacagcgattcaacatcacttccaaaatctgccttagtattttggcgtgctttgctgatggcatcctacccctggacctggacgccagtgagttactctcagacacgtttgaggtcctcagctcaaaggagatcaagcttttggcaatgagatctaaaccagacaaagacctccttatggaagaagatgacatggccttggcaaatgtagtcatgcaggaagctcagaagaagctcatctcacaagttcagaagaggaatttcatagaaaatattattccaattatcatctccctgaagactgtgctggagaaaaataagatcccagctttgcgggaactcatgcactatctcagggaggtgatgcaggattaccgagatgagctcaaggacttctttgcagttgacaaacagctggcatcagagcttgagtatgacatgaagaaataccaggaacagctggtccaggagcaggagctagcaaaacatgcagatgtggccgggacggctggaggtgctgaggtggcacctgtggcacaggttgccctgtgtttagaaacagtgccagttcctgctggccaagaaaaccctgccatgtcacctgccgtgagccagccctgcacacccagggcaagtgctggccatgtagcagtatcatctcctacacctgaaacagggccattgcagaggttgctgcccaaagccaggcccatgtccctgagcaccattgcaatcctgaattctgtcaagaaagccgtggagtcaaagagcaggcatcggagtcggagcttaggagtgctgcctttcactttaaattctggaagcccagaaaaaacgtgcagtcaggtgtcttcatacagtttggagcaagagtcgaatggcgagattgagcacgtgaccaagcgggccatcagcacccccgagaagagcatcagtgatgtcacgtttggagcagggatcagttacatcgggacaccacggactccgtcgtcagccaaagagaaaattgaaggccggagtcaaggaaatgacatcttatgtttatcactgcctgataaaccgcccccacagcctcagcagtggaatgtgcggtctcccgccaggaataaagacactccagcctgcagcaggaggtccctccgaaagacccctctgaaaacagccaactaaacagcgcctcccaccagtgtccaggcaggcaggagcccttgaggaagcagtctcgtgtcctccgtgtgaaggcagctggatcacttcccgcagtccttgggcagcgctttgctgtggaacacgagagctcctcctcaggggcctggcactcaccttctattctgtatgatgtatttggttaaacactgtcaaataatagagatgtgccagatttagattttcttaccctaatctgtttaatattgtaactttattccatttgaaagtgtcaagcccattcagataagctataatctggtctttaaggaacacaactttaaaactgcagctttcttttatataaatcaagcctctgttaacttgaattccttatagtacatattttcccatctgtaatgacgaaattttgattctaatattttttctattatttataagtgcaaattttttaaaaaagtgtacagctttctaaaagtaataaaggtttagcataaatacagcc

SEQ ID NO: 480 - DNA, 4310 bp, Homo sapiens
atccatcagtatactcacgcaacattgatccacccaccaaccccttcatccatcagtccacccatggaacatccattcatccagccatccattcatctacccatctacctactcattcatctacctacccacccacccatccattcatccatcagtctacccatgcaacatccattcatccaaccatccattcatccaaccatccattcatctacccacctacctacccagtcatccactcacctacccatctatccatccatcaatctattcatgcatctttcatccatccacccacccatccattcatccatcaatccaccaatgcggcacccattcatccacccacccacttatccatctattcatctacccacccacttatccatctattcatccacccacccatccatccatcttcccacccacccatccattcatccacccacccatccattcatccatcaattcactcatgcaacatacatccacctacccaaccatccatccatccatcatgcagacatcaactgggcttgtaattgttgaagactgttaggtacagaagcatctataatgcacaggttctcgattgtgaaaaggggttgtgtacacaccaggaggcatcagtgttgtgtgatgagtaagccatgagataatgcatgttgtctactcagacaaaaatggatgagcagagggtggaatgtgggtgttggtgctgagactggaaccacatgtatgttggtctccatcctacccagggcctttgctgttacagcccatttcttagcaaacacccagatgaatcagagatgcatggatgtactcgcagccagcacattcctgtcgggacagacatatagcccaagcatcttgacctccaggtggcatgtctgcaccaccgtgtgcaacctagtggatcgtgagcagctgggggtgcagctgccagcactcagggtgcctgaggagtgaacagtggggggctgagccacaagagggagaggcattggagggaggtggtccagctggaccctttctcgtgggaggtgcagaacctggtctaggaccactgaaacttgttgtgttgccaggaacaagccagctcacaccagctggaacatgggcgccatcctggaggggaagcgcagtggctttgcaccctgtgggcccaaagagcaactttccatggagatgatcctaaaggctgaggaagggaaccacgaatggatttgtaggatcctgaaggacaactttgctagtgctgacgtggcggacgcaaagggctacactgtgcttgctgcggctgctgtaagccccacaccctcccagctggtgcccgcaggagcttagctgtgagggtcacacatgtgggtggccctctgtggccccctctgcaggagcagagctgaggtacatggggacactgattgtccacacctccacctcgccgttcagcagaaacccactcagctgagtgtgacactcgtggtccagtgcagaagggtttggggcagagtgcctgttccattcctctgtcccacacttgtccctttgccaagctcccgaatgagcactggttcctgccctgccatggggtggcctcatgagggcatcaggacacccagtgacccttcccacccctgagggccaggtgcatcatcctgagtcctgcctcatctccctccagactcactgccacaacgacattgtcaaccttctcctggactgtggggccgacgtgaacaagtgctcagatgagggtctcacggcactcagcatgtgtttcctcctccactaccccgcccaatccttcaagcccaatgttgctgaacggaccatacctgagccccaggaacctccaaaattcccagttgttccaatcctttcatcatcatttatggacacaaacctggagtctctgtactatgaggtgaacgtgccttcccagggtagctatgagctgaggccaccgccagcaccactgctcctgccacgcgtctcaggcagccacgagggcggccacttccaggacaccgggcagtgtggggggtccatggaccacaggagcagctctctgaagggggactccccgttggtgaagggcagccttggccatgtggaaagcgggcttgaggacgtgttgggaaacacagaccggggcagtctgtgcagtgctgagacgaaatttgagtccaacgtgtgtgtgtgcgacttctccatcgagctctcgcaggccatgctggagagaagcgcccagtcccacagcttgctgaagatggcctcgccctcaccgtgcaccagcagcttcgacaaagggaccatgcggaggatggcgctgtccatgatcgagtaggtcctggcaccagctggtgggggtggagggccaccatcagggctgaatcctatgctcagcagacccacgtctcttccctgtgccagtgggaggcgttgtgtctggagatgtgtgtctgaatgtgtgagcatccctgtgtcggtggctccacgccatggccagccctgtgggggtgccacggtgacgggctgttttcagtgccaccccagccctgtgggggtgccacggtgacgggctgttttcagtaccacgccagccctgctttggcctttggcactggcctgaagtgtctctgtgggagcctcagcaggggccactgtcaggggtcctatcctagccatagtgcacgtgagtgacacctgcctgggcagctctcacacccctgctgtccaccctgtctataccagtgtgtctcaaaatgtggtctatgcacccccgggggtccaagaccctttcagggagtctgtggggtcaaaatgattctcttgataaccctgagactctgttagccttctccttgtgttgatgttggtggatggtatgaagacagggccgtgcagaccaccagcccccagcgtgcagggcagcagtgcccggcctgcttgggggcatggtattccttcaccacggtgtgcacttgcggggatgcctgtctcactgaagaatgcctttgacaaagcagaaaagcaatgacaaattgcattaaatcttgctccttgcgtacacacccctcgaatattctgggtcggaaaacatgggaaggacactgatgtgtgtctgccacagaccaaggcacaccgcttccccgcaagaagcgcttcccccagggccagagtagcaacagaatgcggcatcttcccaacctcctgccccatttttgattggaagaatgaccactggtatgtggctgttcattctcctgaacacagcctgccactttaaggaaaacatatgacactatttgttgctggcgaaatttacattttcaagtgaatagcagaattctggacacttgccaccaccaccaagaccttcatagcttcccttaactttgagacatgggtgttcagaggtttttcacgtgagatggcgttagcagcgcagttttgtgatactgcctgaagacatgccgacagtgcccagatctcttctattggtgagccagcttttcccacacggccaagttctgatgttgaaccattgccaggtgggtgaagatccattgacagtgagaggtgggcccgtgggcttcagtgcagccaggcgcagaaggctggttcatgagtgtccagctccgccaggtagctagctcaccacccccagcctgggttcatgtagttcaaataggaagaccacgatgatcagaaaggctgctcaaatactccttcgtccagccgcgtacctgggggaggctgaatctccactcacttccaccaaggctgtgcagagcagataggggaatccagcaaaggtggaaaacagtgccatccttctccccaactggttttgttttgtaaaataactttttgtgacagtgttacttattagtaacatgcagtgggtttgttatggttaacaagttggtgagcattattgagaggtgaagccagctgagcttctgggttgggtggggacttggagaacttttgtgtctagctaaaggattgtaaatgcaccaatcaatgctcagtgtctagctaaaggattgtaaatgcaccaatcagcactctgtaaatcagcactctgtaaaattgaccaatcagcgttctgtaaaatggaccaatcagtggtctgtaaaatggaccagtcagcaggatgtgggcggggccaaaaaagggaataaaagctggccaccgccaggctccccaccagcctgcagcgacaacctgcttagtttcctttctgtgctgtggaagctttgttctttcagtcttcacaataaatcttgctgctgctc

SEQ ID NO: 481 - DNA, 4597 bp, Homo sapiens
actttgccagagcggccgggtccccattcccattccttcaaatcccctttttcccggcagccgacctgtagacccaagggagacaggttgaagctagaaagagtcggggcagcagctctggtaggggagggagcatccaaaacctctggcttctgagcgcctctcctgccgcccatccacaaagccccccacagcctggcggctgccctcgaccccgcaaaacaaaggacttcagaggctggacctacagacccagatgagaaggcaaaagcgtagggaggagcggcaggagatgggaggggcgggccccgctcggagcagctgccgcttcctcccaaagtcccacgaggggcctgagtcacgggccaccgccctgggtcggcgagctgggggaagggatctggacacctggcgtgtccgggcgggaagctggtgagggcccctggggacagagcggaggaccagtggttggggcgagaagagggcagtcccgcagcgagtcccacgcggggtgggagggatctaggccccgccttctcctcggctccgccctgcgcccccttccctctcctcattgtccttagacaaagcggtcgccgcccccgcccggccccctggtctctgtctccgtccctcctcctttgctgcctctttccctcctcctctccctccctcctcccctccctccagtctccggatctccctcggtccctctctcctcctcttcctctctctggacgcccggctcctccgcaccccctcccccgggggtcccgcggcctgtgagttgactgaggggctcagacttggggagtgggtgtctcctcgcccctgtccttgctcccgtccctggcccggaccttggctgtctcctctttgtgccgagattgtcagtctgtgcggctacagcggggtggagacggccggctctgtcacggcttcatgagagcggggacggggcgcaggacttgcaggcgccggggagaagagacatggagccggcccttggcactctggggtcgcgtggggcagtcggtgggggaggcaggcggtggtgacaggacagggtgggggtggacgccagggttctgggaacgcgctggcagccctgacgcccgggttccgaaagtctcgggggtgggtacttcccccgacccgcctcgggggcggagtgcggggcagaggggtgggggctggggagaggcgtggcccgagcggtgctggaagcggagccgggacctttggggcccgcgctgagacgcgcccggctgctgccgccgccctcctttcccctcttccctggtttcccttctcctctagacctgttcgctctccgcccctccttgcctccccaacaccccctcaggtcccgttgcctcctggtcctttcagggattcctggtccttccttcccacactagcctccctggggtatcgctgaggcagcctggcctgcacccaggttcccctcacccctgccacatttctctcttctccctcacgccaactttccttttcgcccttctctctctttctcacatcctagagacggtctttaatacgcattaaccctgtgctgccacatctggctcctgccctcattgcctccaatccggactcttcctctcacatcacccccaccacccccaacttgggctcacaacttctcttcactttttccatttccccagttctctgccttccgtctttccctctgtcctcatccttagcccctctgccctgctttgtgtcccacctctccccctccacttcctctcctcccaccctcagtctcacccccgggctgtctcactctctggagcctctccttcctgttctctgtccccagtgctccctaccctcacctcaagacgaccatggccaccatcccagactggaagctacagctgctagcccggcgccggcaggaggaggcgtccgttcgaggccgagagaaagcagaacgggagcgcctgtcccagatgccagcctggaaacgagggctcctggagcgccgccgggccaagcttgggctgtcccctggggagcctagccctgtgctagggactgtagaggctggacctccagacccggatgagtctgcggtccttctggaggccatcgggccagtgcaccagaaccgattcatccggcaggagcggcagcagcagcagcagcaacaacaacggagtgaagagctgctagcagagagaaagcctgggcctctggaggcccgggagcggagacccagccctggggagatgcgggatcagagccccaagggaagagagtcaagagaagagagactaagtccgagggagaccagagagaggaggctggggatagggggagcccaagagttgagcctgaggcctctggaggctcgggactggaggcaaagcccaggagaggtgggagacaggagctcccgactgtcagaggcatggaaatggaggctgagtcctggagaaactccagagcggagtctgagactagcagagtctcgagagcaaagccccaggagaaaagaggtggaaagtagactgagcccaggggaatctgcctaccagaagttgggcctgacagaggcccataaatggagacctgactccagagagtctcaggaacagagtttggtacaactggaggcaacagagtggaggctgaggtcaggagaagaaagacaagactactcggaagaatgtgggagaaaagaagagtggccagttccaggggtagctccaaaagagactgcagagctgtccgagaccctgacaagggaggcccaaggcaacagttccgcaggagtggaggcagcagagcagaggcctgtggaagatggcgagaggggcatgaagccaacagaagggtggaaatggaccctgaactccgggaaggctcgagaatggacacccagggacatagaggctcaaactcagaaaccagaacctccagagtcagcagagaagcttctggaatctcccggtgtggaggctggagaaggggaggctgagaaggaggaggcgggggctcagggcaggcctctgagagccctgcagaactgctgctctgtgccctcccccctcccaccagaggacgctgggactggaggcctgagacagcaggaagaggaagcagtggagctccagcccccaccaccagcccctctgtctcccccacccccagccccaactgccccccaacctcctggggatcccctcatgagccgcctgttctatggggtgaaggcagggccaggggtgggggccccccgccgcagtggacacaccttcaccgtcaacccccggcggtctgtgccccctgcgaccccagccaccccaacctctccagccacagttgatgctgcagtcccgggggctgggaagaagcggtacccaactgccgaggagatcttggttctggggggctacctccgtctcagccgcagctgccttgccaaggggtcccccgaaagacaccacaaacagcttaagatctccttcagcgagacagccctggagaccacgtaccaatacccctccgagagttcggtactggaggagctgggcccggagcctgaggtccccagtgcccccaaccctccagcagcccaacccgacgacgaagaggatgaggaagagctgctgctgctgcagccagagctccagggcgggctgcgcaccaaggccctgattgtggatgagtcctgccggcggtgaccatcttccaacatagggatatacctccctccttcttataactgaagatcctggagcccggaagattcagggcagacagaccctgataatgagcctggcagggaagggcaaccaacatcttgtaacttgctttccccaccctgtttctgggggcagagccaattgcccaatttctaccctaatccaaagtccctggtgtgggtggggttaaacgtgctggtgcatcctaggtcatccaagagtgagcgccaagtcctgagaaggggcacagaactccctggagggtggagatggagcacctgccccccatggcagggtacactctccccacagccttcctccccaccatcccgtggggactctcgggatttaagcactcgtctctctgggaggcccagaccccactccatttataggcacatctccttcatttcctaggtcactgcccctttgtttacagctcctgcctcctcccttgaccacagcctggtttacaaattccatcagctcccagccccacctgccaaagtcccaggtttacaagccacgcttacttgctgtgtctgcgtggaattctctcctctgtcccctccagtctcctcattggagtgacctgaaggtgtggcttcctccactttttctcagtattactttgccttagttttccccaagagggaaggctggaactcttaactctgtaccccttgatagttatttaattctgtttctcctagtggttcacaattgaactgaattgagatggtgtcgggtggctaaggagacacctcacctctccttccccattgtgccgcctttatcaattgcctgttttgttttgtttgttttttaactttccataataaaatggagttctcttc

SEQ ID NO: 482 - DNA, 4299 bp, Homo sapiens
atatgataccctcttctctatgcatggcaggcatgactagtcaatcaggagcctctttcctagatgctgcctcttgtcctccagataaattgatgaggctcttctgttccacttaccctttctcctatccttggcctgtgacaggcaacactaattgatcctagcaccgtttcctgccacgcccagaattctcaccacagtgcttcaggtatcttgtaccagtcgattgacatggctcccgagatgaatcatatttgctgtccatccctgctgtgggtaacacctccttcctttgtgcagaaccctcagctggggcccagtgtggggcgtgagatgggcgtgaggcccagtccagcccagcccagcgggaagcagcctgctactcatagctgagaactgaacccagctcaaggagctcacctctaggcagccggcctcagcccggctcttacacttggacagcacagcctgggcctccagtcctagcaggggctcccttttgctggacattctcccactgccagccaccaaggcgctggtcatccctgccactgccctctggcggggctcttctggcaatcccagggtctttcttgtagctgagccgatcctgtgccagggcctcgctgctcccagggcctgggtgtgcagatagggccatgggtggggcagtgacgggaggaattagttggcctcgggcttgtggttttcaggttcctcatgtgttccccccagtccctttgaatttgccaggccaagaccaggaacctgcttctcccttgtaccccaagaggtttaggggttcctcttttcctaccagaggccacatagcccagccccgtcatgagcgtggccgtggcctctgggtctcccatctgtggttcccatctctacccgggagactcaggccaggaccctcacccaggaaagagactggagcagcctgccagaggatccctgctttgccgccccctgcctgccctgccacccataccgccccatgtgcctgcctgcctgtcactgtgcaccctagcccgcaacggcctgccgcctcttctgtctctcccacccctacttccttctaagcccagtcccattgggatgtgtcccttggatgcaaacctgactttctgctgaggcctggctgctccctttctctggctcacaagtggtggatggctaacgggcctttgtttgccacccacagcttgcagctccctagggtgggattttgtctctgaacccgtgtggagaagggcacctcagggcttctgccagacgtcctgccccaaggcttggtgtgccatccccagcatggccccgatcagtgccctggccctgtggccatgcaccccaaagtgtagcgtgggccctgtgctccagctctgaccaacactaaccccggctggaggcaggagagccaggccaccgaggggtgtgcgggcacatccctctccttagaaaccgggccaggcctaggagtatggaggcctcacatttctctgggggagcaccgacagcctgtctccctgttttccctcacctggttgtcattcagtcatggaaccagggtctactaagcactcgttctgtgcccagctctgggctgagacaaggcagtgcccccaccccgctccccccgggtgaatggaggcattcccagactgccagacctttggtgctaacaccaggacgtcctggacagaccaggaagagctcgtcactgcgttcccagaggggatgctgtgacctcacaggggctgctggcctcagccccctcacccaccaccaggcagcccgtgaatggccagatgccaggggtcactgcctgctccaaacaactgtgagagtcctgtctgctcatcccagggagggataagtctgtacccttggccttaacaaggggcgcccggtggcatctcatgctgtccccagcctgggcagtgacttctgcatggtccaggggtccctgggtactctttagccacctccgtcttcatggccacctggggcttagcactcacatccagccaccaaggagccgctggagctgtgggctggtggccctggttcagaatgtcaggcccggggtgggtcggggtagtccggatgaagcccctccagaggaccgcccccgactaggacagcatctgggccccagagggattcctggaggccccatctctggcgctcctgccgtgccgtgccctgccatgccctgcactgggggatgcaggccagcccttcgcagctgtccatggccatgctcagcccaccctttgtagcttggccaagtctgtcagtgcctgggtcccaggccgccctgtgcgtgcctccgtgtgcttcctgcagctcccagggccctcgtcctgagtggggtggggggctctgcccacacatgcctccagcggccagggagcatgggagcacagcccccaggctgcctgccgttagttgtcaggtgagtccctgcgcaggcctgggttctgacccccacgcagatgacagctacagccacacaatccccatccatggggtctcccagcctgaaaccctgatgtgtcagtcaaaaggatgaccaccaggcttgcagccagcttgggacatgagccgcgctccttcaatgtccttggggagggcccctgggctcacacctttgaccctagccctctgtgtggatgctacccttggaaccttatctcacgcaaacaagtgcagttcctcagatgtcacatttcatgtgccacagccccacacacaagccccagggactcctcccatgggcccctttccatcaggcctctgtgagtctataccccatcagcccctggcccagtgagtctgtctgtccgcccacctgcccaggtggcgcctcatgttggtttcctgctggaaatgcttgggacagggtggaactgggtttcctgggctttggggctggaggtgtctctattgcggtccctggcttcccactgagctgtgggcaaggctgctgcgctgggggatggctggggcacggagcgaggttccctgctaagctgcgcgctttcccccaggtgatccgcaggggctggctgaccatcaacaacatcagcctgatgaaaggcggctccaaggagtactggtttgtgctgactgccgagtcactgtcctggtacaaggatgaggaggagaaagagaagaagtacatgctgcctctggacaacctcaagatccgtgatgtggagaagggcttcatgtccaacaagcacgtcttcgccatcttcaacacggagcagagaaacgtctacaaggacctgcggcagatcgagctggcctgtgactcccaggaagacgtggacagctggaaggcctcgttcctccgagctggcgtctaccccgagaaggaccaggtgaggagccgtcctgcgcagccaggcccagagcccccacctgggagaggaagcagggctggctttccccaggacaggtcattttcaggccatgttagccaggagtctctgaaatcatgtagcagatgcccacttgagcaagcaaaggagaaattgggggtactttgtcatcagggcccagaaagttccctcacggaagccagtgaccggggcacacaggggatggggtcccacttgctttgttctcttctcttttccccttccatcctgaggtagagtgaacatggccacccttggccccaatattaaaatgccttgccgggcacggtgggtggttcgcccctgtaatcccagcactttgggaggctgaggtgggcagatcatttgagctcaggggttcgaaaccagcctggccaacatggtgaaaccccgtctctactaaaactacaaaaattagccaggcatggtggtacgtgcctgtaatcccagttactcaggaggcttaggcaggagatcgcttaaacccgggaggtagaggttgcagtgagctgagatcacgccattgcactccagcctgggcgacagagcaagactccatctcaaaaataaaataaaatgtcccaaggttgggtgtggtggcttacacctgcaatcccaacactttgggaggcaatgtgggcagatcctttgggcccaggagttcgaaaacagcctgggcaatgttgcaaaacccttctctccaaaaaatacaaacatacccaggcatggtggcgcacccctgtaatcccatctactccagggcgctgaggtgggaggatcacttgagctctccctgggaggttgaggctgcggtgaactgtgtttgtgccactgcactgcagcctgggtgacatagcaagactgtgtc

SEQ ID NO: 483 - DNA, 3760 bp, Homo sapiens
ataggggacaagccaaggcacccatcaatgccctctgttcatctgttcctgcaagtgtgtggctgggaagtgcccaggaaggctgacagggcagggaagttgatttgaggccaagcatccagtgctcctgctccacctccgtagcacgttagccgtgatgccagtgacttaacccacagcttggggaagctcaaaggctccacattcgagcctcttgggggaaattcggcaaacacccatgtccaagttccacactgtatttcctgggatcgttccagcagatcgtggattgcagcgagggctgctgactgcatgcggaactgtgagatggaagggactgtgggcggcagctccagggaggagcatcgaaccagatattgtctctgggaggctgggcctggtgatgtggcaacgtcttgctccctgagaggtgatgggtatgctagggacgctcgctcagggaacgtgggccaagtcctctgaacacgaagctcgcagagggggtgattcctgtgaattctgaaaggacttgggggcgtccagcaagagcaggagcttagatggtggttccagggctggtgttgctgactgggacgagtggacccccagggtgggcatggagtggggcactggctgggagcctctgccttgctgtgtcctggctgaatgaacccaggtgaggaccagaaacgctgttatcactgtttctgcggcacccgatacactcacctatgccaaggaaattttttttttttttggtttctacaggacttgctgtgctcagatcctccattcaagagagctacagacacgggggtgctggtgagcaggagccgagaccatctggggtgggaccgaccaagagtttgaggtgtccagggggtgacgtgaagatgacctatcgcagagggtcccttctcattcacgctctgaagtctgcacaggggcaggggctaccgtgctccatttcagtttggcctctgttgtatcagccagaggccagcagaactctatggtcactcccccgtgtcacggacaatttgccacctccaccggcagcccagggctctgcctgaatattctcgcctgatcgtaggattgtggggagggatattctcattgatctctaaggaaaatattgttcgctttttaaaaacatgatctggtaccatttcattgatctctttaaggaagaaaaatcacatggttgtcatgagcatgtaccgacagagctaggagggccagctgttccgggttgcccagggctgtcttgtttttaaaatggaaagttcgatgtcctggaaaacccctcagtcctgggcaaaccaggtcacgctggatagaaggagttagacattcatatgatgtgccgatgtcttgccagttgtagagttttgtgtaaacctgtgtgtggcctgcgtgtccacatgggtgtgtaggatggcacctacacacatacctgaggtcacctcttggtccagtgagccagaatcctgggacttcatcatcttttttttttttttttgagatggaatctcactctgtcacccaggctggagggcagtggcgcaatcttggctcactgcaacctccgcctctggggctcaagcaattctcctgcctcagcctcccgagtagctgggattataggcgtgtgccaccacgccctgctgatttttgtattttttagtagagatggtgtttcactatattggccaggctggtcttgaactcctgacctcaagtgatctgcctgccttggcctcccgaaatgctggggttacaggcatgagctaccatgcccggcctcagaatcctgggacttctgctggagccaggggtcagaacagactcctctactgggactgcctggcagggaggacagacgctcaaggcggccccatgagaacacagccacctggaaaaatggtggaagggaagattctgccaacctcctccgactccctatctcagttacactggtccataatttcttttctttttcttaagtctgtttcattggtttctgttcctggaaaatggacacaattctgatgaattcatgtattctgcatccacgtgtcagcatctccagccttgtgacgcagtgcctggctcagaacaggcaatcaggccatggcatctgaatgaatgagagggtgtgccctggccgtatctcaggcagcagatgcattcagctgcaggtaacagacacgtagacaaacagtggcttaaaaaagagaggctttaaaagtattttgtttttctttcttcacgtagcaagaagtctggcatttggcattcccaggctgtggcgtgacagctttgtgaagttatcagggtctcagaccctgacatatttctgctctgctaccctcagcatgtagatttgatcttcacggctacaagaaacctgctgctactgcaggcatcttacacgagttccaggcaggaagagaaaggaaagggtgacagagacagaaagcaatgtccccagatacccttagttttccatctcataagccagaatgatgtcacgtggcatccctggatgcacaggaggctgagagatagtggcgtttgttagctggtctcctagccatcctgaatgccaagtttgttataaagaaacagaggcaaaatggcgatcaggcaggcaactgggtggtctctgccacgggccccttggccattctttgtaatgatggtctttgtcttggaccctattttggatatttgggcacctttgtggtacccttatgtgctggttttgctgttgtctgcccttcaggaatagcagctgagtcaagctgtccttggctgctccaatctggagtcagaggttggagatttccatggctccccatggctccttggggcctcctaagaaaatgttttaataaggaagtccaaggctgagacagacatgctccttcttagagacacatgggaacatgcctctgctcacagctggtagccacagatgtaaaccgtagcccatggaacggagacagtgaagaattgatggataaatgaataatgatgatggacagcagatgtataaaaggcataaaaggatagtgttagggctggaatgtcttccccccaattcatatgttgaacctttaatgcctaatacttcagaaagagactgtgtttgaagatatggtctttacagagggaataaagttaaaataaggtcattagggtgagccctaatccaaaggatgggtgtcctaatcagaggaggagattaggacccagacacacacacacacacagagccaggtgaggacacagggagaaaatggccacgtacaagccaagatgagaggactcaggaagaaccagccgactccacccttcaaaactgtgagaacatagatgtctgctgtttgagccaccctgtctgcaagcagtcagcaagcattcattgagtgcttgcagtattcaaggcaccacagatacaatgttgaataaggcaaagcacctgccctcaggtagcttgcagtcagggaggtaagggtagtgggcagagagacctggaaacagatattagacctgcactaagcatgtgtggttattgaacagtaaaaatgccaccacaaattgcgatatgatgtaagtaaaatgcgtactggctattgaagacttggcacagaaaaataatgtaaaatctcattagtaatggttttatattgattacgcattgaaataatactattttggacagattgggttaaataaaatattaaatttg

SEQ ID NO: 484 - DNA, 3885 bp, Homo sapiens
catccaggaggctggcaggagagagtcagtggcaccaggctgaccagggaaactgagtcctgttttcctgtgcttctgccccgtccctagtccaggaccccgtgactagcctagcttggcctcccctcctcccagcgggagctcatttctcataggccatccctgagagcctctcagcccttcatcgtcggtcttccggtgtctcccgctgtagaaggaggatatggaggcggtccctggctacctctccctgcaccagtctgcagagagcctgactctgaagtggacccccaaccagctcatgaatgggactctgggggactccgagctggaaaagaggtgggggctttgggactcaatcccaggagccagggcagggagtgggtttgacctcaggcagagggatggagaaaccccgcttgctccaggaggccaacctcactctttatttggacgccaagaatagcagggagcggctgcctggagtgattcccaagctctctaggacggagccaagcctggccgtgaagaggtttgtctgagccaagctctcagcggctgagacggacagctgtccatgtgccgagcgggcagcacagatctcaggggtcatggctggctgtgtgcacctcttggctatggtcatcctatcttcaggggagtttcgtggggtggtaggaccaggagacaaggaaggaaggaaggatggcaggtctttggacacagtgacagcagtctggttcctttctagcgtttactgggactatgccctcgtggtgcccttcagccaggtcgtgtgcatccactgccaccagcaaagtaagcctgccttgtcctcggctcgggtgggaagggagaggctgccttctgccagctgtgcactgtgcgtggggcctgtaagactcctcgtcctcctcccatccttgttaatggggctcccaggccatgctgtagcccagccatctgcctcctacccagcctgggggcactggccagcagggtgtgatagccgacgagagggcctcagccgcactctccacgttcacccccagagagcggtggcacgcttgtgctggtgagccaggatggcatccagaggccgccgctgcatttcccacagggaggacacctgctgtcctttctgtcctgtctggagaatgggctgctgcctcggggacagctagagcccccgctgtggacccagcaagggaaggggaaagtgttccccaagctacggaaacgaagcagcattcgctccgtggatatggaggagatgggcacggggcgggccaccgactatgtgttccggatcatctaccccggccacaggcacgagcacaacgctggtgacatgatcgagatgcagggctttgggcccagcctgccagcctggcacctggagcccctgtgcagtcagggctcctcctgcctctcctgctcctccagcagctccccacatgcaacccccagccactgtagctgcatccccgaccggttgccgctcaggctactgtgtgagagtatgaagaggcagatcgtgtcccgggccttctacggctgtgagtgtggggcgcgccgggctgtggcgggctgggggcgggcggccctgggtcccagcctcctgctgcccaccgctgcccaccgcagggctggcacactgccgccacctgtccacggtgcggacccacctgtcggcgctggtgcaccatagcgttatcccacctgaccggcccccgggggcctccgcgggcctcaccaaggacgtgtggagcaagtatcagaaggacaaaaaggtgccaaccctggggttccagggccacaggtcgaggggctggggcgggcaggagtgagggcttcagggtaaaatgtgccagtgggtgcggttgacaggccagggccgatgccacggagtgaccagggtcccggcagaatctcttgcagctgggcctggggctgacacgggaagggggctggactgggaagccgtcctgcctccacatcgccctgtgaccctggacaaagctttgcctctctccgggcgccatttcctgccccttaaggaaggagagcagaacgagatctcatcccactgtgagctggggcacgggaggacgtggccaccccaaagcaggccttgcctgggcttcagcagtcactacaggccccgccccagcccattctccgtgggatggggctcacccagctgggccacggtgactgtggaggctgcacagtcttgactccccgggtccctcagaactacaaagagctggagctgctgcggcaagtttactacggaggcatagagcacgagatccgcaaggacgtctggccctttctgcttggccactacaagttcggcatgagcaagaaggagatggagcaggtgaggggagcctgttcccatggggctgatgagatggggagctgggccaggggacgtcagggaggggaccttggaagcctcagccccttcccagccggaaagaagcatggcagggcagctccaccgtccttaccctgaggcccgtcttgagtctgagactcaggacccaaggtccagtgcaggcccagctcctgaaggggagggcctggtgcacgcttcccccatggtcgtggtgtggtctgagtacaggtggacgcagtggtggcagcaaggtaccagcaggtgttggcagagtggaaggcctgcgaggtggtggtgaggcagcgggagcgggaggcccacccagccacacgcaccaagttctcctcaggcagcagcatcgacagccacgtgcagcgcctcatccaccgagactccaccatcagcaacgatgtgagccagacgggacctggagggttgggggtctcgggggccacccgcgttttatgcacagtggtcctgagcaccagcctgacctctgggaactggtggggccctgcgagaaaggcctaaggtgcctgtgtctcattttctccaactggaaatggctaactgtgcctctgctgcctacttctctgggtattgtaggaataaagtgagagagtgcattgtgctcagttttagccaactatagggaaagatggacttactgggatttagggaagccctcctccttgtagaaagacctcaaagctagcaacaggcagcgctgggttctagtcccagatccactactgacaagctgaatgtctctgggcaagcacttcccgtctctgggtctcagtttcccctctccacccatatcctctgactgcagaggcttcctgagatctgtgggcctgagaataggggagcccgtagagcagccccattggtgtcgactggcgagatccttcctccccgcgatgttgcctgtcactgtacagaactgactatggcaggcttgttcggagcacgggagggtagctctttctggcatcactcctgccttttgaacagcaagttctaaactgtgactgcctggcccaaccaacactgataagtttcaattttaaggacgctttattaatttttctttaaaattgcctctttagataatgtgtattcttgttactttactaaatccttaccaacattaacagaaaatgtaagttgaagtaagttaaatataactggctgggtgtgatggctcatgcctgtaattccaacactttgggaggcagaggtgggaggattgcttcagttcaagagtttgagaccagcctgggtaacatggcgaaaccctgtctttacaaaaaatgcaaacctttgccgcatgtgttggggtgcgcctgtagtcccagcttctcgggaggctgaggtggggggaccacctgagccatggaggttgaggctgcagtgagccgtgataccaccactgtactctagcctgggccatagagtgagacaccctgcctcag

SEQ ID NO: 485 - DNA, 3968 bp, Homo sapiens
ctttctgtctgggcttctgtcacccagcttgtactcagccttttcagaaggaagagaacgggcatttgtggagcgttttctgggtgccagatcccgatggaagaagtggacaacacagtgacactcatcatcctggctgtcgtgggcggggtcatcgggctcctcatcctcatcctgctgatcaagaaactcatcatcttcatcctgaagaagactcgggagaagaagaaggagtgtctcgtgagctcctcggggaatgacaacacggagaacggcttgcctggctccaaggcagaggagaaaccaccttcaaaagtgtgagccctgcttcgggctgagcagctgcagggagccccctttctgatgatgaaactgatgcttgagccccgaccgtagaacccacgtgcctgagacatctgctgcttggctcaaactgtagtctttccgggcacaagaaaccagagtcctgcccagcctgcccatccccttcccagtcagggctccccagggacaagggatggccaggggagggggtctgtggaagattcaggagaaagaaaggagaggctagggtggtgtggaggggctggtcccctgacacctgggcagatggggtctccttcagtctccctaccctgcacaagcagggccttgattttcctccaggcttctcttcacaagagactgggaggatccgtaagggatgtcctaagagctgcaccctggagatggggtgtaggaagaagtggcttcctttggaggtgggagtgggctggaggcctctggagaagacctggggtgggggctgatgggggcaggcccacagtgagagactgcctctgcttcataggataccagatcccccacagtcttccaagtaggaaacttcctttcccctgccccgggaccctatctgcctatcccctcccctgctcagagtttttaagccctctcaaccagggctggccaccctggtcttgagggttcctggccacctagcctgctcctctgctctctgggttactgaggggctcaggaaggggcccctcgagccttcctggagtacccgagtgctccctatgcctttccaagcatttctacttggagaattgggccacagaggtagtgagccagtgtcctgggcctctgggatgcccgccccattgctgccaatgctggcagcccctcccctggcatggcaggaccatcgccactctgggcactcctgagcccagctctcccctgcttctccccctcctacctgagaggctgcaccctccaacctcccattggctcgctccccccccccaccgtgccctccatcacgccctgcccccagggtggttcatttcccagccctgggtcaagggcctgccttcgcctcagggactctcttcctttggatgagggggtccttgggtttcccagctgcttcctgctcagctgggccaccccctcccaccctggggttggggaggagcagggagtgggtgcccacagttttcctttgcttctcccagagctggtttgcacagcccttgtgtgtggggctagaatgtgccttagtcctgaatcctagcccttacccccatcctctctagacggtatgtcctgacataacagcagagtctggtgtggtgctggtgagggttcaccagccctcccctccccagggtcatagagggggccatgaggctggaattggccagtgactgaatcttggagatgtcggccaggtgctcccattggggtttctagcctgccctagggggaggtggtgatgttgggagtgggatctcctgagtccttgttgggcagaattggtgaggccagggatggcagggaaaagtggtaacaagcctctctgcccatctacttccaatccctctctcccttactgattttttgatgccctgtcttctgggcccctaggagggatgagagaggagtagccccctttttcagagagtttggggtctacctcagagctctccctgtcaaaaagcagctgcaagcctcgcaagggtggagtggggggagactgaggaccagtagtacctgcagggtgcccgtggctgtggccagtgtcccttagccaacctgctgggctcaccagttccccgtctgatctgcctgtgcgcctcccattcttctctacccagaacctgtcatgggctggggctcagattttcctggctttgggagcagacagaccagagccaccagccattcagaaagcttcttatagctaccttcatgcaaaactgttttcttcttccttctcaatggtgacatttgaagaggcagagcaccttggggctcctccttctgtcttaagagaaagccaaggcacgtagagtagggagaagaagggcaccatcctctctttcctccccagggtctactgctgatttctagatggatcatgcagcttctctccgctcagctctttccatctaccaaatgggtgtaataatacttacctacctcacaggactgttgtgaggcttggcaagttttgtctaaaaacatctttttggcttggaaagggatctgggaagccaggtattaattgcagggatagttccaagtctgtcctgtcttcatctctgtgtcccatctctacaacccacatacagacacacacactctctctctctttctttccatcccaccccccttggaattatttagtctttgcaatattagaaaccttgactctgatgcttaaagcttcttgtccatggcttttgtttgatggttttcaatagaggtgactgagattgtagggggggcatttttggttgcccccatgcgtgggggcactactaagaatgctaaacttagtccccacaacaaagaatcatcctgtcccatgtcaacattatacccatggagaaacactggcatggatttgcactaggatgtatatgggcaaagctgtcttccccaagtggaacctcagtgcatgcaaatctctgatggtggcttccagggcttgtgggctagagagagccacttacaaagtcgatcttgagagacctggccacatgcagctgggctgagtgatgtcagcgagactaaagacaaagttctgagctcctcatcaactacaaaatatgaaatcagcattccaggttctgggcttctccccatgtcgtaattgaacagaaggcagcccgaataaacccctgatgtcagagaggcctggggagagcagccgatggggctcagactacatatggcaggccgatcagagctcttgtggagcgagggcttgagagcatgcttgtgagatggcaggaggtggggtgtgcttgtgtggagtgtgcgtgtgcaggcagtgtgggtgcatggcagcgtaactgtggagcggatgggctctgcatgtaaggggtgatgcatgatgggcagatgctggacatttgaggagccgtctttcttggcctgagctatgcctgttgaggcatctggagactgagaaagaatcaaaggcagagaagaccagccgtgctcctgcattccgtcactccatgacttcatctcagtgtcacagacagctgccatcagagggctggcagtagggagttccaggagcggggacttctcgggaaaatcctataacttgctttactttactttgtcccaggttggagtccctaccctcccacctcccacctgatatgcagtgcttttgactatcttatgcatggtttattcctctggcttggatgacaacaatacccatagtcaattttcctatgtaactatagatcaaatgatgcaacaacaggccttgggaggcctcaggtgtgcgagtgcctctgggaggcgcagatgcccacacagccagcactgacttgtgttcgagcacagaacggatataatcagtctggcctctacaacaagttttgcattgtagaattgtatttagctttgccttggatgaaataaaaattatgtttaat

SEQ ID NO: 486 - DNA, 3413 bp, Homo sapiens
ttgccccatccctcccctgccgattccctttccccctgaggaagccctctgggagtgatcctgagggcctctgatgcacggagcccttttccgcctgcatggacaggctgggcaccggcagagacgcccacctgccctgacctgcctctgtggcctcacccgagaaggtgctgacagagtcctttctgcggaggtcaaagcacttcatgaagccatcctgggagccactgagcagcacgtgggcttcggtggggtggaagcagactttgtttaccgtgcgcttgtgttctgtgaacagctggtcctgcttgttgcgggatggccggcccaggttccacgtgaccaccacgccattggtggctgctgtggccagcaggttctcatccatctggtgccagaccacgtcagcacagctcaggttaagcgaaggcttgcgccccacacgcaggttcagcttttccacgaactgttcctcctcgatggcatagatcttgaagatgctacggcctgccacgaccacctgggctgcgtcgcggcacacactgatggcattggcgggagcatccaggtggcagtgcatggtgcggcctgtcagcacgctgccacccagggctgtggtcacacgggacatcttctccatggctgcacaggtgatgaggtcaggggtcaggaggtcagtgaggtgggctggcctggtcagcctgggtgggtcatcagttcagaccttccacccaggttgggaccccagaactgcttggtcccgggctggtcagtcttagtgagccaatccagggctgtctatcagccaatcagcctgacaggcaagctcaaattcactggagtctgtcagtccagcccatcaccctggctgagcggtgaggggacttcctagcttcccttaggcctgtcagtttcatgtctgacttccacggaagactctagctggacattcccggcccaggccacctctcggtacccccatcagccagatctgggcagtcactaaacgctcggtcagtcaatcccagcaggggagcgaggagactcccgccgtcctcactgtcagccctgagggcggcggggctctagggaggaacaaaagaggggagggaacagagggctagaggggcccggggactcaggcgatagacgcgggaagggcccagagggacgtcaaggaccgagctacttaaggagctcgaggtgtctggcgggaccggaggcaggagagaagccggcgaccccggagtacagggttcctgggagcggcgcagtggcgcgggggagcggacgctgcgggacgagaaccagagggcccggggcagcccttctcccccgcgcgaaccccaatcttttactaaaagcgcacggttgtccggaaccgccgcgccggaagccgctgtctttcccgtccctcgccggaagtggtcctcttcttacccatccctctcaggaagtgggcacaaactctcgcccgacaccacgaaagttccgggtcagggagctgcgttggcagaggccaggaggggcccgggattggggtctgcgggccgccctgggcgttgccattgcgctgcggtgctgtgcttgtgtgattggtttatttatttatttatttaaacggagtctcgctctgtcgcccaggctggagtacagtggcgcgaccttggctcattgcaacctccacctcccaggttcaagcgattctcccgcctcagcctcccaagtagctggcactgcaggcgcccgccaccacgcccggctaatttggctaattttgtatttttggtagacacggggtttcaccgtgttggccaggctggtcttaaaactactgaactcaagcgatcctctggcgtcggcctcctgaagtgctgggaatgcaggtgtgagccaccgcgcctggcctgttttttaagtctcaatttcagtattttaatgccatcacctattttaatccccaggtccatcatgacatctggtcatccctagacaagttccgagtgcccccagtcttcccctccttcctcactcctcgacctcgggagcagcctcccaacggctttcctgggtccgtctttcccctttgatcagaaacccgcacagaagtcaggcaccaggtcttctgcctgaggcctctggcagctcccactatgctgtgaatgaaccccaactcctggcctccgccttcccctgcccacctccagccatggcagcctccacccccattcccagcccaccaagccctttcctgcctcagggacattgtacgtgcgtgcgatgcctcctccacagagcggacctccctgaccactgccctaatgggcttctccatcgctgtggcctccacggcacttgtcaccacccattcgtttgtttactggttgttgtcggtcacatacgagtgtgaattccaccaaggcaggaatcacattctggctcaatccccaccgaatgcccagtgcctgacacacctgttcaaccagttgctctcgttcttttttttaaaaaactttttgagacggagtttcgctcttgttgcccaggctggagtgcagtggtgcaatcttggctcaccgcaacctccgcctcctgggttcaggcgattctcctgcctcagcttcccgagtagctgggattacaggcatgggccaccatactgggctaattttgtatttttagtagagatggagtttttccatgttggtcaggctggtctcgaactcccaacctcaggtgatccactcgccttggcctcccaaagtgctaggattacaggtgtgagccaccgcacccggtctctttaaaattttttgagacggagttttgctctttcgcccaggttggagtgaggtggcgcagtctcggctcatagcaacctccaccccctaggttcaagcgattcagcctcagcctccctagtagctgggattataggcaaccaccaccacaccctgttaattttttgtatttttagtagagacagggtttcaccatgttggccaggctggtcttgaacgcctgacctcaggtgatccacccgcttcggcctaagtgctaggattacaggcgtgagccactgtgcccagcctcagttgcctttttcgacctctctgtctctcctgggtgtgagccattgtctgctattggtgcattttgtaatcttttgcgacatccttgtccttgcctgttactgtgtatagaacagggtttatttctgcctctctggaagggtgggctagagtctggatatgttggagggaatattatgtgtagtgacttcagtgttgtctctccctttaaggaatgggaggtcctctgccttccatgtagtcactgctgtttccattctaccatgtcggcatccagcctctacccctttgttgcaagaaagaataaatctgataagaggt

SEQ ID NO: 487 - DNA, 3992 bp, Homo sapiens
cactccaggccggcagtgtttctgctggtgtcagattctcaagagccttgttggtctcttttgcaagttatagaggcccaagctataaaatcagagagttttcccacagacgcttcctagataaccccatcttcattgtagatttctgctgaaagggttgagtggacccacgagtcacatacctcagctctggggcaaacgcttgaacagccttgctgttctgtccaggggacacttttgcagtttttgtaatatgattaggccaagaattttccacatcttcgctttctggctcctttgtgctcaacagtttcttccttatgtctctcacattttactataagcagcaaggagaagtcaggctacgctctcaacactgcttggaaatctcctcagctgaatatccaagttcagcacccagcacttacacattctcctttcgacaaaacactagaacacaattcaaccaagttttttttttttttgagacggagtcttgctctgtcacccaggctggagtgcagtggagccatcttggctcactgcaacctccgcctcccgggttcaagcgattctcccacctcagcctcctgattagctgggattacaggcacctgccaccatacccaactaattttcatatttagtagagatggggtttcaccgtgttggtcaggctggtctcgaattcctgacctcaagtgatcctcccgccttggccccgcaaagtgctgggattataggcgtgagccaccacacctgggccaagttcctttataacaaggatcagctttcctccagcgcccaataactcaataacatgtccctcattttcctctgaggcttaaccaaaagcaccttttttttttttttttttttggtagagacagaggtcttactctgttgctcaggctggagttcagtggtatcatccccgtgcactgtaagctcaaactcctgggctcaagcgatcctctcacctcagtctcccaagtagctgcgactacaggcatgtgccaccacacccagctaatgttttattttttattatttattttttgaatgtattgagacagggtcttgctctctcacccaggctggagggcagtggcgcaatcatagctcaagtgattctcctgcctcagcctcctgagtagctgggattacaggcatgtaccaccacacccagcttattttgtattttttgtagagacggggtctcactatgttgcccaggctggtcttgatcacctggcctcaagtgatgctcctgccttggcctcccaaggtgctgggatcacatgcgtgaatcaccacacccaacccaaaagcacctttaacattcatgtttctagcaacgttctgttcttgatgatatttgtattctctaagaccacagaggctgtctctattgctctcccctcctctcaccagaattacctttaacatccatactcctaccaacagtctcttaaaggcaatccagaccttttctaacatgtacctcaaacttctatagccttgatatggtttaaatgtcatctctaaaactcatgttgaaatttgtcaatgtattggtattgagaggagggcctttttgaggtagttacgtcatgagggctctgccctcatgaatggatgaatgccattattatgggtgagttagttaccttgaagttcagcccccttttttcctgcgtctcatatgcttgcttccaccttccacctttctgccacgggatgaccctcaccagatgccggcgccatgcttttggacttcccagcctccagaaccatgagccaaatgaatctgttgtctttataaattacccagtctgtggtattctgttatggtagcagcaaatggactaagacaagcctctactgactacccagttccaaagccatttccacatttttaggtatttgttacctaagcaccacacttcctggtgccaaaacctgtatccatttcctggaactgccatttcaactgggtggcttaaacaacagaaatggattctctccccattctgaaagccagaagtctgaaatcaaagtgtcagcagggcgttactcaccctgaaagttctacaggagggtccttcctgacctccccaggttccagtggccccaggcataccttggcctctggctgtgtcactcctgtctcttcctccactgtaccatggctgtcttccctctgtgtgtctttgtcacttctgttcttataaggacatcagtcatgttgcattaaggacccaacctactccagtatgaccccatctgaactgcaaaggccctatttgcaaacatcacattctgaagtaccacagattagaacttcagcataccttgaggggacagaattcaacccataatagaagccatcctgctccagtcctcccaaccaacccccatcaaaatcgggagacaggctgcaccccctgccacactaccccctgccacactgcctttgctcaggttggcctcatccatgcagctagacccccagcctgacttacttcacccctgctttgttcctggctgtgcagtggcccaggccagccctcagcatcctttcttttctcccaccagtaacagaaaatccttctgtcttgggtccctgtggcctcaccagtaggacacagagtatggaagtgtccccagcctcggcctgagccacatccccctacttgtgtcctgctctgcggtcacttgttctaccatgtgtgctggtcctgacctccccttcagatctcaggtgacctcagggccaggcccatggataacacctgctatccctgcccagcgccacgggccaggaagtacaagtgtggcctgccccagccgtgtcctgaggagcacctggccttccgcgtggtcagcggggccgccaacgtcattgggcccaagatctgcctcgaggacaagatgctgatgagcagcgtcaaggacaacgtgggccgcgggctgaacatcgccctggtgaacggggtcagcggcgagctcatcgaggcccgggcctttgacatgtgggccggagatgtcaacgacctgttgaagtttattcggccactgcacgaaggcaccctggtgttcgtggcatcctacgacgacccagccaccaagatgaatgaagagaccagaaagctcttcagtgagctgggcagcaggaacgccaaggagctggccttccgggacagctgggtgtttgtcggggccaagggtgtgcagaacaagagcccctttgagcagcacgtgaagaacagtaagcacagcaacaagtacgaaggctggcccgaggcgctggagatggaaggctgtatcccgcggagaagcacggccagctagcacggccagtgccaggaccgggccgagggaggccagaccaagggaggcacgcgcgctgccgggcggacagaggctgaggctcacaccccacacccgggcaggagcgctccctggccccaacacatcggggctccgaggcagtgaccagaacgtggtctcaaggtggtgggggctatgggggctgcagggggtagccctgccgcactttgtcacgggagcccagggtacccgcctccttttcgtaacactgttccccccggtcagcccatctagccctgtcctccattcctcacgccatctccatccccatcttgagtcctggaacggccctgggtgcctgcccctcactgtccaactctgggagcagcccggcaggttggggcgtcttccagaacctctcccttctggagccactctgcactgcgggctaaacatgtttccagtgtgattccttccagtgagccaaacccggtggctgcttcatgagcctgactgcctctcgcctgctctcagcaggaagggacccctggagcaggctggcccggggtggtgaagtagctggagcccgatcacagtcccgcggtttgtcagggggcccaccttctagatgaccccttaataaagtgatggccccccag

SEQ ID NO: 488 - DNA, 1173 bp, Homo sapiens
aatccctacctccattggagctgctatgaagactcttgggcacacgggaaacactcagtggggttaatttttcttctccttttcccttagatatggggcagagatgaaggagttaagcttctccaggtcacttaagatagctgagatttggggaatggggacagtggtgatattcagaatatttaaccacctgtacaggttgggcaccaaccagtcagaatgacacctggcccaaatcatcacccagggaggagggcacagctgagcagaacttctccctatatctttctgccccatcatgagtccatttatcagcaagcatacagacatcccttgagggcagctcctgaggaggttgcaggatgcgggatcctgagatctttgcattcaagcaagtcaggcctagcatggggcaccctgcctgacctggaagaggacccggaagcagagggcagtgagctgagggccttcccagctcctgccccaagctggcagcagacctgccaccaggctctggggaagagctgcttctgtgggctttcgccatcctcacgtcccctagagctgccccctccttcctgtcccttcttctcaaaggcaccatgggtcaggattagagggtctgtttgttctctgatctaactcctcgtgcctgtttcttcatcagcctggggaagttcatggtttctgttatctgactgtggagtatgggagtgtggtgttggggttgtgtggagccatgttctatcatcatggaaagattctggcctcaaggcaggcagcgtcttcccccagccccaggctttctgaggccacacctggacacgtggtgcacttagccaacactgacttattttacctggcctatctctttgccttgttgggtgaaattaatgcctttgagggcctaaggtggtctggttaagtgacaagggcataggaagacacaaccttacctagctggaagtcagagatttggactctagcccactttcccactgagtggtcttgggcaagccacctcctttactggatccagaaaagtagcattgagccaggtgtagtggctcacacctgtaatcccagtaactggggaggctgaagtaggaggctctcttgaggccaagagtttgagaacagcctgagtttgagaacagtgagaccctattcttc

SEQ ID NO: 489 - DNA, 3721 bp, Homo sapiens
ttcaagcaagtcacccaggtcaagcctgttctagaagaaacaactatagcaaaagccctaaggttggagtgtggctgccagagctcacacatggtgaggatgtccagaccattattcctcgattgggcctggagacccctctgcagcccctcccaatctctcccactgacctacggaccagaaggctggattttgcaatggaagggaacttgcaggcagcagacagctctgcactgtccctttgattttcctcaggcacctctgagagggagacacactctcagccaagtacccaacaagggacatgagaaggcttctgctgtgcagctgccagagaaacaggggacagatcaaagcaggagaggaccaacatctgcggtaaccaaagcaaggacaagttaccctgagtcagaaaccttcattgtgtatttgtgcagttacttttggaactcaagtaaaggagtttacatgtcaggttccacctgaattccttccatgcttttcagcgactgaaccatttgggtggcctggaagagcctgtgagctccctggagaaaggagacagtgtggatggagaagaatctggagtagagaggagtctggggaccctgcctttcaagtcgtttgtgtgagggctgcgttggtggcccaactagccagggaagggctatggtatgcggggtcaggcgggaataggcaggaaatgtttgtgataagaggcttcgcctcttgcaagctcctctggtttccagacccagctgcaggataagggcccaggagctgagcagggagcctcagaggaggctgctgcaagagccagctcttgggatttcagcaggcagagttgcaatcagaggcccctggggtccctgaagaccatgcctggggatagaaacgaccctggcaacccagccagggctgccttcctttgggatcagggattttcaatcatacttcagagggccaaatcaatcccttaagaaaaataaaacaaaacaaaccccagctttgttaatccaagttgctgagagggtgggaagtacagacttgaccccccaggggatttcatgcgctggattggtcccagttggagccattcattaatgttaaccagtagaaatggaaaatggaagggtgcactgacaaaagaccaggctggaagctctgagaaggaatctatcccaaagggatcatctgctggggataaatagagtcatcgaacagtgtgtcatgcaggcatttgcaaagcttggtgctccttagatttccagtgtcgcctctttgcccaaggcccagtgactccaccatctgtggttgacttggccagctcacaaaggagcaagatgtgcttcacaggaacaccccatgagcggggatgaggctacaggccacttgctattgtaccagctccccttcttaaggattagcagcttctatctatccctggaggctgcactgtaaatgcctgtgtaatgctaatttgtggtcggcaggagattgattgggaaggagcaggacaatggcaagaggaggctgagctccctcctcctcctggtgtaatggtgtgcttgcatgctgtgtgtgtgtgtgtgtgtgtgtgtgtgtgtgtacgtgtgtgtacgtgtgtgtcttctgggagaaatgtagcaacaagcccacagaagagatgattattcaaagagaggaagaagatttactcaccgatgcccagaatctgaaaggcatgtctggagtggagagatgggagtctatgaagcacaaatccagggagattttttgatgggaataagtgacaacccatcactcttaacatattctattcattagaaccaagtccctaagtccagcccacgcttagaggaagggattacatgggaggcaagaatcactgagagccatttcggaaactgcctacacttagaaaaacacttcaagagctcccggccaagggcctggcacatagcaagtgctcaaggaattgttacttggaccagtgactcttctaggatgtgagctaggttttcccatagtggcctgggtctctgctgtcccatctttattcctgttggcactgctgggttttcagcaaaggctttttcctctgacactgggaggtttgtgactaggctctctgggtgtgggccagcagacaggatagacgctaacttacactcttgctgtcttccgaacagcctcttcatgaccatgtgtggtcttactttgtggtcagtgtacagatattttaatttcctgctcacctgctcagaggaggatctgatttcttcttgcatttatttttctctccggcagcctgtggacaggtatttctgtctgaccatctggtagccattcacctttatggtggcttgagaaaggaatcaatttcacttgtttctttagtaatatctgcctcttttgacagcaagttacctttatcacctcttaaaattcttactatgttgcaccttctgttaccttgggggctctttcaatcccctaactttgtgcaactgcatctccctctttggtttagcttctcaggcctttctttttgcaccacggtttaatacattccatatatacttctaagtctgctggtacctctccccacccactgcctgctgagagtgacggattcttcctggctggaccaagtctaaagtaatcagaaaacaactgaaagaggaaagctgacccctgccctcatcctgcccctctgcagacttcttgaggccttttgtctaattgtggtgggtaatgtgggcagggtaaaaaatggggaagatagagcaaattttctgggcaagaatgaggggagaggtgagtggagcgtcttcatctcgctctggttttgtatcatgggtgtctccagggcctactgtctcctctgagactcctagaaagtgaggagccatggattggtatcctactaacagatggaacatcagaggcccgtggtaaggagtataataagctcagctcgccatgctctgttttgtttttgttggaagaagtgttgaaaaaaggagtggttatacactggcctatctagctatagaatacaaacacttagggtgagcagcagggaatggcttttctgaaaatgatgctgcatggaatggatgattaattccctggttaaaatgaagccagactgtctttcagagtcttaagcctcctcccaataccctccacatactagtttctaattggttaatgaatatggtcactatttctagggcctgttgctccagtgtagtggtcaagagtgtacactcctatttacaatagcaaagacatggaaccaacccaaatgcccatcaatgatagactggatgaagaaaatattgtacatatataccatggaatactatgcagccctaagaaggaatgagatcgtgtcctttgcagggacatggatgaagctggaagccatcatcctcagcaaactaacacaggaacagaaaaccaaataccacacgttctcactcataagtgggagctgaacagtgagaacacatggacacagggaggggaacatcacacaccaaggcctgtctggtgtggggaggggagggagagcatcaggacaaatagctaatgcatgtggggcttaaacctagatgacgggttgataggtgcagcaatccactatggcacacatatacctatgtaacaaaccataccttctgcacatgtatcccagaacttaaagtaaaat

SEQ ID NO: 490 - DNA, 4154 bp, Homo sapiens
cttccttctccctgtgctcatcgggcagccgcttgcactgggcatgggactgtcctgggggtgcaaagggagaccagactcggtcacaggagtcccacccttttccacaacacatgcctgagagatacatccagttccagccacagggctgtatgggaaccagggacgggatggaggtagcaatgcagtttgaaaaagcccttggaaagccttttaaaatgttaaatgtttttgagcagatattgcttacacagaactcagaaggtacaaatgggaatacaatgtcccctcccaccccgtccccagccactggattccctcccagaggcaaccattttgccaatttcacaagtgtccttccagagacattctccgcatacacgagtaattttgtatacgtattcttttttgtttttacctgaatgttgcatgttatacacactgtctacaccttgcttttttcatataatcatctatcttagagatggttccatatcagtacataaagagcatcttcattctttttgcatttgcataatatcacaaaatgtaccataacttatttaaaccagtctttattctcagtctttagttattacaaatgctgctgcaatgaataatctttgaagggtgatatttggcagaggcacaaatatatctatcctggttcaggtgattctcctgcctcagcctcctgagtagctgcgattgcaggaatgcaccaccatgctgggctaatttttgtatttttggcagttaagtcagagcccggaacccagggctttggagcccaggctccggagcacaggctctgcagcccaggctctgctttgcccactgccaggtatctggcgtgaaacaaagttaacggggaaagaatcactttccttcacctgtagctcccaccccggcctggcaagctttggttagccccacccctggcttcctggcctcaagtcactgagctaatgcggggctctgctgtctccttccggaagctgcagctaggtcaatgcctagcttaaaagactcacgagttcttccacggtgctgctctggcagggcgaggggctgcctggcatctcagatcccacaggccagacctttgggtggcactcaaggctggggtgggttggtcaggctccctgatgatctgatctgagcagggaaagccctcagcttgctaagcccccacacagagagcccacctgggaagtcctgggattgggaggagggctcctcctggactgggggaaggaggtggggttccaggttaggagacttagttgggccagaggagatggccttggccttggctggtggggtgggagtgggcaagaccgttcagggatgtgaggagcccgtagcctggcacacagtagaggaggtgggaggaaaggaaacagggctggtgctcagaggagcgggtcagtgctgtcagtgactcaggaccacacgccattgcagagagggatggtgtccaggaggcacagctaagccatgaggtcaggctgcaggccgcactgtctgtcccagcttcacgccctgcactcaaccctcctgagggtcagcgcggggtcttcgtggttcacctgtctctcctgctctattgcaagccccttcttttcagttggctgatggggacactcggcagcccccattttccccagcacccttcaaaggcctaagggcagtaggttagccaccctcagcctgccctgcaacacccaaccctgccaggacaggggtctctacctctgtccaccagcagggttaggacaaggaagaggatcgggagcccggtctcatcagccccctctttgcattgcagtgggaatagcacggaccttagggtttgggtttcaacgggaacctgctgcatgaccttgaggaggcaacttaacctcaccaagttcccaaaaatggtggccaggaattcagatctctgccttctggggatggaagggtggtgttggcctgtcttggcctatgggagacgttccattcacctgccgccccctgtctctcatctcccctgtgaggtcaggggaggttgtagtgtacacctgggggagtgacccgccccaccccccagcccatccgtgcctggctctgccatctctttcctctgcagcccctgctggcctggtgcctagcactctgggtaatcgattagtttaattagtgaaaatgccattcccttctgccagcccccagcctcgccagacccctcccagaactgcaggggaaagtatccaattaattgagtggtaggtttctcagctctgggcctgggctaagccctaattaagctccagcgccctggggtatcgcagataatggattcgcagaagtctgcctgtgaaatgggacttgcgagggcacctcaaggccaggcaccccaggagatctgcccgcagccagcaccaccaggggacaggcccccaactgttgcatgcatggctggccgggggatggcactgagcccccagcaccacccctacacctgctgcctgtatcagcaccctctcctccccccaccacctcccgctactactgttcactcccttccccaccgtccagccttcccccacccacccaacacttgcacacactctatcccctttccccacgttctgctgcgcacaggagcctgggcctcaggcacagcctgggagagcacaccgtggtgggacatgaaacggattctgggggtctggtttgtggaccaaggttcactgctcaccgtgtggggagaggtgagtggtggttggaccagggcttctgaactgcagaggtgctttttcctaaaaccaagctccgattccatgggcctggcgtagggcatacattccactttcctcaagatctctgcgtgctcctctgcgtgctgttgctgggccaggggccaccctttgaggatcgaggggctggagtgagtgcccactgcagggtaagaggagtagctctggaagcctcggtggagaggacgtgccagaatggagtgggcaccagtggggagcttggaagggaggtctcattgccaccaacccagagaggcatcaggacggatctggcactgcagcgcctgggacgaggtggtgtcctgcagagagtccagtcagagtcagccgggcacaaattgcttattcaattcagatcactgagggtacagcggagtggcctctgccaagtaccatgctgtgccaccctccttagggcggggtgcctgctggtcttaggtctccagactggatggagatggagtgctggtcagggcccgaggggtagctgtgcccatttgtccttcggacatcccagctgctttgctgttatcgtggccatcggtcggggtgtcactggctgtccctgggggtgctgctgactctcctctccaggtatcactggccacctctcagggtgttcctgggtgcctcttaaggccttgctgtctctctaaataatgctggccagaactctggttgttattggaaatgtcacagtgtcactggcttctgtctgggtgtcgcaggatgtatttgtctcagggtatcagcagccatccctcaggctgtctctccagctgtcttctcaggttgcatgatgctgatgtggccgatgagagacagggcttgaacccggcccaggcccgactgctcagggaggcacactgagactttgtcccccgggaatggtttggcctgattctccctcaggctcttggaggaaagccctcttgggcgctattgtcccagcaggaggtcccccgaggctcctgggcccaaagtggcgtgagaccaccccagagagtgcctctgctttcaattcctgcttgtcccccaagaaatgtcgcagggggccggacacggtggctcacgcctgtaatcccagcactttgggaggccgagacaggtggattgcctgagctcaggagttcgagaccagcctgggcaacatggcaaaaccccatctctaccaaaaaatacaaaatattagctgggcatggtggtgcatgcctgtgatcccagctactcgggaggctgaggcaggagaatcacttgaacccaggaagcagaggctgcagtgagctgagatcctgccactgcaccactccagactgggcgacagagtgagactccatccctcccccaccc

SEQ ID NO: 491 - DNA, 4231 bp, Homo sapiens
tacggttattgcttcagcggaatctgctctttacactcttgccagaaggcccttcagcatctgctccgcgtctggggacacggcaggggctgccaggctgctgcggctccctactgatgacagggccttcagagatggcggcggctgctcccacaaccgccagctcccattcccctccacgcctctcctgttctccacacaaagcccaagctggaaagggtgtagtcacgcaggctgcatgcatgtgtgcctgggggcccagctacccgggcttggggcccagcttggccactctgtgtgactgtgtggcccggggtgagtcacaaaacctctctgggtgtccattttcatgcccagaggatggacgatcatgatggtgactgttgcagtttggagaactcagtgagttactgcatgcagagcccttggcgcaccgcctggcctggggttgggaagtggttatttttcctgggctgctctgctgctgatacacccggcgtggccagcccctcacacaagggaacaggttcctgtgggaggtgttgcccctccccctccacatcatctcagctaacagtttgtgacaagccatagatgggatgatgcatcctgattttggagataataaagtgaaaaagtgggcacctttttccagagcgagactgcatcagataactccacgccgttactgtcttcagcagaccaggctggttttgcaagtttctttctatgaagcccttgttccctctgcagttgggagtgttgggctccctggcctaacagccaggttctcatttgaatccttgcaggtagccccagaggcgctgtgacgctgctgcaccaacacctagcttaagtgggtggttttgagtggttgactgcaggcccggggctggaggggcgttggagcgagggaagctttagataccgctctctgacacagtccctgctgctctgggacccgccactgtgcacgtctcgggcagggagggtctgggcagcccacgctgccatcaccaccattgcagtgctctttgtagccactgggtgtcagtgtgccctgagaagtcaacgcggcttttaggagctctgttgaattgaccctttctgaaataattttcatatgaagtggttacatttacctttcagctttacttccgtctcttcaggttaaatctaaaaaacacgtttcagagattaatttcaaaatatggtttattccgggaggaagcagcatcctaagcacgtgacatttaaagaccaggctataaggaagtgcctctgcccccaggccaggtggcagctgttcagatgtttattatggacagtgagctctgaacggggtcagcctggcaccccgagtgtggaagacattttcgctcagtgtgaggccttgtttgaggttggtcatcaatattggaatttcgtgaagttggagtgaggttgccagatttaatcttcatttctaaaatttggtagctggcaggatggggtatcgtgtgtgtagaaattatccacaggtttcccccataactgaggcaggcacactgtaaataggacttcagacattcacaaagaaggaaacagttttgagatgtttgcttactgttatgtcgcaagtgatttgtggcaccactgtctctgggatctaacagcattctgtcagtttgtgtcttaggagtccggtctctggagacacagggctgaatcaggcaggctcgcttgggagagcagctcacagttagcagcaggaagacaagaaagtggatcatcttggttgttggggagggtgctgagagggccccctggagcaggtccctgagctgaatcttcctagaggacagacagccaggtgcttgcagaagacacgcagggacagtggtcctggctaacaaaggcaggagcaaagctgtgcaggtgtgcgctgtcggcgggcaccgggcagaaccgcgtcctacaggaacagaagggggagtggggaggtccaggccctgagctcccacgcctttgccttccagccccgctgacctttttccccttgggtatatgccagggtctttgagctcaggacttcatctgccttgttcaccgctgaggtccccatgactacaactgcacctggtgttggaagtgagagccaggtggagaggctcctggcgtgtggtgggaggtggggtgcaaggcgccaagggtgctgttggcatgaccttcctaaagcaccccatgctgggtgcttcctggcctccagcctcagagtccaagttcgtcagaagcctttgaacgtcagactccaagaccctgtgccggcagtggcagtgctgggtgagaagaaggtgggagatgaccaggagccctgcaccaagacagcggccgtgagggagggagagagcgtggggtgcacagcagaaggtggatgtttggggctgtctggaggatgccaaggctggcttgcccctggtctggtggaacttcgcagcgctgctttgaatgtttgcagtgggtattttgttctgtgacatgtttatgtggtctctgagcataaacctatgcttgtgaagttgtttaatctgtttgtttgtacttagagtgacaggcctttattagaatgcttgcttgttttctgaattacatatgccaagagcttgacttcctttttagctcctagcttatgttcaggcatttttctaagtagcgaatgtaggtatagactagtttgaaggagctgagagtgtacaatctaaaaacagatctgaacacaactaaatggtacaaatgcagcccgggttttgatgtggattctggtgttttaaggccatggatgtggcttactgtaatcttgaaggggctgcagtcctggcttctggtgagaggactgcagtgccggggctggttaataagcacccttcatcctgcaggaggccggcgcagcatttgtgagtatctgtgttgaatctcttcgtggatcagatattgtgtcttcttgctcagagtcaggttggaaaaggaaaacttgccgccggtgtgcatgtgctccaaatcctcagcttgggcaagggcacgggcgtcgtgaataaaggagccattcttgctggccttttctagaaattgcccacagcttgcaaaaaggctgtgttccctggccccggctgcggctgtgtaggagtctgaatatcattttccccagaagttgaggtccctaggttaggcccaccttgtcccaaatgggcagcattggccttgccccatgcacaggctccaggcggacagagctgctgcaggcatgctgtcagggggacaggctgccccccagctgtgcatggcagtgtgtcggaaagaacaaggcctgtgggtgcccctgagccgggtctggagtcctgtcctgccacttctcagccgtgtgactggagcctctttgctcctctctgaaaatgggtctggtggtttgttcccaggttcttaaccactgtgtggagtcacacctgcagaaggtcagctcataacagatatggcaaccaatgtgacctttgcatccttccttcctggggtcaggagcaggtctaagaggtggtcaggctaaacccctgtagggctgtgggtactgctggtttcctaagccccgggaccttctgggggccgggcggaccttaagttctgtccacctgcctctcctccatcctcactacccaccttgtccttccggctccttccctccctgctccgcctctcatcggccctctgtcctctccgtccggagaggggaacgtgaaggaggtgaggagggagtagtgcaggaggatttgggtctctccttctttcccttttccattctccgagggcttaaccagctggtgaaggttcttaaccagcaaaggaggaagcagccggggccggtgagggtgaggccggcagccaggcaggaaggcagcaggaggaggaggaagcggaggcggcaccttctgagaggcgcatgctcagtgagtcgtgaagatggcagggctggcggagcggccgccgcatctgatctctcccctttttttaggatatgtgatggcgtccagtttggagctgggataaggttcctgtagccgacacccctacaggagaagctctgggactggggcagcagcaaggcgcccatgccacacaccgtctctcgaggaaacgcggttcagcgattctttgactgcggaccctgtgggaaaccccgtcaataaatgttaaagacacactc

SEQ ID NO: 492 - DNA, 3951 bp, Homo sapiens
tacgagcccgcgctcagactccccagctccgccgagaggacgctcgcgctgggtccttcttcttccccaagtgcaggcagagcccccggagtcatggccagcccttccggcagctccgaagccactggcaagccctgaggtagggatggctggcccaggagggaggaggacgacgtccctcccgaagagaagaggctgcggctgttgctggaggggggaagcgcacagcccgaggacggggaggacgcgccgcggccgggcagggaggagaccggcacccagacaggtggcgacggcaaaggagcggaattctccacgagttttgagcagcctcggttttcccaccccctccaaatcatggaagacacacggtaagagcaaagacaaggtggctgtggcctatgtctaccctctcggggcgtcccttgtcttctctcctccttgggcagggagaccatcggagtgcaacctggctggggcggggaggaggtgcagggcctggccagagcgggcctggccacgggcaagggacagcgacctcctgggccaggacaggtgagcgcggcgcaggcccgggcccggcgtgtccgcgctgcgcgggagaggccagcagagggcgccagagagccaggagcggcccgcggaggagcccgcgcccgccccgatgcccagctccgcgcctcgcggacccagcaagctcgcgctcagacgccccagctccgccgagaggacgctcgccccgggtgcttctttttccccaagtgcaggcagagcccctggagccatggccagcccttccggcagctccgaagccactggcaagccccgaggcagggatggccggcccaggagggaggaggacgacgtccctcctgaagagaagaggctgcggctgttgctggaggggggaagcgcacagcccgaggactgcgaggacggggaggacgcgctgcggccgggcaaggaggacaccggcacccagacaggtggcgacggcagaggagcggaattctccacgagttttgagcagcctcgggtttcccaccacctccaaatcatggaagacacagggcagagcccgcggagccatggccagcccttccagcagctccgaagccactggcaagccccgaggcagggatggcagtcccaggatgggggaggaggacgtccctcccgaagagaagaggctggggctgtagctggaggggggaagcgcacagcccgaggactgcgaggacggggaggacccgccgctaccgggcaggaaggagaccggcacccagacaggtggcgacggcaaaggagcggaattctccacgagttttgagcagcctcgggtttcccaccacctccaaatcatggaagacacacggtgcaggcagagccccccagccgtggccagcccttccggcagctccgaagccactggcaagccccgaggcagggatggccggcccaggagggaggaggacgacgtccctcccgaagagaagaggctgcggctgtagctggaggggggaagcgcagaacccgaggactgcgaggacggggaggacgcgccgcggccaggcagggaggagaccggcacccagacaggtggcgaaggcagaggagtctgttcttcccctggattgtaaactccttgatgtctgggtcatctcagctcatgagctgagctttcagtgggtgctcagtggaacaggtgctgaatggagtccggctctagggaggccagggtgtgttggaaggaaaatacatgtacagccaacttccttgagggttcgttcttttgcatcagggtgtctcaaactgatgcccttaaaacacctgtaagagaatcatccaggcggcttgcttgctctgcatgcaggccctttagaatcagactcagaatccctggggctggagccacaaaatgaaatgacatttcaacgagtttgtcattatgtgagagagaataggcacagagaagttgcccatgactctgtgatccgttttgtccaatgaaccatgagcagcagcaacttgagtcacctccaggtggaagtgttaagaggttgctctatgatccaccacattccctttgccctgaagtggagatcaaggacacatgcagagatggggcttttgtcagcctggatccctgagtgaacacaatgaacagaccaccccagaatgccctaacacagcccagacatgcaacgtgaccaagaataagcctcactgtggccaggcatggtggctcatgcctgtcatcccagcactttgggaggccaaggtgggtggatcatttgaggtcaggagttcaagaccaacctggctaacagggtgaaatcctgtctctactaagtacaaagattagccagacagtggtggcatgggcctgtaatcccagctactcaggaggcaggagaatcacttgagtctgggaggcagaggttgcagtgagctgagattgcaccactgcactctagtctgggtgacagagtgagaccctgtctcaaaaacaaacaaacaaatacctcactgcatgaggccactgagatttggggtttgttgttactgcaccagaacccaaatcatcctgaccgctagggtgtcctaactagggtttcttaccaaaagcaaaggcatttttaaagttcgtgacatttaaacaaaagagcaaataccaatatctaccactttgtcaggctaaaaaacccaaacaaagccaacagccagaagttaaaataaacagatcattaggttgaaaatagaactgtcaaaacaggcacaattgacttcatttagtgattgcaaagaacatcaggcaagacacaggtatgctcatcataacatttatcacatgcttcattgcacatgtttgactaagaaaaacaaagtatttaagctcatctgtagctcaaagtgcctatccgtgtatttatctattcatcctgatttatttattgagcaactcttttgtgccaggcactgtgctgtgttgcgggaagtcagggaccccaaatggagggaccagctgaagccatgacagaagaacgtggattatgaagattttatggacatttattagttccccaaattaatacttttttaatttcttatgcctgtctttactgcaatctctaaacataaattgtgaagatttcatggacacttatcacttccccaatcaatacccttgtgatttcctatgcctatcattactttaatctcttaatcctgtcagtcgagaaggatgtatatcgtctcaggacctgtaataattgcgttaagtacataaattgtacatcatgtgtgtttgagcaatatgaaatgtgggcaccctgaaaaaagaacaggataacagcaattgttcagggaattagagagataaccttaaactctgaccgctggtgagccaggcagaacagaaccatatttctcttctttcaaaagcaaatgggagaaatatcgctgaattccttttctcagcatggaacgtccctgagaaagagaatgcgcacctaggggtaggtctctgaactggccccccggggcgtacctgtctcttatggtcgagattgcagaggtgaaataaactccagtctcccatagcactcccaggcttattaggaagagaaaattcccgcctaataaactttggtcagacgggttgatctcaaaaccctgtctcctcataagatgttatcaatgacaatggtgccaaaacttcattagcaattttaatttcacttccgtcctgtggtctggccctgtctccacttgccttgtgatattctattaccctgttaagtacttgatgtctgtcacccacacctattcatatactccctccccttttgaaactccctaataaaaacttgctggtttttgtggcttgtgggacatcacggatcctaccaatgtgtgatgtctcccccagatgcccagctttacaatttc

SEQ ID NO: 493 - DNA, 4653 bp, Homo sapiens
cttattaaaatatgtgcaatatttatggaagtcaaacagcttcatatcagtgataaagattgttattaaaagataaatactgtctgttaatttacatgggcctcaagttcctcgtttataaaataagagagttggacactgattcttaacatctcctccacatttaaaattctctcttctcagcccttagattctagagagaaaaagctgcagttactcagtaagtccattctctgatggaaagaccagtgtgtagtgcctgtcaattccttaggattaatcaaatgtaaaatcacaagtttgtgtagctgtaacctttcttaaatgtacatgatttatgtacatgcttttagaaggtcctactatatttgtattataattagtttaagtaatttttattacatcatgtattgctttattcagtttgaatacatttatttatttatttgcagtatcaaccagaaacactaccaattgcatcaaattctcccagtttttcctggttgtcaatgcggttttcaatgcacaattaagtcatagccatttggttcgtaccaaatgtgtcagaatctaacagcatccgataggctgtaagttggggagttgctaagaaaatgcaacgtggtacaggctgtccgcctcagccctggaaatctcccagacctcccccagcttcatcctgtgtagcacgactcaacgtgcaccctgaatcttctcaggtcttccaggtcatgctgtagctgtcactgccatgcagcccttttttttactctggacagctcatgtactgaagcgtcatgaaagaaaggctgtggtctgagcccttctctcccatctcctgtctttgtcctgtcaagtgctggagccagagctcctacagctgcccttggtggtttctcctgttcagcgatggtggcacaaaggttctgctattccagggctccagcttcctcccaggtctacccagagctccagatgggggtctgaattaacctctcttggtggcctggagatttttagtcattgacaagaataccttgtaaccagggaaccccaaggcccagtaaatgattctgtataccattttcttgaaggtacaagaagattctgccgactatggggatctttgggccagtttgaggattgctttccctctgaggttctttctctctgtcagccacactttctcacccaacttcagacacaccctgccagcctttcccctactcattcactcttccccttccctcaacttaatcgtctatcccgttgcctgctgtttgactgtgcactgaaggcaggtggatggagtcagtcctcagttgcccctgctggccttcctggtgcttaccatcagcccaatctttgcacagtccttgttgttcttacttctctgcatgcattccttcagaagatcagtcatcaactttttcttaattcctctgtgacacacaatgggaattcaaaggaagagatcttaaaagtcacaacagttctttatcttaataatcccctccccattcaccttactacatgcagactcacctcacacccttacaacttgaagctgaaaatttaaaagtaatttccctttttgcagcttttcctcaggttaaggctttgatctgcctgagagtaactctaaaaggagggaagataaatatgggataaaatccacaaagtgtagcttctaattcctttggaagtttaaaaaatttccacatatctgatgcttcttttgtcaggtgcagaagcacaaaaacatattccgaagccaactgatagggaatttggggattattgtcagtttggagaatttgctgtgttatttcttcatttccatggatagctcatagttggctctttctgggtgagtaattatgtgtaatatagatcaaatcttttactaaggttacagctacatgttaggggaggctatgaaaatactatattattataatttcagtgcagtgattgttgtgagaaataactttcatggtaaccctaggaaaatgggcacctgccaccatcctgagaagtcctcacacaatgccctttctctcttacacacacacacacacacatacacacacacacacccccgtcactaattcatagagttccttagcaggcatagtcaaggatcctctgggtaatgtcagctgcttagtgataaaacagagccaaaactagtgcatcctgttgaaagtaatgcagaaacagtacctgggtccagatatgctttcctgcggcgctttcctctgttacctcgtttcatcctcacagcagcatggacggtaggtggggtcgcttctacaatcatttctgatgatagcttgggaatagagataggggcagtgacttgcctgatgtcgcacagccctccggctgtcctgctttcccatatggagcagtggtggtgtgggcacctgtgatgcaggagactttaaaaatgtcgtgaggtcacgtgctgcccctcctggtacgtgtggaatgcccctggccagcaaggggtgcttttttatcagagttggcagctggcatgtgggaaccgagcaagtgctgcgtaccaagttacttgttttaaggagaccaagtgctcagcgccaggtggttttcttttttgtcatagttacttgctataactcagcttgacttctgtcatgaatcagtgctctctgggaggatgcaatactctgtttgggcattaattggtagcaggttgtctcaaccaaaaagacaggaaacagcaaaagcctctctgaaattaagaggaaagttactctccccacacccatcagagtctttattggagccaccaggtgagctgtgcagcctggacaggcctgcagctataggccaccttcccagtttaggtcctcagcacaggggagcccaagtcactgggtgccttctgagggctgtcactgggcaggccatatacaattcagtgtgtgcgtgggcactgcagtgtgtgcatgccgtaggtgttgatgggtgctaggaggggtgtcgtgtgcatgcgcgttgaagaggatctgtattgccgtgacctctgttcatggatgagtgcattgtaatttgttctcaggctgtgctgtgagggccgccttaacccttgctcccttcccttctagagctgccttaagttctccagaacttttcttctgtaaaggatatcttgcctggaagggatatcttgccctgtttctcaaggttttgtgagagttttgactggatgtggccctgcatgaccctccttctcctgtacttcctctttcctttccaaatgggaattagaactgtggggcagcaacagtctcagagccagtgagaggccagcttagagaatgcttctgagttagtgggactctgtgtcacaagtaagcaaatgaatatatgaaagaaattatggagataagttagattcttggtaatacttaaatgtcttgctttctactaaccttttgttactaaaggtaaagggtataactcaaactttttgtggacattcttttcaaaattttttaagaaccctgtactataaaaggttgagtaaaaacaggaaagcgtgctataagttcaaatctgttgtattaccctaaattagataaaccaacctgaattatagtagatttctcaatagatgaggaactgaaaaatactatgtaaaatatcttccaaaatgctttttatactttttttatttgtaatttggtctatctaaaatgttcgttagcttaacttaatgggcgttattggattcatatgactaacgtttcctcagtattgtaatgcttgaaatatttgaaagaaaaaatgttgttttttagttgaaactggtatatataattcagtgcttggcaggttagtatatttttatgcatttttcagagtcagcagtttcaaatcttattgttatcatgttataaaattttagcccacatttcaggctccgtaaatcatttgagccattattttttcccaacaaatggtgaattttttctttaaatgtggatatatatgttgtaatttatgattcctggttatgtatttttgtgggatcctgcagtaaaattgacttttttgtgtctttgggagatttaaattgcgctaacagtgttgcgcaaaaatgagttcatgccatttaacatattgtattttaattattaactgtattaatttactatgaaatggacatccttttaactaaaatggaattgaacattgcagttttcaaatatttttccttgttgggtctggaaaaggaattctactttgatctgcatagaaaattttgatacaattttttgaaagttcttaggtgaaacatttacccattaaaaaggaagcagaaatactgagacatgaaaggcattatcaactaactctagactctagaacccattctagcatatctcacgtgcaatttttaaaaataagttaataattcatctcatatcaacaaaagcctttgaaacatgggttttcactagatatcacctagtgctaagataaaaaccaaaacaatatcagaattacatttatgctctaaatttgtagttgtccattgttgtgcttagtaaatgtgtgtcattaatgctgtattctcctagctattatggaaacttgtttaaataaagatatggatat

SEQ ID NO: 494 - DNA, 3815 bp, Homo sapiens
aaatgggtgcagagattcaggctggccaaggctggcacaaggacattcccagtggcgagagcatgagcaagggtcacggatgtgccaggaggggaggcggagagatgcctgggaccaacctctatggcaggccgcggcccaagggcaggggaggggtggacggagggaagggacagggtctcctccgggaccccagggaggctgggcccaaggaccatggagcctcgcagctgaatggagccccccaggcctgccttctgtcctgggaaccagggcctccctcgagccagagtcctgagcgccgcttgccccccgcccacagtggccccagcgagcgcgctgcagagggcgcgggtgccgtgactcagccgagcaccgcgatgtcagcggacgcgggaccggactggacacgaccgagccacctccccggaggccgcagcgccggcagtctcccaggatcagtcagccaagagacccgagattctcaaatcacggcagccgccagaggtgcccctgaaatcacagctacgccctagctcagccccgcctggaactgtgctccttttatctctgcccaaggtgagggaactcaggggaccttcctgctcctgccccgcccctgcccccacaacctttggcatcaaccactgtccccacccccatctcggggacttgctagtcctggggctgctgggaggggtacagccacaagagggatgccaagccagggcaatatgacgcccccacagcccaccccactggtctccagagaggcccagagatgtccagctgggcaggcagaggacagagaggctcgggcaggcttggcccagggcagagaaggcccaggtgcaggcaccctgagcacagatggccccccagcccccacccagctacccaggcctgggcgctgcagacagcgagtgcacttccccagagggccaggtggctcctcccatggcagtatcacccacttcccccagctcaccaccagctgggccctggtctcccaggagaatcttacacattgaagatgtactgtgctcagctctttgccggaggctaaagctcccaattgggccatcccaccccactctgccacctctgccatctaggaacccagatgcccggagaggaggtctgtcctggggcccttagtgtcttcccacaggagcccagcgcgtgcctgcaagggcctggtcccggaatgaactgtggatggaggctgctttgtccttttccccgtccagatccatgcccatagacaccgctgactataggctgggcccagggtcccttcctccagcctgcagcagaggggctttccaggctggaaagggaaggagtccttttgtccctgacgcaagcgggttgggggccagcacccgctccaggaagaggaagggatccagcctgaagtccagactccccgctccctctaagccagggcctggagcctggaggccaggttccttcttctacaccagcccacgttgggtgccagccaggctgggatggccctgcggggtcaccctgagccccagccaaccaacaccccactctcagccacagtgggaggccccatcagcctcttcacccaaccacgttgccactctgctgcacgggaccttgtgtggtcccaggcgtggccagacccagacgtcctggagatctcaatgcagacacccggcggcagttcctgcaggaaggaggctgtcctgccacgcctgcgggtgacccggcctctggtgccagagcctgccatccttcctgtttgtgctgccaggctggcagggtcccttgccaccgacctcagccgcagccacagcctgctccctccctgggtggatttgaaggagcctcccccaccctccgcccctagcttgctccttgaggaccctgggcagggtggctgccatggggcccaatcgtgcgtgggaacctgcgagctggcaaacggggctcgggggttttgcccagaaatgggtcagaacgaaagcctctcagaggaaagaaaagggcatgagtcaaagagaaagtcggggggcaggggctccccctcatctcaccccacccaggcctcctgactccctgggtttgtgcggacccaggcaggcagccaaccccagctccgtggtgtgtgagcatcgtgatgatcaggacacaagctcttccccgctgagccttcactgtgggccagcttcccggtggatgcccactgaagaggcctcaacccagtgggccccactccagaccaagagcagaccattggccagctgccccctgcagacagcggcacccggggcagcagcaaggtgaggggcacccagccccagccccaggggcgtctcagggagcgggctgagcctggctgtcttcctgagccccacctgcttcatgggttggcttgagcaaggcagtccagatgcgtgtctcgagcgctccctggcggcatgctgcaaagctacatggctccggcaacaaggaagactgcccttattctcagtaacaggtggagctgggggctggagagcccctcggacctcgccttgggaaagctgggtgggtgcacggagcctggcaggtggccaaggggacccccaagtggagggattggtcgaggggcagcacagggtggtgcagtgggtgagctcagcccctcccctccaactctcatcccattgagccccaaggcgtggggggatcacgtctgtccttgttctcctccaggtggagctgctgggtggggctctggtcctccagggacccactctgcaccccaagttttgccgggacccgctcctctgtgttgtgtggctgtaggggagggctgcagccagggactctgaacccggggccggcccacccagccacccagggtggggaacaagatcgcctcccagggccagaagctggggatgtccttgcttcctaggatgttggctaggggatcacacgccccacattctgggtcaagcatggtcctgccccagcatcttgctgggttgggggcatctctgcacagatgagtgccaccccagcgtctccgccagggtctgggcatgtcactcttgggcatctgtgctcaggaggtcaccaggtgtgggcagggcaccaagcagggaggtagccgaggctggaagatgcacatcagtgccccgctgggcttcctcaagtgggaactggtggagggggcgctaggctgccgggccagggtcagcaggctcaggccggctcagggctcagagttgagccagaaaccaaggtgaaatctgcctcttactgccgccagggcccttgggacagggacaggaacagcagaaggtaaagtggaaaggaattgagtaatgggcccccaggcaaggctgagccaggccccaagcccaggattggggtctccagagtccctgggggccccagggcagctcacccacagcctggggcctatgggagcaagggggctcctgatgggtgggggcaggagcttggacaaagttgaaggccttctgtctgaattggccagggaccaatgaaagccaaaaagctggtgtggtggcttatgcctgtaatcccactttgggaggccaaggcgggtggatcacctgaggtcaggagttcgagaccagcctggtcaacatggtgaaaccccatctccactaaaaatagctgggcgtggtggcaggcacctgtatgtaatcccaaatactcgggaggctgaggcaggagaatcacttgaacctgggagatggaggttgcagagagccaagatcatatcactgcactccagcctggctgacagagtgagaatctgtctc

SEQ ID NO: 495 - DNA, 3891 bp, Homo sapiens
ctctacctcactctgggagttcttacaggtcttggatttgcactttgttactctccagctattgccatggttggcaagtacttcagcagacggaaagcccttgcttatggtatcgccatgtcaggaagtggcattggcaccttcatcctggctcctgtggttcagctccttattgaacagttttcctggcggggagccttactcattcttgggggctttgtcttgaatctctgtgtatgtggtgccttgatgaggccaattactcttaaagaggaccacacaactccagagcagaaccatgtgtgtagaactcagaaagaagacattaagcgggtgtctccctattcatctttgaccaaagaatgggcacagacttgcctctgttgctgtttgcagcaagagtacagttttttactcatgtcagactttgttgtgttagccgtctccgttctgtttatggcttatggctgcagccctctctttgtgtacttggtgccttatgctttgagtgttggagtgagtcatcagcaagctgcttttcttatgtccatacttggagtgattgacattattggcaatatcacatttggatggctgaccgacagaaggtgtctgaagaattaccagtatgtttgctacctctttgccgtgggaatggatgggctctcctatctctgcctcccaatgcttcaaagtctccctctgctcgtgcctttctcttgtacctttggctactttgatggtgcctatgtgactttgatcccagtagtgaccacagagatagtggggaccacctctttgtcatcagcgcttggtgtggtatacttccttcacgcagtgccatacttggtgagcccacccatcgcaggacggctggtagataccaccggcagctacactgcagcattcctcctctgtggattttcaatgatatttagttctgtgttgcttggctttgctagacttataaagagaatgagaaaaacccagttgcagttcattgccaaagaatctgatcctaagctgcagctatggaccaatggatcagtggcttattctgtggcaagagaattagatcagaaacatggggagcctgtggctacagcagtgcctggctacagcctcacatgaccaaaggccttgagccccagaatcttcaggtttgagagaggtggggccaccagattcttcatgtttctgaaactttttattttggcagaaggattgccttccaaggaaattattattattgttttgttaacatattaatatttataagggaaaacagcacataataaggaaagctggactagcccagagccttctcatttgggatttgtgctcataactgaactcgtatcttttggtcaatgggcatagctctgtaagaaatgtaaggacacagctgatataattagctgtaattagggataatttcagagcataaccaaagcagatgacactgggcagcagctttgttccagtctcaggcccttcatgttccctcctcagaaagaaaatggaaacattaacgtgtagctttgcttaccttgttctggttagagaagggaggtcagcttgggtgtggtggtgaagagtgaagatgccatactttttcatggtggagtttctcattagggttttacttgggattgttaaagaatacttgagattcttcaaaaagtggtgattaatatagaaagaaactcttattttttttttctcttagtcttccagccagcccttgcctctgcccaagggtagacaccactatgagaatccaaataatcatggaatgccatggttggaatagatcttaaagggcatctggtaagatccatttgaaattgtccactggaaaccgaaagctcttttcctaagactgggttccaggctctcacatttgttaccatcacatataatacttactctaaatttagcagaacacacttagtcacaaggacaacctctcaatcttacctgaaatgtcaacaacaccaaaacttcccgtcttttaccttcagagaagaagctcttacttagactgcagacgcattcctgttaggttggaaaaatgttggcagtattccaattgggcaggaactgaattcttgaatcagcaggtctctggtgagagttttctttgcagatcagacatttagttttatcattacccaaaagaggattggagggagtcagttgtctgaaaaatattatcctagagatattctaaaggtgagattcctttctccctgtgttaattcttgttccactatccactgctcttcatctctttatagataataattagaaatctactcattggattataagtttattcattctcaaatactccacttttctatggtttgggataatttctgagtcttcagattgaagagggaaggcatggagggaagaaaaagtccagatcccccagcttgtttccaaccattttaagtccaaagaattataatcctgaatctcacagtgtgtcacacctgtaataggagtaaattatgcaatcaattttaattaccaggagtttaaaatccaaatgtcaaggaactgttttgaccctgaaggctatttaatccactgtcccctacaaggcctcacaagtgctgggggaaaaaaaaacagcaatgaggatgatcctgagttaatgtgtatgctccgcaagagagcttgcctataccttgattatttcataaaatcacatgttaatacattgctttcagaatgaaatactgacttgatctgataggagaaaatggtaatatttcatagttgttttccaaagacaaatttaaatgttgtctgttatctccttacttagtttaagaatttagttttgaaccccattgactttgtcatttgcaattttaaaaatatttgggactgggcatggtcgctcacgcctgtaatcccagcactttgggaggctgaggcgggtggatcatgaggtcaggagatcaagaccatcctggctaacatcgtgaaactccgtctctactaaaaatgcaaaaaattagccaggcgtggtggcgggctcctgtagtcccagctactcatgaggctgaggccggacaatcgcttgaacccaggaggtggaggttgcagtgagccaaaatcatgccactgcactccaccctgggcgacagagcaagactccatctcaaaaaaaaaaattggaaggtatctgtaaaatgtcaaagttaagatgaagttatatctgtttggaatagcactttgccctaaatatcatttcttgaattttcaagcctaaagatgtttaaaaatatgaatagttacaaatattcttatacatattttttatcatgatcacaacaaaattttgtttatgtggttctgcaatataatttctgtgaagtattacaagtatttatgaaaaataagcatagtgatcagaaattttaaagattttgtataaaaacatttgggagatttgactttatacatgcatagatttgcattttactttcccttttgaggcagcatttttagaaaatcagtaagaaaaatgtacatcttaaggtctactattttacatttctacacagaattttagtgttaatgttccatgtgtctatactgtttatttcaaaactgagaaattcatgggaatgatgtattttgtggaatcaagaacaaaattatagtgggataattttacatcttaaatatttctttctactactgtaagctctactttggaattatctgagtagaaaatcagaagacattatctaactttgtagatacactgtatgattgggctttttgttcagattgtaatttcattaatagatgaaatatttatgctaatattttcttatttcaaaagcaaaataaaatgaatttattgtc

SEQ ID NO: 496 - DNA, 3741 bp, Homo sapiens
acgggaaattggaagaacaagaacccaatcgaaaattgaaagagttaaagtaaaaacagaatcccaagaccccacatcttcatggagatcacttattccagtcataaaggtcaatgtgagcacaggacgtttggcctttggaaatcactaccagccgcaaactctgtgcatcaactttgatgatgctttcttaacttatactacaaaaccaccttcaagtcatcttgaccaattcatgcatattgtgaaaggaaagcttgaaaatgttcgagtcatgcttgttcctagtccaagatatgttggtcttcaaaatgatgaaccaccgagattaatgggagaaggttttgtggtgatgcagtcaaatgatgttgacatctactactacatggatgagccaggacttgttccggaagaaacagaagaaaatattgaaggagaaatgagcagtgaggattgcaaattacaagacttgcctccatgttggggactggatatagtttgtggtaaaggaacagattttaattatggaccatgggccgataggcagagagattgtttgtggaagtttttctttccacctgactatcaagttctgaaagtttctgaaattgcacagcctgggagaccaagacagatccttgcttttgaattacgaatgaatattattgcagatgctacaattgatttgctgtttaccaaaaatagggaaacaaatgctgtacatgtaaatgtaggagctggctcatatttagaaattaatattccaatgacagttgaagaaaatggttacactcctgctattaagggacaactcttacatgtggatgccactaccagcatgcaatatcggacccttttagaagcagaaatgttagcattccacatcaatgccagctacccccgaatatggaacatgccgcagacatggcagtgtgaattagaggtttataaagccacttaccacttcatctttgcacagaaaaacttctttacagatttaattcaagactggtctagtgacagtcctccagacattttttcatttgttccatatacgtggaattttaaaatcatgtttcatcagtttgaaatgatttgggctgctaatcaacacaattggatcgactgttctactaaacaacaggaaaatgtgtatctggcagcctgtggagaaacactaaacattgatttttctttgccttttacggactttgttccagctacatgtaataccaagttctctttaagaggagaagatgttgatcttcatttgtttctaccagactgccaccctagtaaatattctttatttatgctggtaaaaaattgccatccaaataagatgattcatgatactggtattcctgctgagtgtcaaagtggccagaaaacagttaaaccaaaatggcgcaacgttactcaggaaaagtctggttgggttgaatgctggactgtcccaagtgtcatgcttacaattgattatacatggcatccaatttatccacaaaaagcagatgaacagctgaaacaatcattatcagaaatggaagagacaatgctatctgtattaaggccatcccagaagacatcagacagagttgtttcttctccctctacttcttcacgcccacctattgatccctcagaacttccacctgataaacttcatgtagaaatggaactttctccagattctcagataactctctatggacctctactaaatgcctttttgtgtataaaggaaaactactttggggaagatgacatgtatatggattttgaagaggttatctcaagtcctgttttgtcactgtcaacatcatccagctctgggtggactgctgttggaatggaaaatgacaaaaaggaaaatgaaggttcagccaagtcaattcatccacttgccttgcgtccttgggatattactgtacttgttaatttgtacaaagttcatgggcgtcttcctgttcatggaactactgatggtcctgaatgccctacagctttcttggaaagactatgttttgaaatgaaaaaaggatttagggagaccatgctgcaacctatcctgtcacccctgaatgtgtttgtcagtgataactatcagcgaccccctgtggatgaagtactcagggaaggtcacatcaatttgtcaggtctccagctgagagcacacgctatgttctcagcagaaggtcttccattgggaagcgattccttagaatacgcatggttaattgatgtgcaggctggaagtcttacagctaaggtcacagcaccacagctggcatgcctcttggagtggggacagacatttgtttttcatgtggtatgtcgggagtatgaactggaaagaccgaaatcagttataatatgtcagcatggaattgatcgtcggttctgtgaatccaagttgagttgtattcctgggccttgtccaacttcagatgatttgaaatatactatgattcgtttagcagtagatggagccgatatttacattgttgagcatggttgtgctacaaatataaagatgggtgcaattcgagttgcaaactgtaatctccacaatcaatcggttggggaaggaatcagtgctgcaattcaggattttcaagtgagacagtacattgagcaattaaataattgcagaattggacttcagcctgcagtgctacggagggcctattggcttgaagctgggtcagccaatttaggacttattactgttgatattgctttagctgctgaccatcattctaaacatgaggcacaaagacatttcttagaaactcatgatgccagaactaagaggttgtggtttttatggccagatgatatcctgaagaataagaggtgtagaaacaaatgtggttgtctcggtggctgcagattctttggtggcacagtaactggcctagatttcttcaaacttgaagagttgacaccttccagtagctctgcattttcaagcacaagtgcagagtctgatatgtattatggacagtctctgctacagcctggagaatggataattactaaagaaattcccaaaattatagatggtaatgtgaatggcatgaagaggaaagaatgggaaaacaaatcagtgggaatagaagtagagagaaaaactcagcaccttagtcttcaagtaccattacgatctcatagttcatcctcttcctcagaagagaacagtagttctagtgctgcacagcctttgttggctggtgaaaaggaaagtccttcatctgttgctgatgaccatttggttcaaaaagagttcttgcatgggacaaaaagagatgatggccaagcaagtatccctacagaaatttcaggaaacagccctgtgtctcctaatactcaggataagtcagtaggtcaatctcctcttagatctcccttgaaacgacaagcctctgtctgttccacccgtcttggaagtactaagagtcttactgctgctttctatggggacaagcagcctgtaacagttggagtccagtttagtagtgatgtctctcgaagtgatgagaatgtactagactcaccaaagcagaggagaagttttggttcattcccatatacaccatcagcagactctaattcatttcatcagtatcgatcaatggattccagcatgtcaatggctgatagtgaagcctacttttctgctgctgaggaatttgagcccattagcagtgatgaaggccctggaacttatccgggtag

SEQ ID NO: 497 - DNA, 4336 bp, Homo sapiens
gcagtggcttcgtcccgcggtgacggcggcggcggcggcggtagcagcggcggcggcggcggggactggcatcggggccccgagccgagcggagccggaccccgggcgagcgcgtctgcagccaccccagctcatacctctctgcctccccgctctcaaggagggtctgccgcatgtgatgaaagtgtctactctcagggaaagctcagccatggcttccccactgccccgggagatggaggaggagctggtgcctactggctctgagccaggtgacactcgggccaaaccccctgtcaagcccaaaccccgggccctgcctgccaagccagccctgcctgccaaacccagcctgctggtgcctgttgggcctcggcctccccggggtcccctggctgagttgccttctgccaggaagatgaacatgctggcaggaccccagccctatggtggcagcaagcgcccccttccctttgcaccaaggcctgcggttgaggcctccactggaggagaagccacccaagagactgggaaagaggaggctgggaaagaggagccaccccctttgacacccccagctcgatgtgcagccccagggggtgtacggaaggcccctgcccctttccgcccagcctcagagcgcttcgcggccaccacggtggaagagatcctggccaagatggagcagcctcggaaggaggtccttgccagccccgaccgcctgtggggttcccgcctcacctttaaccacgatggcagctcgcgatatggccccaggacctatggcacgaccactgctcccagggatgaggatggcagcaccctcttcaggggatggtcccaggaggggccagtaaagtctccagcagagtgccgggaagagcacagcaagacccctgaggagaggtgaagggtgggaggagccttccttccgacctggccttcaacggggacctggctaaggcagccagctcggagctacctgctgatatttccaagccctggattccctcaagtccagccccctcctcagagaatggaggccctgccagcccaggcctccccgcagaagcctcaggctcaggccctggctctccccatcttcacccgcctgataagagttctccctgccactcacagcttctggaagcccagactcctgaagcttcccaggcttctccctgccccgctgtgactccatcagctccaagtgcagccctgcctgacgagggctcccgccacacccccagcccggggctccctgccgagggggctccagaggcccccagacccagcagcccaccccctgaggtcttggagccccatagcctggatcagccccctgccacctcaccccggcccctgatcgaggtgggtgagttgctggatctcactcggacgtttccatctggcggggaggaggaggccaagggtgacgcacacctccgccccaccagcctggttcagcgccgattctctgaaggtgtgctccagtcacccagtcaggaccaggagaagctggggggctcgctggctgccctgccccaaggccaggggagccagttggccctggatcgtccctttggggcagagtccaactggagcttatcacagtccttcgaatggaccttccccacgaggccctcgggtctgggcgtgtggcggctggactccccgcctccctcccccatcactgaagccagtgaggccgccgaggctgctgaggctggcaacttggccgtttccagcagggaagaaggagtgtctcagcaggggcaaggggctgggtcagctccaagtgggtcaggaagttcctgggtgcagggggatgatccaagcatgtccctcacccagaagggcgatggggagagtcaacctcaattcccagctgttccccttgagcccctgcctacaactgagggcacacctggattacctttgcagcaggcagaggagagatacgagtcgcaggagcccttggctggacaggagtcccctctccccctggctaccagggaggcagccttgcccatcctggagccagtcctggggcaggagcagccagcagcccctgaccagccctgtgttctctttgctgatgcccctgagcctggacaggcactgcctgttgaggaggaggccgtgaccctagcccgggctgagaccacccaagccaggacagaggctcaagacttgtgtagggcatcccccgagcctccaggccctgaaagcagctcccgctggctggacgacctcctggcttcaccaccacccagtggtggcggtgcaaggcggggagctggagctgagctgaaggacacacagtccccaagtacctgctctgagggactccttggctggtcccagaaagatctgcagagtgaatttgggatcacaggagacccacagcccagcagtttcagtccttccagctggtgtcaaggtgcttctcaggactatggccttgggggtgcaagccctagaggagacccaggtctcggagagagggactggaccagcaagtatgggcaaggagcaggggaagggagcaccagggagtgggccagcaggtgtggcatcggccaggaggagatggaggccagcagcagccaagaccagagtaaagtgtctgccccaggggtgctcacagcccaggaccgggtagttggaaagccagcccagcttggcactcagcggagccaggaggcagatgttcaggactgggagttcagaaagagggattcccagggcacttactccagccgggatgcagaactccaggaccaggaattcggaaagagagattcactgggtacctacagtagtcgagatgtaagccttggggactgggaatttgggaagagagattctctgggtgcttatgccagccaagatgccaacgagcagggccaggatttggggaagagggaccaccatggtaggtacagcagccaggatgccgatgagcaggactgggagtttcagaagagagatgtgtcactcggcacctatggcagccgggctgcggagccacaggaacaggagtttgggaagagcgcttggataagggactacagcagtggtggcagctccaggacccttgacgcccaggacagaagctttggaacgagacccctgagctctgggttcagccccgaggaagcccagcaacaggatgaggaatttgagaagaagattccaagtgtggaagacagccttggagagggcagcagggatgctggccggccaggagagagaggatccgggggcttgttcagtcctagcactgcccacgtgccggatggggcactcgggcagagagaccagagcagctggcaaaacagtgatgctagccaggaggtgggagggcatcaggagagacagcaggcaggggctcagggccctggcagtgctgacctggaagatggggagatgggaaagcgaggctgggtcggtgagtttagcctcagtgttggcccccagcgagaggcagcatttagcccagggcagcaggactggagccgggacttctgcatcgaggccagtgagaggagctatcagtttggcatcattggcaacgacagagtgagtggtgctggctttagcccttctagcaagatggaaggtggtcactttgtgcctcctgggaagaccacagctggctcggtggactggactgaccagctgggtctcaggaacttggaagtgtccagctgtgtgggttctgggggctcgagcgaggccagggagagtgccgtgggacagatgggctggtcaggtggcctgagcttgagagacatgaacctgaccggctgtttggaaagtggagggtctgaagagccggggggaatcggagttggggagaaggactggacttctgatgttaatgtgaagagcaaagatttggctgaggtcggggagggaggaggccacagccaggccagagagagtggcgtggggcagactgactggtcaggtgtggaggccggagagttccttaaatcaagggagcgtctggggaggcacatttatgcactttgtatcaccctccgaactccccccacaccttcccttccctggatttcatcactagtggttgaaggttttgtcccttcctctcctccttccctctccctctctgcttcctcctccagcctcccttgggttttcttttgataccaatttatagcattttttataaaagcctttgatttttataatgggtgggactgtatccctgcctcaccccaggtctccgtctgccccgccaggtaccccacagagaccaatgacattttgccacttgaaacaataaataaagttttttgggaattgg

SEQ ID NO: 498 - DNA, 4996 bp, Homo sapiens
agtgctcgcccgcccgaccccggcggctcgcgcccgggagcgccgcagggtcgctagagtcggccgcgtcctttgtgtggcgctcaggctgcgccgcggggcggcgggacggaatgtgggcgctgcgggggcttttctctcctacccgaactgtgggaacaatggactgaaaggggaagatggattgaggggccgagcggggaagcgagctgcaccggggaatcatgacttctgcagccgagataaagaagccaccagtggcccccaagcccaagtttgttgtggcaaataataagccagccccacctcctattgcacctaaacccgacattgtgatttctagtgttccacagtcgacaaagaaaatgaaaccagcaatagccccaaaaccaaaagtcctgaagacctcacctgttcgagagattgggcagtcgccatcaaggaaaatcatgttgaacctggaagggcataaacaggaattagctgaaagcactgacaactttaattgtaaatatgaaggcaatcagagcaatgattatatttcaccaatgtgttcctgcagttctgagtgtatccataagctgggccatagagagaatttgtgtgtaaagcagcttgttttagagcccctggaaatgaatgaaaatttagaaaacagtaaaattgatgagactttgactataaaaactaggagtaaatgtgatttgtatggtgaaaaagccaagaaccagggtggggttgttttaaaggcaagcgttttagaagaggagctcaaagatgccttaatacaccaaatgccaccttttatttctgcacagaagcacaggcccacagacagcccagaaatgaatggtggctgtaattcaaatggacaattcagaattgaatttgcggatttgtcaccttccccatccagctttgaaaaagttcctgatcatcacagttgccacttacagcttcctagtgatgaatgtgaacattttgaaacttgccaggatgacagtgaaaaaagcaataattgctttcagtcatctgaactagaggctctggaaaatgggaaaaggagtactttaatatcttcagatggagttagtaagaaatcagaagtcaaagaccttggtcccttagaaattcatttagtaccatataccccaaaatttccaactcccaagcccagaaagacacgaactgctcgtctgttacgccaaaagtgtgtagatactcctagtgaaagcactgaagaaccggggaattcagacagtagctcttcctgtcttactgaaaatagtttgaaaatcaataaaatcagtgttctgcatcagaatgttttgtgtaagcaggaacaggtggataaaatgaagctaggaaataaaagtgaattgaatatggaatccaacagtgatgcacaggacttagtcaattcacagaaagccatgtgtaatgaaacaacttcctttgaaaaaatggcaccttcttttgataaagactctaatttgagttctgacagcacaactgtagatggttctagtatgtcgcttgctgtggacgaagggaccggttttataagatgtactgtatctatgagcctgcctaagcagctcaaattaacttgcaatgaacatttgcaatctgggagaaacctgggagtttctgcccctcaaatgcaaaaggaatctgttataaaagaggaaaattctctacgaattgtccccaaaaaacctcaaagacatagcttgcctgctacaggagtgcttaaaaaggctgcctccgaggagcttttggaaaaaagttcttatccttcaagtgaagaaaaaagttcagagaagagtctagaaagaaatcaccttcagcatttgtgtgcccaaaaccgtggtgtgtcatcctcctttgatatgcctaaacgggcttcagaaaagccagtgtggaagttacctcatcctattttacccttttcagggaacccagaattcttaaagtctgtcaccgtatcgtcaaacagtgagccttcaacagccctaaccaagcccagagcaaaatcgttatctgctatggatgtggaaaagtgcactaagccttgcaaagactctacaaagaaaaactcttttaaaaagttgctcagcatgaaactgtccatctgtttcatgaagagtgactttcaaaaattttggtccaagagtagccaactcggagacaccaccacaggccacctctccagtggggagcagaaggggattgaaagtgattggcaaggcttgttggtaggagaggagaagagaagtaaacccatcaaggcatattccacagaaaactatagcctggaatctcaaaagaagaggaagaagtctcggggccagaccagtgcagctaatggtctgagagctgagtctttggatgaccaaatgctctcccgggagtcatcatctcaggcaccttacaagtctgttacaagcctctgtgcaccggagtatgaaaatatacgccattatgaggaaataccagagtacgagaacttgccatttattatggctatacggaaaactcaagagttggaatggcagaattccagcagcatggaggacgctgatgcaaatgtgtatgaggtagaagagccatatgaagctccagatggccagctgcagcttggacccagacatcagcattccagttcaggagcatcccaggaggaacagaatgatcttggtcttggtgaccttccctctgatgaggaggaaatcatcaacagttctgatgaagatgatgtcagctctgagtcaagtaaaggagagcctgacccactggaagataaacaggatgaagataatggaatgaaaagtaaagttcatcatattgccaaggagatcatgagctcagagaaagtgtttgtggatgtgttaaaacttttgcatattgatttccgggatgcagtagctcatgcttccaggcaacttgggaaaccagtgattgaggaccggattctaaatcagatcctatactacttgcctcagctgtatgagctcaaccgggatctcttgaaggaactggaggaaagaatgttgcactggactgaacatcagagaattgctgatatctttgtaaagaagggaccatatctaaaaatgtattccacatacatcaaagaatttgataagaatatagccttgctggatgaacagtgcaagaaaaatccaggttttgctgctgttgttagagaatttgagatgagccctcgctgtgctaatctggccctcaagcactacctgctcaagccggttcagaggatcccccagtacaggctgttgctgacagattatttgaagaatctcatagaagatgctggagattacagagacactcaagatgcccttgctgttgttatagaggtagccaaccacgccaatgacaccatgaagcaaggagacaactttcagaaacttatgcaaattcagtacagcttaaatggacaccatgaaattgtgcagcctggtcgggtttttctcaaagaaggaattctgatgaagctgtctcggaaagtgatgcaacctcgaatgtttttcctgtttaatgatgccctgctgtatacaacaccagtgcagtctgggatgtataaactgaacaacatgctctcactggctggaatgaaggtcagaaaacctacccaagaagcctatcagaatgaattaaagattgaaagtgtagaacgttccttcattctctcagccagttctgccacagaaagggatgaatggctagaagcgatttccagggcaatagaagagtatgccaagaaaagaatcaccttctgtcctagtaggagtcttgatgaggcagactcagaaaataaagaagaagttagtcctcttggatcgaaggctcccatctggattcctgataccagagccacaatgtgtatgatctgcacaagcgaattcactctcacctggagacgacaccactgccgggcctgtggaaagattgtatgccaagcttgttcgtctaataagtatggcttagattacctgaaaaatcaaccagcaagagtatgtgaacattgtttccaagaactgcagaaattagatcaccagcactcccctaggattggatctcctggaaatcacaaatctccttcaagtgccttatcatcagtcttacatagcattccatcagggaggaaacagaaaaaaatcccagctgctctcaaagaagtatcagcaaacacagaggattcttctatgagtggctacttgtacagatcaaagggcaataaaaaaccctggaaacacttttggtttgtcataaaaaataaagtactatatacatatgctgcaagtgaggacgtggccgctttggagagtcagcctttattaggattcactgttattcaagttaaagatgagaattccgagtctaaagtatttcagttactgcacaaaaacatgttattttatgtattcaaagcagaggatgctcattcggctcagaagtggatagaagcatttcaggaaggcacaatattgtagcagtattggtttcatctcttctgtgattccaaagaggtggaatttcatcagaatggagtaaatgcaattcaaaaattgtataaaaatgaacactgccaagataaagccaaccagacccttcatcaaagaaattgttttgttaggtataagcaatttttaaaaggtgtttgttttttcatttatgttatttattaaaattttgatgtttacttaatggtcagaattatttctgagacacactgaattctaaagtaccatttctttagagaccagaaaaactatcttaatactgtatactgtattaactattcgtgacatagttcacactgttttcttaccttacattgtaacaatcttactggtggaaagtctttgtaaggaaaaaacacatagcaaggagcaaatttccacaaagtgcttggtttaggaattgtgattattataaaactgctgatgaaaaaaatgcatgtctttgaatc

SEQ ID NO: 499 - DNA, 3922 bp, Homo sapiens
tgtgctgttttggcttttggttgtatgaggcaaagacccactccagccagcttgggaaggagtttggtgagtgggaacatgtatagtgtgataggaatcacacaggaatccgggaattcgagctgggatgggctgagctccagagcctggtagtggagggaggttcctggctgctctgggggcctcagccacagtttttctctaggattttgccctgtgggactgtgcctggctccatgtgctggagccttctaccccgccaccagccggctgctttgctcactcctagttttccatgtggcttcagctcgaggacgtgcttagctgtctgaaagccctctggccccagttcaactctgtggcatttcttgttgcattctttcagtttctaagtgaccaattcctgtcacatttcatagttcacatccttgagagaaacttgatctagttcattccccaccccgacccctgccctggtcctgggtttgaggatattggctagcctgtggattgtttgccttaggtgggaggcctgacccttgttcagtgagctgggctggtggagctggggaggaggcagtgggggtggtaggcagtgggcatcgccaggtaaagtagagtggctgcccacggcccggggtggacacagggcagagagttgggcagggtgggggatgttctccaaaacacttgagtgtggcttaaaaagttcatgcaaccctgatagtttgaggcaaaggctggtttctttgccaaacgttagatttaataaaagaggaggtgtttggattgtttaacgttcagacttccttatttcccttacttcactattttcaaaattgtgacgtttaccttgccagttcatgcaggactttacagaagaactcgaaattcaaattctgagctgccaccaagtttttacaattaaaccattttaaaactattgttctgaggtagtggttaatttcccttctttttctttctttcttctccttttttttcttttttttatgatttaaaacttactagttagaaacttttttttttgcctcaccagcttcaggaaattttcttttgaattgttagaataacaaacaaacaaacacacagacgcacgcacacgcacgtatattcttccaccctgtagtataaagaaaacatttttaaatccgaaaatgaaatatgttacctttttccttccaaaagtagactgtgagtgatgtttgtgtggtgtcctttgcccccatttcttactgtagttttatggtataaagtcctcagtatttgcttaattttttttgtcattgaggaaaactaacagtaaaatgagttaacctgaaaatgcccttttcagttcagcattcagagtgaggaaagaggtatatatgcagttaaggtgagaacggaaccgtagcttccgccggcgggcttgtgagcacgtcagaaagcgaatgtgcctcactagaacgcacggtggcggcaggagtggccggcagtgcccggcacgcagtcacgggaggtgggtcgagtcctggtttatgtgagtcctgtgaggtgagagagtgggagaaaacgcctcactcaacttaatgcctttgtttgtttgttttaaccaagagtttacttgtaatttagtattgccggaaaattgttcaggtaaaaagtgcctagtataaataggtacacagtcaggtcagatatgttaattgcatctcacttgatttaatgaaaatttaccatttgttttgaggtcagtaccattaaaaaaaaaaacatgttaaagttctcattaactcgcttgagtggtatttacataagcaaaattgaagtggaggtttttcagtaggcatttgcatggtgttgttttgttagatatcagcccagaaacagaatgtcagagctttcagcgagttggagcaatcacctagctcaaccctcccttggagggcggggaatctgagactccgaggtggtgaaacttacacaggtagtgccgagatctgattctcgagtttagtgttcttttctcatactatgcttcttccttctacccagggatgtgtacctgaaacattttatgaaagagaaatcaaaacttcttggccacacacaaacgaaagcctcacacctgacaaggaaggcgcaccagggaaccttctggggggatggttgcagatgtcctgtgttttgacaaaggtgtgggggactcattttttaaattgagttataatttacatacaatgaagtggtcacatgtcaggtgtacagtttgatcagttttaaccaaagggctgctcttcctggcttgcggggaggagaaattaatcagtgaaggacactgattgattgtgccttaaagggtttaagatctcacgggagcatagtgatatgatcccacagattaggaacttagaatgggatgtataattctagggtgcttgagttgaagtgtttctttttgaaatttctaagataaagcacaaactttaaaagttaaacattgtcaagtgcatctccccctccccctgcatgttaatggttccttaataaaggcttcaaagggaaaatgaaggaggcgggaggccacctagtgtaggagggcagggtgggagaggtcaaggtcaggagcccttaaggagagttgtgggagagagggaagaacatgagaggccaccttctgaacccgatttttgtggtgacagccgcaggcgagatagtggcttggactctggtctttcttctgctgaggacagctgtcctcattgtgaccagtgggaacacacgatagaagaggctccattagctcctgtgcatcccaggagttgccaccctgtccagtgccgtttctgtctgggcttatttccattacacagcagatgtggtcacctcattctttgctctctcctttccttgccctcatcccagtttcactgtgccctaggagtgctggctttctccaggaaccccttcagtgtctctgtcccttcagcagacacaccctttagactgtgccttcaggaaccaaggcacctggttctgtccctgtctgtcccagcactgccatcgttgcagcgtaagcccctccctttgcagggaaagaccaggggtcccttgttcctttgcgcactcacatctttcatcccttaggtcactttgtgctcccctgccacacactttccattgtgtgtgtcctgtgttgaaggctttcctgttatccatcctcgcacgtctcagctcctgtgcttttttcggcaaggccatttgtggctgtgttctgcctggtccgtttaaccttatttcataattatgcacacttcccagcttgaacttgaacatttgtttctgtcttgttcccgttggcccggacacacagtgctgtttcctgccccctcttttcttttttcttttcagacttctttgcctcagatgtttgccattccccatctgtctctccagatcttacccatcttgtccttccacacgtccccgatgcctctgaagatgccattcatgtttctctcccttccccgggacacattcttaatgttggagttggtgttaggtactttcacttgcaatgggagtttctttattcacaaagcctcttgagtgttgctctcatactattttgtgtgtccttccagggcagtgaccttgacagttatttgtcttgttctcccaagcgcgggtgctaaggacatagtctgtgggcatgcagatgtgtgtgacttgttcacacgaactgtgaggatgaggacttggtgaatggtggaaattcagatccaaactgtatctccagggcatgatggcgcctgtctgtagtgcagttacttgagaacttgggagggtgagttgggaggatttcttgaggttccaggagttcgagaccaacttgggcaacatagcaagatcctgtctctat

SEQ ID NO: 500 - DNA, 3614 bp, Homo sapiens
ctttttctcagtggctctagttgggctccatgtatgcctttgaactaattcctgtagataaggagattagaaccagggagcatgtgggcctgccactgctgcagctgtcttaacaccaaaaagagaacctagacctactgaggtcaccacatactacttgagaatgaagccaacagaacagtagcaaggggcatgatggagcaaaaccagctcctcttgcatcatgtgagcccgttaatctggctatgcctaaagtgagttaacctggtatattagtctattctcacactgctagaaagaactgcctgagactgggtaatttgtaaaggaaagaggttcaattcactcagttccgcatggcctcaggaaatttacaaccatggcagaaggcacgagagaagcaaaggcaggtcttacatggcggcaggcaagagacagtgaaggaggaagagccccttataaaaccatcagatctcatgagaactcacaatcatgagaccagcatgggggaaactgcttccacaatgcaatcacctcctaccaggtcccacccttgacacatgcaaattatggggattacctttcaattgatgagatttgcgtggagacacagagccaaaccatatcattctgcccctggcccctcccaaatatcatgtcttttcacatttcaacatgccttcccaacagtcgcccagaatcttaacccattttggcattagctcaaaagtccacagtccaaagtctcatctgagacaaggcaagtcccttctacctatgagcctgtaaaataaaaagcaagttagttaattccaagttgcagtgggagtacaggcactgggtcaatgttcctattccaaatgggagaaattggccaaaacaaaggggctacaggccccatgccagtctgaaaccaggcggtgcagttattaaatcttaaagctccgaaatcatcttctttaactctatgtctcaagttcaggtcatgctgatgcaggaggtgggctcccactgtctggggcagttctgcccctgtggctttgcaggctacagctcccctcccaactgctttcatggctggagttgagtgtctgctttcatggcacacagtgcaagctgtcagtggatctaccattctgaagtctagaggaccatagccctcttctcacagctccattaggcagtgtcccagtggtgactctgtgttgggagctccaacccccatttcccttccgcactgccctaacagaggttcttcatgagggctctgccccttcatcacacctcttgcctggacatccaggcatttccgtacatctactgaaatctaggcagaggttcccaaatcttcatttttgtcttctgcacacccacaggacgaacaccatgtggaagctgccaaggcttggggcttacaccttccgaagcaacagcttgagctataccttggccccttttagctacagctggagtggctgggacgcagggcaccaagtccctaggctgtacacagcagggagtccagtgccttgtccaagaaaccgtttttccctcctagacctctgggcctgtgatgggaggggctaccgccaagatctctgtcatgccctgaagacattttccccattgtcctggctcctccttacttctgcaaatttctgcagctggcttgaatttctccccagaaaatgggtttttcttttctacagcatcatcaggctgcaaatttttcaaacctttttgctctgcttcccttttaaacataatttctaatttcagatcatcacactcaagtttaaagttccacagatctctagggcaggggcaaaattctgctagtctctttgctaaagcatagcaagagtgacctttgcttcagttctcgataagttcctcatctccatctgacctggacttcattgtccaaatcattattagcattttggccaaaaccattcaacaagtctctaggaagttccagagtttcccacatctttcttctgagtcctccaagtctctagtaagttccaaactttctgacatcttcctgttttcttctgagccctccaaactgttccagctctatctgttacccaattacaaagttgcttccacattttcgggtatctttatagcagtaccccactctctgcagtaccaatttactgcattagtctgttctcacattgttataaagaactacccaagactgggtgatttataaaggagagaggtttaatggactcacagttctgtatggcttgggaggcaacaggaaacttaaaatcatggtggaaggggagagagaagcaaaggtatatcttacatggcagcaagcaagagagagtgaatgagcaaaggaggaaaatccccttataaaaccatcagatctcgtgagaatcattcactatcacgaaaacagcatgagggaactgctcccatgatccagtcacctcccaatcaccacccttaacaattgggaattatggggattacaatttgagataagatttgggtggggacacagaaccaaaccatatcagctggtgattttgcagctcttcagattcataaattaccctttgacgtaagctgatttgggttggatttgtatcacttaaagtgaatactgatttattagaccaagcaaaaaagaggaaagaatactggataaggaagggagtgggggttttatttgtttgtttgttttcctgagctcatcttatgtcactttggttgtgtgcctaacagtttcactcccttgtaatacatcagacttccagtcaagaaccatttggcatacccctacccaggcacatagagctctcactaaattataaacccgaagctgttaattcttctcaaagcttatctctccttacagagttatggaagggaaatggaggtgaaatcacatcctcaggcttaattccctctttcaagattgcctgtggtccctcctggatgatgctttcttttccagcatcacttccctgttcctatcctcccccaggcttgcagaccaactgtaacaatctaatcacccatcctggaacttttcatgtgccttttcttttttttttttttttttccatgactgtttacattgcctctctctttggcctcctcttactgtccttgtctactgtgtttattacagtttgcacaatgctcaactcaagtatcactaagttaagcctctttcaatactattgaggcataaagaatggctccgtcacctgtacatactctcattgtacttgtttccatgccactgatataatatctgtcatgagaatgaccatctctcttgcttttcccaggacaggggggttcccaggatgctggatattcatttttaaaaccaggaaagtcttgatcaagccaggagaaatttgttgccttgccttctacattgtaatagctctcatttaacatgccactcggtgcaatggaatttcattgagacagtgaagccccaggtctcagagagcaagctgtagccagaggtaccagcttcgcctggggcttcaagaacctcccatctatccccattcctgagacaggagttacagtcccttttggccctcacatccaataaagagactgatacc

SEQ ID NO: 501 - DNA, 3647 bp, Homo sapiens
taaaaaaaaaaaaaaagaagagcaaagcagagctctgagcagcttcctgccccagcatccctggttctgctgctttcttcttcccaggcagccgtgtcacacagacctgcagctgagatgggtgccatctccctgggttgcttctgcagaggaggcctctcctccccagtggagcctcctacctgccggctattgactgagtgtccagctgaggacagcatccctgcagtgcatttcttgcccactgatgtgatgtgttcatgactcccagcctctctgtttgctctgccactaatacaaggaggtgccccagcctctgggcccctgcagctgtgccagcggatggtgctgttttgtattccttaatttgtgcagcaccagctgcgtgcaggcactgtgcttggcaccggggctgtaataggacccagacagatgcgtgcctgccctggccaggctcatgctctgcaggtggggtcagaggtcaacatgcagtagaggaaaggacagcagatggggtgcacaggcaggctgtggttttatacggggcgatcagggaggcaccccagagaagggaacacaggcctgcaggaaatgaggtgtggagtgggcagcaggaagggcagtccagggggcagtggggcacaggcctggtgtgtacaggccagaaaggaaaggcaggtggccgtgtgaagccgcaaggggtgggggggagtggggaggcactggccgggtcttgcttcttgcagcaaagcatgctttgggcctacccaggtccctgccacctggggtcccaatgcccctacctgccctggagggaccggccccaccagccctctgttccttgcagctgtgccataagtaacgtgaagaaggtgtccctggaactgggcgggaagtcacccctcatcatctttgctgactgtgacctcaacaaggctgtgcagatggggatgagttctgttttcttcaacaaaggagagaattgcattgcagcaggccgactctttgtggaggactccattcatgatgagttcgtgcggagagtggtagaagaggtgcggaagatgaaggtgggcaacccgctggacagggacaccgaccacgggccgcagaatcaccatgcccaccttgtgaagctgatggagtactgccagcatggcgtgaaggaaggggccacactggtctgcggcgggaatcaggtccctcggccagggttcttctttgagccaactgttttcacagacgtggaagaccacatgttcatagccaaggaggagtccttcgggcctgtcatgatcatctctcggtttgctgatggggacttggatgccgtgctgtctcgggccaatgccacggaatttggcctggcttctggtgtcttcaccagggacatcaacaaggccctgtatgtcagtgacaagctccaggcaggcactgtgtttgtcaacacgtacaacaagaccgacgtggccgctcccttcggaggattcgaacagtctggatttggcaaagatctaggtaacctactcctgcctgtggggttgctttcatttattcattcaacaaacatctgttcaaaaccacttagggccaggtcctatctcagatgcagggacgtagccttgaacatgatggctgtcagggttcgcttcttactgggagggaacttgtgacaagtccgtgagcaagatgcttgcagaggggtgtcgtgctgggaagaaggcaagaagaggggcctggaggagacactcccgccaggaggcactgggggcctctctggtgtggtggcacctgtgctacccagacctgcatagcagggaggagttggccgtgaagacccaggggcccgtgtttctggctgagggttcagcaggtccttgggggaaccagctttggtcgtggagctgcagagaggccagagtggtgggagtgggccaagggggagcaggagggaggagagagggcctgagaggcaggtaggggccagattgaaggcccatgggccatggtcaggggctcaggttgcatccttagtgtaaagaggagccatgggaccaaatgtacccccgggtgaacaccacgggtgttgcaagtctcccagtagaggtgaagttactcaggcggcagcaggcggggtcccccggcacacagcacaggctccccagtgctctgcctgctgggtggcgtggagttctgctccggccctctctccctgggctgctccaagccttgggcctcgtcctgctctctcagcaggggggactagacaggtctgatgggcaagcttggcaggggtggctggcaaggtccggggaagccatatgctgtctcagaggtcccacctgtctctccgggctcctgtgccagcccggagaccacagggaaggtcatgctgaggctgggggtcaaaggctggtcactgtttccagttttctctcctccccctgcccccatctttcaagccctgcagaagcccccaagggtacccatgagaggggcccatgtgtgcccacagggctggactcacatgcacgcatgtgtaggctggacactcctgcttcctctgtccctgtcggcctcctcttcctgccttctcccaggccaccttcctggtgtccaccaggggaatccatggggcccatggccacccagggaaggctgtggctgccaagtccccaggacgtgatctgggccccttatgaatcctgcccgagttcccccagctccctcctaaccctagtccccatgtcctgctgagaggaccagcaccctcctgggacaggcccacaagccaagccttccaagcagcctgcctgggcagactcaggacctcagagggacggggcagtgccactcctggggccagccagagctgctggggagctgtcaggcagccccaggcctcacacttgtcatggggctgagatgcaccagccacatggcactgccaaggcctggggcctcagggccctgtgaggcatccccttttcccagccacagcttgatgcagacgtggctgggggcagccatgagagaagagatgggccagtgagtctgggcagtaacgccaagtctctccacccccttccacctgaaggggcttcccactgtccagacaaggcggtgggagctggggaagattcttaaatggctgcctcagattggctttgtattctggggagtcctggcccgctatccactgccagggataacctgggtaagattcatgacctcgctgggcctcgacttctcacctggaagtggggtgagccagagctgcccccacgtggttgctgaggaataagacacttgcagccccgagcagtgccctgcctgtggtgggagctgctgtgacctttgtggtgtcttacaggagaggcggctctgaacgagtacctgcgggtcaagacagtgaccttcgaatactgaagaaaggtctttgtgagaagaaagtccctgcccctccctcgtggctggggccccctccctcttgagcctgggtgcacagcacctcccacctggggggctagtggaagccctcctgcctgcacaccatgtctgcatcttggacgccctctgtccagtcaggagcagcccttggctgggtgaggtgtgcccctcccagggagaataaagcttctgaagag

SEQ ID NO: 502 - DNA, 3647 bp, Homo sapiens
ttttggtagagacggggtttcactatgttggccaggctggtcttcaactcctgactcagctgatccacccgccttggcctcccaatatgttgagattacaggcgtgagccactgtgcctggccttatatatttattaaataacgtatgaagtaatcttttgtatagtttcctaaaataacctatactatagttttgcatgttgtaaaatttttaataaatgctattatactatatgtatcctgcaattattttatcattatgtttttgagacttaatgtatattagtacatgaagttttagctcacttatttttactgctaatacagtagttaatatttaattgtataaatgtaccataagaatttttttccattttcctacttgagaacatttagtaatttgcaaatgttagctcttacaacaatgttgccacagacattactggaaatgtcttcttgcacgcatatgctagggtatacagtgaagggtagagttgctgactcatgctgtttcagaattgctgagtcattacgttttagctttggtgaaaagtgatttcataaattagtttgggaatcacttcagtgtgcctagagattaatctgaaacatttaggcgctatcctaatttacttacacatatatgcccaagtcatcatcagtacccacatgggaaattggtactgtggtgactatccacagttttaaggaaggaaacagagattgaagaaggtgcttacaaacatagaactgctagaggtggagcccagaatgtcagtttgagagaaaacagttaattcctcgaaagaatgtatgatatagatggagtttagagttcgcttttgaatttagcagggtgctaagtcgacagaagggcacagagggaaagaacatttctgatttgctttcttttttcctttactggttttcacacatgaagaacaagttggatgaactcaacaaacggcttcatacaaaagggtctacagaagctgaaaccaggaaattcagaggcagcagaaatgaaaacaaggaaaacattaatggaaattttgaacctagaaaaggtttggtttgagttttgaaggaaagtctgggttgttttactgcccctaagtactactgttacgatttgctggtgttttatttgtttattatatttcatttatttaatattgtcagattatgttctaatccttaggggtgggtccccaaatttggcagcttaactaaggcttctacatttactgcaatgctggagcagccgaactacccagaacaggcttgtgttgtaatagtgtgggccgctttgtctcaaatccgcagttctatctgggagggtcttgcaaagtattctatgaagacttttctccattacttgcatagaatggtaagactttaattaaagcaacatgtatacattatttaataagtgtttttcagaactgattttctctagtagaaaaaatagtacaagaatttatttttttttaaatttatcacttaaggaattgtgaattgcctaagcctcagtctctaaatattttggtctgtagggccccacatttccaagaatctgtggaagttttgactttagcctatccaaagtgggcagatcaagctccaggtatttattgcagagtgtggaatgaagattttcatactgaactcccatctcttcttccgcaaagagtaaagcttcagacctttttttttcctaagaagagagctttcctttggaggtctgaatctgcactgggggtcttcattgagttctttggtaactgatgaacttccctcttctgtacttagaagaccctcttgaatgcccacttattttatctatacatgttcctttaagttcttacctaaagacttttcctctgtatgacaaagctgcttactttaaatgctcattactactcactttttatgctgaaggaatgcatatttgagttgctgtatgcatataatgatcaatgtgtgccttcttcttaattaaatcattggtgtacctgataagcctcttcaggggtcaaaataattaattctacagaaatccaatcctattggctttccattcagctgaatcatttcaaaatttattacataatgtttcctttatatacaaattgtaaattctttacaactaaaaaaagcattctgtaaatacagcatttacattatggttttgataactgtaaagcttgacccatggttaggtgatcagatcaaccacaaaagtgttaggaaaactagcttgattaaattaaggagaaggtgctatattaataataagtaagctagccattttaggtaacttgactcttccaacatttctttaacatttgatgtaaaatttaatatgcacctaacacagtttattttttttcttttttagagagacacctcctctatgggcgacctgcagtgctttatcggactagatatgatatcttatatcacactgactttgaaagtggttatagtgaaatattcctaatgccactctggacatcatatactgtttccaaacaggctgaggtttccagcgttcctgaccatctgaccagttgcgtccggcctgatgtccgtgtttctccgagtttcagtcagaactgtttggcctacaaaaatgataagcagatgtcctacggattcctctttcctccttatctgagctcttcaccagaggctaaatatgatgcattccttgtaaccaatatggttccaatgtatcctgctttcaaacgggtctggaattatttccaaagggtattggtgaagaaatatgcttcggaaagaaatggagttaacgtgataagtggaccaatcttcgactatgactatgatggcttacatgtcacagaagacaaaataaaacagtacgtggaaggcagttccattcctgttccaactcactactacagcatcatcaccagctgtctggatttcactcagcctgccgacaagtgtgacggccctctctctgtgtcctccttcatcctgcctcaccggcctgacaacgaggagagctgcaatagctcagaggacgaatcaaaatgggtagaagaactcatgaagatgcacacagctagggtgcgtgacattgaacatctcaccagcctggacttcttccgaaagaccagccgcagctacccagaaatcctgacactcaagacatacctgcatacatatgagagcgagatttaactttctgagcatctgcagtacagtcttatcaactggttgtatatttttatattgtttttgtatttattaatttgaaaccaggacattaaaaatgttagtattttaatcctgtaccaaatctgacatattatggctgaatgactccactgtttttctctaatgcttgatttaggtagccttgtgttctgagtagagcttgtaataaatactgcagcttgagtttttagtggaagcttctaaatggtgctgcagatttgatatttgcattgaggaaatattaattttccaatgcacagttgccacatttagtcctgtactgtatggaaacactgattttgtaaagttgcctttatttgctgttaactgttaactatgacagatatatttaagccttataaaccaatcttaaacataataaatcacacattcagttt

SEQ ID NO: 503 - DNA, 1937 bp, Homo sapiens
gatgcaaccaggcggccctcagccgtgcgcttcctcagctcctttctccagggccgccggcactccacctcagacccagtactgcggctgcagcaggcccggcggggctctggcttgggctccggctctgccacgaagctgctgtcctcgtcctctctccaggtgatggtggctgtttcctcagtcagccatgcagagggaaacccaactttccccgaaagaaaaagaaatttagaacgtccaacaccaaagtacacaaaagtaggggagcgtttacggcatgtcattcctggacacatggcatgttccatggcgtgtggcggtagagcttgcaagtatgagaacccagcccgctggagtgagcaggagcaagccattaagggggtttactcatcctgggtcactgataatatactggccatggcccgcccatcctctgagctcctggagaagtaccacatcattgatcagttcctcagccatggcataaaaacaataatcaacctccagcgccctggtgagcatgctagctgtgggaaccctctggaacaagaaagtggcttcacataccttcctgaggctttcatggaggctggcatttacttctacaatctcggatggaaggattatggtgtagcgtctcttactactatcctagatatggtgaaggtgatgacatttgccttacaggaaggaaaagtagctatccattgtcatgcagggcttggtcgaacaggtgttttaatagcctgttacttagtttttgcaacgagaatgactgctgaccaagcaattatatttgtgcgggcaaagcgacccaattccatacaaaccagaggacagctcctctgtgtaagggaatttactcagtttctaactcctctccgcaatatattctcttgctgtgatcccaaagcacatgctgtcaccttacctcaatatctaattcgccagcgtcatctgcttcatggttatgaggcacgacttctgaaacacgtgccaaaaattatccacctagtttgcaaattgctgctggacttagcggagaacaggccagtgatgatgaaggatgtgtccgaaggacctggtctctctgctgaaatagaaaagacaatgtctgagatggtcaccatgcagctggataaagagttactgaggcatgacagtgatgtgtccaacccgcctaaccccactgcagtggcagcagattttgacaatcgaggcatgattttctccaatgagcaacagtttgaccctctttggaaaaggcggaatgttgagtgccttcaacccctgactcatctgaaaaggcggctcagctacagtgactcagatttaaagagggccgagaacctcctggagcaaggggagactccacagacagtgcctgcccagatcttggttggccacaagcccaggcagcagaagctcataagccattgttacatcccacagtctccagaaccagacttacacaaggaagccttggttcgcagcacactttctttctggagtcagtcaaagtttggaggcctggaaggactcaaagataatgggtcaccaattttccatggaaggatcattccaaaggaagcacagcagagtggagctttctctgcagatgtttcaggctcacacagccctggggagccagtttcacccagctttgcaaatgtccataaggatccaaaccctgctcaccagcaagtgtctcactgtcagtgtaaaactcatggtgttgggagccctggctctgtcaggcagaacagcaggacaccccgaagccctctggactgtggctccagtcccaaagcacagttcttggttgaacatgaaacccaggacagtaaagatctgtctgaagcagcttcacactctgcattacagtctgaattgagtgctgaggcaagaagaatactggcggccaaagccctagc

SEQ ID NO: 504 - DNA, 2229 bp, Homo sapiens
atggtgatttgccatgctcccctagaagtttgtgggccttttttttttttcctttttttcttttcttttggtggcggggggacagaatctcgctctgtcacacaggctggagtgcagtggcatgttctcggctcactgcaacctctgcctcctgggttcaagcaattcttctgcctcatcctcctgagtagctgggactacaggtgcatgccaccacacctggctaatttttgtatttttagtagagacggggtttcaccatattggccagactggtctcgaaatcctgacctggtgatctgcccacctcggcctcccaaagtgctgggattacaggtgtgagtcaccgtgcctggccctgttgttgttgtttttaacccaacaaatgccttttgaggattatgtgtcaggtacttttctattgctggggatacagcagagaaccaaagtccctgctctcctgaagttaatactctagtgagctgagacaggtaattttaaacatgcacaggactggaggtaataaatgaagcaggcaggggataacgaggagtggggatgtggtagcagtatgtccaacaaactaggaagctttactatccaactatgtatttgccttttttgttttttcctgagacagtcttgctctgttgcccaggctagagtgcagtgctatgatctcaacttactgcaacctctgcctcctgggttcacgcaattctcctgcctcagcctcccaagtagctgggattacaggtgtgtcaccatgcccggctaatttttgtatttttagtaaagacagggttttgccatgatggccaggctggtctcgatctcctgacctcaagtgatctgcctgccttggcttccctaagtgttgggattacaggcaggagccactgcacccggcctccatctgtgtatttgaatgcaaagtcagtgcttttttgctgtgcaatactaaaggataggatagcattatttcaaccataaagaaccacatgattaaaggcactattactactattattaagagacttaaatcctcaacacctcttgcacagattgctccaaggctttcctgaccgagtttccctgaccttgggctctcccctctccatgaagcttttgtacaaggattgtttcagcatgaaacaattgagcccattgcctttgccctgggtcttgtgtttcctgtggaagccatctaaactcagtgtgctcagctttgcttctcctcccagtacaaagccctcccagcaagccggactggtatgctccctgattcgcgtgtccaccagctccactccagcgtgtactttctaccttcctgttaatgcagagtgccgatcctgtcctttgaacaatccaacttgggaggtaccttggattaactagagcccaactctccctttctagatgatgggaagacatacagagtaaagaacctgctctgaattccattacacaatgagatgatcttcagcttctccaaccaacctgaagcccgtgtcctctggcgtctggtactcagatgtcacgaagcacgccattggactaagatggtggtttcgcatagtgccaagcacctaacaggcatcactatatacttgctgatgtgtgaattctgttttactccagtgattcagctctgccaggccattgtttcacttacctgcctcctgaaactctgcaagacttggtagaaaatgaatcatcaatttgacttgttgtttcttcaaaactttgactgtgaccttgaaactgtggttctgaaaacaagtgaatctttgaaaaagtaaacagaaacacataaaattattttcctaaacacattaactaatttagcctttgaaatgatgacctaaacatgacctgctgacttttgttacagtaaactggtacgaattttagaaatcctttaattttccatgtctacattcatgatcaattagaaacatgttagctgcaccattcgtgactatttatttaattcagagacatcaaagtaaaatgcaacaacaaaggtaactttctatagaacaccctgttgtgaagctgtgaggtattttaaagctttattgtggtcagaaatcattgttcatcagttctgacattaacgacaaacagtattttggaaagacatagtgtagtttccttccttctcaatggaagacacttgctgacttatcggaatcctgtgaatgccaataaaggaggctatagtgg

SEQ ID NO: 505 - DNA, 3331 bp, Homo sapiens
aagctgcggcggcgcaggagggggcgggttcagcgagggcgcagcctctgagggggggcgcaggacacgcatcccccgcgatcgcccgggccactcgggagcctcgcggcagcccggcgccccacttggccatccgctccttgcccgcctcctcttgtcacctcccgtctcatccttctcgctccttccccgccgcatacaccggcatccgagtgcctcagagagccggaggtggtgtgcggggctgcagggcacgacttcaagcggtcctcagctccgcactagggggcacgggcaacagcatggacaccaagcgctgcttcgccaatcgcttcgatgactaccagggcagcctgctggcgggccagtgtgaggaggcggtggcgcccttggtcaccgccaccatcgagcgcatcctccaggagcttcccccactcgggggcggcgcggaggcccgaggggcgacggcgggggctagcgcctgccagggggggctttatggcggcgtggccggagtggcgtatatgctctaccacgtctcgcagagcccgcttttcgccacggcccgggaacgctacctgcgctcggctaagcgcctcatcgacgcgtgcgcccgcgctgaggagtggggcgaaccggacgccgacacccgcgccgccttcctgctcgggggcgcgggcgtgtacgccgtggccacgctcgtataccacgccctgggccggtccgactacgtgcagccgctgggcaagttccgggctctgtgtgccgtctgcgcgccggtctccttcctggagtgcggctccgacgagctgttcgtgggccgcgcgggttacctgtgtgccgcgctggtgctcaagcagaaactcgcccaggaggtgctgactccagcacagatcaagtcaatttgtcaggcaattctggactctgggaagcagtatgccataaagaagaggaaaccattccccctgatgtattcttactatggaaccgaatacttgggggcagctcacggcttgtcgtctattcttcagatgcttctttcttaccatgagcatctcaagccctcagatcgggaattggtatggcagagcgtggactttctcatggaacaggaacaaaactgcaactggccacctgagctcggcgagaccatcgagagagagaatgagctggtgcactggtgccatggcgctccaggaattgcctatctgtttgccaaagcttatctggtttccaagaaaccgcagtacctggacacatgtattcggtgtggggaactcacatggcagaaaggcctgctaaagaaggggcctgggatttgccatggagtagccggcagtgcctatgtcttcctgctgctgtaccggctcacgggaaactctaaatacatctaccgagctcaaagttcattccctgtaaacttgataaagatggaacatctgctgtataccagacaacattgcttttaatagatattacctctgactggtttgctcaattcttatttaccgaggaattcaaggccggttctcgggtccttgaaagtatatacagcttgtatgaaggcttctctgggacagtgtgctttctgattgacctgctgcagcccaatcaggctgaattcccactcttcagcgtctttgtttagaaggctctatcttccactgtggccctgcagagatcccctgagccaagccgaggcagtttccacataagccacattcaatggtatcgcaaccatgagccttaacattgccatcagaaggaaggaatcaggcaggtgaaggcaacatgatgccagatttgagaaaggatctgcaaaataaagataccacaattcatcttaaaactgcagagatttaatgtgccagggaatagatgtgaaacaagggatcataggaaaaggggaaagagaaatgatctgtttttcagttatgacatagaaaaccaaactgcaagtgtagactatgacaaaaaatacactaatacctttgcaatctgaatgagaatttgaccatttgtgtgtgccctctacccttaaattcagaaataaagacaataaaaaattaaaataattgcccagctgaaaactgctatgaggaatggattgtcaggttgctgaagtataaaaataaactcttggttgtcctgtgcttatacttattgaaatttatggtttttactgagcaaagatatttgcatatgaatctctatttttttcattaccctgggcaatttaaagaaatcatatcatagcgtagttcagatactaaaatttgaagtttccttaggccctagaacatctcttttcctggttccttttttttcctcaaagctcaattagaatagcaaaatttataagctagtaaacttatactatagcaagtgttgctgtaaagtgtttttctccataggaagtgtgaactgtgtattgtctattgttagtaattttaaaaatgcctttatgtacataatcttgatggagctattagctgaactataaaatatgctcttggtaaatatcactaatttcaaagatcaggggaaccactacaaagacgtgtcatttctgcctttgtttgggacaggcagacaggctgaggaagtcaccagtgattgtggaaataattttgctccattttatactattaaatgaagagatgagtgaattctgtggttggttaccttaccttccaagatacagggtccactagaaattggctgtaatactcattgagccaagttgtcatatcaaattcaaccctgctgtaaacacatagaagttgtgaaactgcttcaagtaaatagtggtttgcagaacactgtaggagcatctgtcacttcattatgcagagcataagttgatccttttcctagaattttgtcagtggcaattgcatatatcagattgagtaggaaattgtgtactgtataagacttatttaaatagtcattaaatatttggatatattatgtgtgtgtgtgtgtgtgtgtgtgtgtgtatggtgtgtattccatatctattcccatgtaaatccaaatacttattctttatttcagtaattcttaacttgaatcatagactttggaacgagttagggaatgctctgttgcctaaaaagcaaacctacaagtatgttggtgtgtgtatgtgtatggaccagtttgtttgtgtgtgtgtgtgctcattttgaggggacaaggatctctagcattcataacattctcaaagaatctgaccaaagaaaggtaacaactatctttgtgtattttatgactgtgtgtgtttgcactcattgcaataaagtaggacaaaatgattttgaaatgc

SEQ ID NO: 506 - DNA, 3012 bp, Homo sapiens
agatcatgaatattacaatgaaattccagggaagcagccaccagtaggtggtgtttcagatatgcggatcaaagttcaagccacggaacaaatggcttactgccccatacagtgtgaaaagttgtgctatttgcctggaaactccaagtgcagcagtgtatatgagaactgtttagaacaaagcagggcaataggtaatgtccatccaagaggggtgcagtcccagcgagatacctcattattgaagcacacgtgccgagtggatctctttgatgacccctgctacattaatacacaggctcttcaaagtacacctggctctgctggaaatcaaaggtcagcccaaccactggggagcccatggcactgcggaaaggcaccagaaactgttcagccgggtgccacagcccagcctgccagctcacattctttgccacacattaagcagcagctgtggagcgaagaatgctatcatggcaagctgagcaggaaggcggcagagagcctcttggtaaaggatggggactttttggttcgagagagtgcaacatcccctggccaatatgtgctgagtggactacagggaggccaagcaaaacatcttctcctggtggatcctgaaggcaaggtgaggaccaaggatcatgtatttgataatgtcggccaccttatcagataccatatggataacagtttgccaatcatctcctctggaagcgaagtaagccttaaacaaccagtgagaaaagataataatccagcacttttgcattccaacaaatgacagtattgaagcaccatcacactgatatttcaagaaaccccattttgtattaggacacaaagataatttaaactttgtttgtagataaaatagagcacaaactgtgaagtgcatctttccaagaccatcatggaccaggtcctctataaaatgaagaactaacaaaaattagtcttcagaaatgaaaatcagaaaagaggaagagggttggtcattttaaaagaaattatatgtatgcacggatgtcactttttaaggccatattgcattgataacaagctaaaagcacaactaaaatttcacatgctaacgacaacttgaatgaactgctggggcagtggtatgtgcctttcaacttgataatttgggggacattttcatattgggagattaattctaagtatcttcatgttctatgactatagaaccatttgccaaaaaaaaaagcttttcttgctacaaaaaataagcaattttcttgagccttattgactttattacattttctgtttagcagcatttttcactgcaatgttaaaataaatatgacattgaattcgaactgtgtgtatgtcagtggaatcaaatcaaaagccactaacatggctgtctgtttcattggactgtcccatttgctggttaaaaggattggggcccaaatcctctggcctagcatttctcagtgtttgctattcagactgtctaaatacagcatgtgacaagctgaagaagccaaatctatcagtcatttctgatttcattatattctccccctcttcctgctaaaaagacaaaaaacaaaaaacaaaaaaaacaaaaaaaacctcatgagtgcatggatttaaaagagggcaaacaaaaccagtattcttcatatttactattcaaattggtttcattcttagtaaaagtacagaatctatttgaaattatagtaaaatttcttcttgattggctgacactgaatcatagtttctcacctacatatatccttagcacctcgtatagatatgatcagacaaaatgcagaagaaaaaaaaaacatattgaatgaagcacttggaaagattttccacatgtagaccaactggtaaactaacagagtgattaagcatggtgtacagaaaagcattacgctgagtcttaccagtgtgaccttcagcaagttgctgaatctgtttgggttccagtttccttggcaataaaatgagctaaatgggctaggtgaatttggaggactacttcagtcctaacttatagtatgagtctctaaaaagcaagtttttcatttgttagaggtcgttattgataaccagtctgtatagttaaggtaaaaaattaagcttttcttctatagtctgtgtccatactcacagaatgaatggcacacctgagatcaacattcacatagtttagactccaaaccattcagtctaaaatactgaaactttggaatatagggaatgatgataaaagtggatttggtttgagtagcagaaaactacttatgtccttttcttgcctttccaagaaaaatgttttttgtttttttttttaatcttgagttatctggatattgccttgactccatttcattttggctatgtagatacaacttagtctttgtgattgtgatatatttgctaagttttaaataaaacttcttttggatagaaatcattagaaaccaagcatactgcactctaatattttactgtaaaggcttatgatttttatttctactgccattaattttttagatggatttgtttcctcttacacaactagaattaatgtatttttcaccagttttccatataccttaggtcttgatcgtttgtccttaaaaaggggatcagcatgagtatagacagtagaaatgtatgggtagtctaaccacttttatcagagacagagcagggctgtggtctcactctagctgagcagagtattaacttggtagcaagagttcctgatacaaatagatgcaatgactgtaaatggtgtcagcagtacacatggataatcagtatttgactgtaatagtatagtagttaaatacagcacttaaaaataccacagacacagttaaagcaaaaggaaacaataaaaggaatgtctgcatgctattttaatctcacattctttatctgtcttaaagtggaaatccatttgcctataaatacctgtaaacgactttaaaaaataaatgattattgctttgtgac

SEQ ID NO: 507 - DNA, 2533 bp, Homo sapiens
cagaggacagggctcagaaacagaatgggacgcagccactcaagggaagtagaggtcccttgaaggactcctgtggcttctgcatgcaccttcctcaacccctgaggagggttagatcatcggagcaatattcttgtccaagttccagttttctacagtctggctgtgtagtcatttctgtgtgcttgaaggagcttgtacaagtattgaccacataaggcagcatgttgcaagggtcctacccaacagattaacaggaaagaaatggggcatgggtgtgaggagtggaaagacagggaggaagggccatccaggcagtgtggcagaagcaaagaagcccacagctggggggcgggggtacagtcaactggcagggtgtggaacagggatgttgcatcgggaaggccagccttatggacttgggctcaatggacagtgttccataggcttcttagttcagcctcagagtcccactgtgactggtgcagcttggtgtagctctcctcgggccccatctctgggcctttggtggaggcttctgagggccccactcccccttgttttgaggcactgctccccatcacatctcaactgtaacactctgctgcagaacctctgtttccatgtcaacaccctagtccctgcatgcacacaaagagggcaccatggctgattgtctccatggctgcttctcccctgcatcgtgtccttaaagggcaagtttcctgctgcacttgttgacgactcacccctttcagccccagtgtctagcacaatttccctgtacacagtatcaacagaattgtatttgttgaatgggaggcacgagtcatgttagaaggccgattatggcagcacaagaggatgtgggggcacagagagtccaggaatatcatagagacagacctgtaacacttggtagccaggagttggagcatcagggaggtgaatacagattttggttaaacatccccattttcttgtttagatgtaataattgatccccagcaaatgatgggatgccctgaaggttgtaaggctagttttgatggcttaggcctttgaaatccaatttggagctacagaagttagggccatgaaaagggagagttgatttggggtggaaggatgagttggtgagtttggtcacagcagattgatttgaggttctttggaaatacagagtagatttgcagtcattggtacccagcagagagattaaaactgagggcacagtggcagctgtgagggagacagaacgatgctcatgctttggattggcaggaaagaggggctatggcggaaacaaaaggagatgagggcaggggcacttttaggaaggactgaggctgctggcagtgtcacatgactgttgagaagaagggaatttgttagcaagtggttacatttagtaggaaaagtgttgagggcatgggtttggattaaaggagggagtgagcaattgaggaggaagtggaaattgggcaaaacattccttttggaagtttggatggtaaaaggaagttgttggggaagggaataacaggatctttatgtttggcttatttactggtctatggggaggaggtgggcgaggaaaaagctagatacaagacctgggcaaacaaagaaggctctggagggaagtgtaggttagaacaaaggtaagtctgagaggtaagagagaaggaacacactttgggcttggcctgaaatgagagggaatgaggaaaactgggtagagggcaaggatgctccagcctggtggctctgctctccaagaggaaggaatagagctttagaagtgtggatggccagagttcagggcagcctggctcccaagcctacctaaaacaaccatcccattcctagacccgtggattgaggactgggcagagatgaatcatccattccagggaagccataggcagaccccagacttcggggagcacctggccttgctcccacccccaccttcttctttgcctcctcccatgccttttccctacccacttcctcagccctcgccacctcccctcttcccacccctgccccaggataccccttttttcccaggccagcccttcccaccccatgaattcttcaactataatccagtggaggacttctcgatgccaccccacttaggatgtggccctggagtgaactttgtgcctggccctctgccacctccaatccctggccctaatccccatggtcagcactggggcccagtggtccaccgggggatgccacgctatgttcctaacagcccctaccatgtgcggagaatgggggggccctgcaggcagcggctcagacactcagagagactgatccacacatacaaactggacagacggcctcctgcccattcggggacatggcctgggtagactggatcttgggctgggactggatgtgccaatggcccttcagggcctgcctggcacctcaggtactgggctagggtgtctgctatgcctggtattgttcttgtccattgctgtcaccaataaaggcatggaagaac

SEQ ID NO: 508 - DNA, 2396 bp, Homo sapiens
aaaacaaaaaaagatgtattaatttttttaaacatatgggatgccatcatgggtgctggtgccctctgtgttctgggtgccatcctgggacgcagcagtgagcgagaagatgcctgccctcaggagcccaatgccagagcgggaactgcagagtcaagtgaagcacgatgcatgtctcacagggctggtggcctcccaggaggctggaacaggaggcgacacctgacatgagcaaaggccctggcgaggacagagcccccttagtgggggagacggcccctgagggatcaggcgtgcctcccaggctccgtgcctcccaggctccgcacctcccaggctccgcacccccaccagcctctccctgtggggttctgctcccagcgcctcctgtccttctcaccctcccagggactgacacaggcctcccagggatcggtgctgttgggtcgggactcagggatcggtgctgctgggtcggtactcagcagggcctggggctcagcagggctggggccgcctggcccctgacactggctgcatttcaggaatcctgtatggcacgatgaccctggagctgggtgggaaggtcaccatcgagtgtgcgaagaacaacttccaggcccagctggaattcaaactcaagcccttcttcgggggtagcaccagcatcaaccagatctcgggaaagatcacgtcgggagaggaagtcctggcgagcctcagtggccactgggacagggacgtgtttatcaaggaggaagggagcggaagcagtgcgcttttctggaccccgagcggggaggtccgcagacagaggctgaggcagcacacggtgccgctggaggagcagacggagctggagtccgagaggctctggcagcacgtcaccagggccatcagcaagggcgaccagcacagggccacacaggagaagtttgcactggaggaggcacagcggcagcgggcccgtgagcggcaggagagcctcatgccctggaagccgcagctgttccacctggaccccatcacccaggagtggcactaccgatacgaggaccacagcccctgggaccccctgaaggacatcgcccagtttgagcaagacgggatcctgcggaccttgcagcaggaggccgtggcccgccagaccaccttcctgggcagcccagggcccaggcacgagaggtctggcccagaccagcggcttcgcaaggccagcgaccagccctccggccacagccaaaccacggagagcagcggatccacgcctgagtcctgcccagagctctcagacgaggagcaggatggtgactttgtccctggcggtgagagcccatgccctcggtgcaggaaggaggcgcggcggctgcaggccctgcacgaggccatcctctccatccgagaggcccagcaggagctgcacaggcacctctcggccatgctgagctccacggcacgggcagcacaggcaccgaccccaggcctcctgcagagcccccgatcctggttcctgctctgcgtgttcctggcgtgtcagctgttcattaaccacatcctcaaataggagccctgggggcagagctcctggccagtcccgagccctccctcccaggcacccagcactttaagcctgctccatggaggcagagaggcccggcaagcacagccactgtgacggggagtccaggcgcaggagggacccggggccacaagggcgctgtgggcccaggtgtgctgggcccctctcaggggcactggcctctctgcagggccttccgcccagcgctggccttaatgctaaagccaaatgcagcttctgctgtgcgacgcactcctggccatcttgccgtgtcaccccctgtccggcctccacttgccatgggggatggatggatttagggtgggagggcctgtgggggccctggacagtcacaccccagcagcagtgagtgggcaggtttggaggagcagccagggagccccgagtggcccaggagtccccccacacacagatgcataggcctgccttccggagaccctgtccacattgccgggaccaccctggtggggccactggtgggtgccagggacaggttagggccactctggggaaggcattttggttttttattccacgctgtgctgtttggatgggagccccacagaggcaggtcctggaaccaccccacccccacacctggacgctcgctctggtgggggcacacgcaggtggaggtggttgtgggtgcaggtgtgtgcaggggtgtggggggcgcaggggtgtggcttagctggccccgcacccaggccggggaggctcaagttcgccactttactcagaccgatgcacagtcttcccattttacacttttttaataaacataattgcaatattt

SEQ ID NO: 509 - DNA, 2021 bp, Homo sapiens
aaaataaccgatcatgccagccgtccactgtagagaagtgtgttaatggtacagaaatgtcagccttgctgatacctgagtctgaggaacaaggaaataaagaaaatattcaccaaataaagcagactgtacctattcatgcagccaatctacatattatgcatccgcatccccctcaagaaccatcagcagataagaataataacagaagaagattacggttaaaaagtaccagcagagaaaggacagagacacccagcggtagctcttcaggaaataataggattgaagataaagcatcaactatcctcaccactgtgtcccaacaaggagcagagctgttgaactccggcactctaggaccccagtctcctgatcaatcagatgagtggatttttcctgaaaatgctgaccacatttcatatctggcatccagcagacagtctctacttctgggtgatgactcctgcaacccatcacacctgtggctggaagccagcaaagagagtgaacacgaccagcaggcagaggaatcccagagtgttccaaaggacattttcactttttcatcaagaccacgatcagcacctcatggaaagactcagactatgtccccagaggagctctcatttattttggatctaaaagaggataacagtgtgacaagcagagacacccaatcagaggatgatttttacggcggcgacagcagtgaagagggtaaccacagtatccagggttctcgaggcccaacaactggtccttcagagttaactcagttaacattagagagcctgctggggaaggctgcaaagcggacaagtaaggaatatctaaggagcgcctacacagaagcaggagcaacagaaagccaggattcctcgatggagcaaatagatagaaataactttgaaatgagtttgttgcctacaacatgcctttctccaactggaagaaggtgtgggtcctgtcagaaaactccagagcccgtaatcaaagcgaaggatctatcagcccagcaagtgccagcttcactaaacaaaacctccctgaaagaaatctcaggggaaaggctgagctcgatccccgaagcatctgaatatgactggcgaaactatcagccaagccagatgagtgaatccgagttacagatgctagcaagcctacggtggcaacaaaatgaagaactggaggatgctgggacctcccatggcctgagtgcctcccaggtggacaactgtaatgtcagcataagtaccagcagtgacgacacaaccacctggaactcctgcctgccaccccctgtcaaccagggtcgccactatcagaaagaaatgaacccaccttctccttctaatccccgggactggttaaatatgttgagcccaccaatcgttcctcccagtcaacagccggctgagcagcgtccagattcctgtgaaagtttgagtgttcaaggtgaagaagacctcagtgtggaagaggacgaggaagtactgactttgttgtatgacccttgtctgaactgttactttgacccccaaacagggaaatactatgagttggtataatgcctccttccggggcagagagcaggcactcccagctggagcagaatagcagttcagggtcgcttaaggagtcaccacaacttatgtgttgggtgaccacaaaatcaacagtaactgagagaaacgaattcattttgtaaataatgttcaacgttaagaatacctatattccttttgtagatgagtatgattttgaaactgaagaaattaatacagaggcaagattttaggagtttgaattggttcttgtttgttctcattctacatataattttgtttatttcagataattttatgtaaacaaattaagagttattcattcaaattttttgcagtgttaatctgtaaatgatggcttgatgtacagaaaatgtatttttgcttaaaagatgcctgggtaccttttattttatggcatttgtattaaaaataaagtatgatggtaagaag

SEQ ID NO: 510 - DNA, 2690 bp, Homo sapiens
ctcaacaattttgtcacacttggagcgtccaacattccacaggcatcccgtacaacccccaaggacaggccgtagtagaacgtgcccacttcacccttaaaaatatgctcagaaaacaatggagaatatgagtaaagaccctgcaacactactagcacaagccttacttacccttaatttctgaaatttagatgataaatttcagtcagctatagaaaagcactttgctaaaacctctccagacataaaactgcagttttatggaaagatgtaaatagtaatatatggcatggtccaaatgttttgctaacatggggaagaggatatgcttgtgttcacatcccctcaggccctctttggattccagcacgacgcatcaaaccataccatagtggggctaggacccaacccagtaccagaaatgaaggaaacgaccctgcaggccccgcagcccccgcaggccccgcagcccctgcagccccggaagaaacgggttcgtcggacgacacagcttcgtcggacgacaggagccccagacattacctgggggatgctgaagaagacaactcaggaggctgagaggatcctgctccgaacacagacaccattcactccagaaaatttgttccttgctatgctctctgttgtacattgcaactcacgcaaggatgtaaagccagaaaacaagcagtaactgctatgcctgacaaaactgttgctgcacacatctgtactcgtcaatcaacaaaacctgatgcaaaaaacagaaaaggggtgatgtaggagatggtcaggttggtaggagaagctataaggaaagacgcaattggaaggtcgggaggttttccaaagcttcaggagagaataaagctgaaggcagctttattaattaattctcttaccctgaggctgagggcgaacagtaggtagcaagggagtgtaaaggaatttatctagataagtttgtttacttatgccctccggaaatcatgcaagactgctccctgcaaaggggggcgacaatgttcattactcacaaattgtgttggcttcaggcctttggtattctgtctctactgaataaatacaaatggttccagcctatcaggactgcactctcttctcggctgcactaaagctggcactcccccagccgttctcatgcaaaatacctgtgtcagaatactcctttcatccatcactcagccagagtcttcaggacagactccgcatgggacttgtccaaaaaaattctaatcaaaagaggaaaattttggaatatgccaggaatagtggaattttattttttaaatttttttataggcccatatgctctatctcaagaaacaagatgattgtaacatgtccatgattaaactattggcagattattgctgtgttaatctctgtagtctaatgagttctttgttctgttctgctgccttttacgttttcttgtcctttcaaaagtgttcttgaagaaacaaagcgaataggcagttagcacagcacagctaccccttaccaagcagtctatggaaacaacccctcatccaaatcatgggttagttaagaatctaactggggcaattaagatgaattccactcacttcctggtcacttcagcagcccagcggcattgagccaaaatatacaattctgtgttattagtgaggaaactttaaaactcatgtttgttattacttactacccaatttcattatcctcccttcctctttccatttctattctctctcacttgaattctggcattatttttagtggcctctactgataatacctaccctagagtacataaaaattatattaaaagaggaagtagcagtatgcataattttaacagattctataatgggtgcctcaaaatatgtattgtgccattccgcaaatttaaaagctaattgaggacaatttttttttaatttcctaaatgagaccaccttggatttttatttttgccatttagatgtttatacttatttagcttttataaaacataagccaagctaaatcccacataacaactctggtattcttccctcatatgagcagtgattttatttgttacccaccttagatagactaagaaagttctagtcttgtttctccttctccccgcttccctggggtttttccttaccataagtattctggtccgagggttcagttcctttagtcaagatgtcacaagtttaaaaacaaaacttgagaaactaccaaaggctcaggagttgtccactttgttgaaatccattaaattagagaagtctcactaacagatgtatttaaatataggtacaacaaataatttctttttctccccttccccaaattacagtcagcatttaaagctgtttatggcttgccatcagcattattctggtaggcttgttagtgttaaaatctatttgatttttttttttttttttgcctcttaaagtctaattttaggatggatgaattcagatgtttaccagagtgtgtattttacataatgttcttgattaaaaagacttgtttgtaaattatccgttgtttttgcatatgcccagttgatgtgataaaattttcattgtcttgccatataaagccttggttatcaacaggtggaatgtagatattgtaaagctttttgtgaattaaaagtgcaaaataaagcaaccacattt

SEQ ID NO: 511 - DNA, 2740 bp, Homo sapiens
atagtacttggatgttttagaaggttttccaagtattacataattcctagatgttcacccttattacactccaactattaaaaaggtcaaaattcagcctattttttttcattattttagattcctgtggttgggatattttaacattgatgagaaaaataattgaggttgatatttttacaaaatcatgcggtaataagtcttgatttcatgattcaaaagaatcaataaagcctaaaaataatagattactttaagctgctatgtaagatatatacggaataaattaaaaacctttgtgaattcaggtttattatttttaacctaaaacattctctttggttcattcatcccctcatgtcatgggggctcattggttttccttctttgtcatatttaagtatgatttttcaacaaaacttctagaagtcagcttattatgtcaccattcatgcaaagtgctcatgcctctgattggtccattcactgacgtgacaatttcaggtcctatgtttaaaaagaaggggctggccgggcacgatggctcgcgcctatagtcccagcactttgggaggccgagaggggcggttcacgaggtcaggagattgagaccatcctggttagcagagtgaaaccccgtctctactaaaaatacaaataaaaattggccgggcgtggtggcgggcgcctgtggtcccggctacttgggaggctgaggcgggagaatggcatgggcccgggaggcagagcttgcagtgggccgagattgcgccactgcactccagcctgggcgacagagcgagactctgtctcaaaaaaaaaaaggaggggggctaaatatccagtgagatgcactgaggaaaggaagcattttgctgaagacagcagcagcagcaaacaatggtctgtttgttgcaaacaagatgtagcttgatttctggtctgacatatgccatatacagatattagaaacgactgtttgaaggccacactggtcatctacaaagtaatgtttaccaattgacgacagggatttaactagattaaaaagatcaaagtgtggtttttctctgctttttaaaatttcactcggaatttgtagctgggccaattcaacacattttacttttcagtggaattgatttttctaatgtttcagaattttaacatatcaagaagaaaacaacgttctcaaagtctggcctctttagcatgatgtaaacctatagaaatgctttgaaatgtgctggtgtaagataagagttatcttgtatgatttaatcatatgcagtgttgtctcagttacgttcagggaaatgtttctgtgtcattcagagatgcttgatgaattaacacctcccaccctgagtgaggggttgacttgttgggagatgatttgggcttcactgggatctgtgacaggtgggggctgggctgggtgtcacaaagagaatagtggtagaaatcgggcgaaggaagaaagaagttactggtaaaaatcattacaccataaagcaccaaggaaataactgagttaaaataggtgaagtttcttttttcccccctgtaacaggagagttttccttatgataattattctgagacttggtcactttgtttttgaatgtggagctgctgaactcattcagaagccatttgctgcctatcaggactttctgaagaagttcttttgcctctgcctaccctctggcaccctcccatggaggcacaggggacccagagctaaagcattaccaggccatctccaaaacaccccgtgtgtgtgtgtgtgtgtgtgtgtgtgtgtgtgtgtgtgtgtgtgcactttgcagcccccgaggtggagaggcagtgtctggatcactgtgaatgcattgccccattggtcagttggggacactgttacaaatccactgaagtcctggtaaaactgtcaagagtaacaggcctcttctgttctaccctgctcacttccacggtgagttaccagcctgggcaacacagcaagaccccatctctacaaaaaaaatttttttaagtaattaaccgtttaaattttttcctaaagatttaacatgatttttccctcctatgtaaagtttactggagagacttgaattacttaaattcatgttaatatgatttttttttaatccaggtcacattttaacaaagtttattatgaaacaaatgaaatttgaactctaaaatggtactccttggcttcctcaagtcacaatgaactttatattttctttgtccttaaggactaagatagttgttttatttcagccgaatcacagagataaccactcctgcaggcccccacagctggcccaaaggggctgtctttctgacctggctgtgttagcactgattgagaaatgcaggctcccaaatattgcctttattaaaaacacaaactacagaaaatgggttaagagtatacgcatttcatcaaacacatataggggaaaaaatccttcaatttagagttaaataactcagctttgtatagtagagttagcgctccagtatctaacaatctcagaatcatctctgaaaactggtaactatgcttccatttttaattttgtcctaaatatcagatgtctttgatgtaagggtagggaatggagaaatattttcaattgtgtatttgtattacaaagaacttgaaatttactttcttagttgattatattaaatgatgtatatattatatgtggtttataagctc

SEQ ID NO: 512 - DNA, 3070 bp, Homo sapiens
atctattctaagaaaatatactgcaggccgggcacagaggcttacgcctgtagtcccagcactttgggaggccaaggcgggaggattgcttgagcccacgagttggagatcagcctgggcaacaaaaaaaaaagtgagacctgtgtctacaaaaaataaaaaaataaaaatggagtatattgaaaatatatactgtaatatgaaaagttacacaaattaagaatatagcatagtactgagaatatgaaagcaatctagtcagtatttatgaaaataaactttggtggctgggtgcggtagctcatgcctgtagtcgcagcactttaggaggctgacgtgggcggatcacgaggtcagaagatcaagaccatcctggctaacacggtgaaaccccatctctactaaaaatacaaaaaaaaaaaaattagccatggtgtcaggtgcctgtagtcccagctacttgggaggatgaggcaggagaatggcatgaacccaggaggcaaagcttgcagtgagccgagactgcgccactgcactccagcctgggtgacagagcgagactccatctcaaaaaaaaaaaaaaaacgaaaagaaaagaaattgtggcatataagctttataggaaatagtgcaaccagtaaaacattttatgatgtatttcatatgctagtgtaatgaacgcagcaaagaacatgttacgtactcgacagacaatgataaaattatgagaaaccttttgaaggaatacaacagagcaaaacatctgttttttaaaattatcattgtgtattatgaatattaaacaaatgtttgtgatttatatgtgaaacaatgtctttttaccgcttttttgttttcccaaaagttgagttaccattccaatttgaaatggactgtgtacacgcttcatttagtacttttgtaaactgtgtttgtgatctgacagcagcctgtgaaattcataagaatcacataggatgtaagtctccatgatgtatgccaattacagaaattaggttggtctgtgtctttgttactaacaaaaatagctatagcagtggccttcagagatgtagagtctggaaaaacttgatcttaatgtcaggttctggcactgcttttacagttatagccctgatgagagctatcagtagggaaaataatttatggagaaatttaattttgctaaaagagataaaagtttatgctcataaccctaatgtagtttttatccattatgaggccacaaactctttgagaatctgctgaaatctctattaagaaactgccaaagagcatacacaaaatttgcatgcaatttcagggaaggtcttcaccccagttcccacactaccccctatcctccattattccctcagacttagaatgtcagtcctaatagaaattattatatctacaggttcgagaaatggctgctactaccttaagcggtctgctacagtgtaactttcttaccatggacagtcctatgcagattcattttgagcaactttgcaaaacaaaactacctaagaaaagaaagcgagaccctggttctgtaggagataccattccttctgcagagttggtcaaacgccatgctggggtgctaggacttggtgcatgtgttctttctagtccttacgatgttcccacctggatgccccagctcctcatgaatctcagtgcacatctaaatgatcctcagcctattgagatgactgtaaaaaaaccttatccaatttccgaaggactcaccatgacaactggcaggaacataaacagcaattcactgatgaccaactgcttgttctcaccgatcttcttgtgtcaccatgctattatgcatagaaaggtaagtcagcaaagttctgaatttacattggtttggtgactgagaactagatatttattgttttttttctttttgctgacattcttagatgtcagtgtttagataaagttggatggcggggattgtttgtttttaaacatggcttttgctacggccattggaaatgagaattttgctgtgcctccttgctttaggtttaaagcagagaaaatgtgtgactgcttttggacctttgtaaatgagtggtgtcagcctgggaatagttagataaaggaaaatacatcttattcttggttgcctcctgggtggggctgggacattttgtgtggccctgaggactctgggttctaaaagttgtgagaacttgatctggattcttacacccattctgttaaagagggagtacccagaagcctttctactggaataggaagaataaaaatttcatttattaggcttttagagttggatgtcttgttacctaattgaaattttttcctccctgatacagatgactagtcctcacttcaggctcttttcatcaaaaattccacaccctcaggtaccatctgtggtggctctctgcaagttttaaaactgcctctgctgagctctcatcattttggtggtttctgtgttagatctcgttagtctgcattccacagcttctcagttgccatttgatttcccaacttgtccggaagtgtttccagaatactgatcactttttttttttgaggcatctgacaaagtcacaaagtctcagactagaaataattacccagtatgatcatggcatccaagaccagagtctcagaactcattaagaaacagtttacttggaatggagaatacccatctgtaatacaggtcctgtcatttcattcatctcaaattattttgaattcttcccaaatggctgctggatttaggtggtaataggggctgtgggccataaatctgaagccttgagaaccttgggtctggagagccatgaagagggaaggaaaagagggcaagtcctgaacctaaccaatgacctgatggattgctcgaccaagacacagaagtgaagtctgtgtctgtgcacttcccacagactggagtttttggtgctgaatagagccagttgctaaaaaattgggggtttggtgaagaaatctgattgttgtgtgtattcaatgtgtgattttaaaaataaacagcaacaacaat

SEQ ID NO: 513 - DNA, 2766 bp, Homo sapiens
caagcagtccccccaggcttctcttgctcacctttgcccatttttattatgaaagaaaaccagttccttgatggataccaggaccatcagcctcaggcctggaggaggagaggaggatgatttgggttcgggctgtaagaggtgtgccactgagaaggagggatgctgtgagcaggcttaactgagctcatggttcagtgggagttgagtgttctcatcacaggctttggtggaatgtactcttgacatctgtccccaggagcctggtctccagaaacaccagctcaggccctcaaggtctggctctgatggttctgtgggctacaggattctgatctgttagcgaggtgtgttcagaagtgtgttgaggacaccagtgcaggagagcaaccagtagaacagaaaggtctggaagcagcattcttggcaaatcttctagattcccaatgcccagacagacctggaggtgctgtgggcttgaacatgtgggtggcctcccctcccaggctgccccgagctgcccaaggtttccttgccctggtgctccttcttgcagaggctacacgtgccctctccacctgcccaggcactgagtttctttgttgcgatcaccttgtctgttgtccctctgtcctcaaagatgatcacggaagccttggcccaaggtgggatgcacataagagcccggttcccgcctaccaccgctgtgtccgccatcccgtcaagctccatccctttgggcagacagcccatggcacaggtcagccagagcagcctccccatgctgtcctcgccgtcaccgggccagcaggtgcagaccccgcagtcgatgccccctcccccccagccgtccccgcagcccggccagcccagctcacagcccaactccaacgtcagctctggccctgccccatctcccagtagcttcctgcccagcccctcaccgcagccctcccagagcccagtgacggcgcggaccccacagaacttcagtgtcccctcacctggacctttaaacacacctgtgaaccccagctctgtcatgagcccagctggctccagccaggctgaggagcagcagtacctggacaagctgaagcagctgtcgaagtacatcgagcccctgcgccgcatgatcaacaagatcgacaagaacgaagacagaaaaaaggacctgagtaagatgaagagccttctggacattctgacagacccctcgaagcggtgtcccctgaagaccttgcaaaagtgtgagatcgccctggagaaactcaagaatgacatggcggtgcccactcccccaccgcccccggtgccaccgaccaaacagcagtacctatgccagccgctcctggatgccgtcctggccaacatccgctcacctgtcttcaaccattccctgtaccgcacattcgttccagccatgaccgccattcacggcccacccatcacggccccagtggtgtgcacccggaagcgcaggcttgaggatgatgagcggcagagcatccccagtgtgctccagggtgaggtggccaggctggaccccaagttcctggtaaacctggacccttctcactgcagcaacaatggcactgtccacctgatctgcaagctggatgacaaggacctcccaagtgtgccaccactggagctcagtgtgcccgctgactatcctgcccaaagcccactgtggatagaccggcagtggcagtacgacgccaaccccttcctccagtcggtgcaccgctgcatgacctccaggctgctgcagctcccggacaagcactcggtcaccgccttgctcaacacctgggcccagagcgtccaccaggcctgcctctcagccgcctagccaagactgcagggatggcccgcagcctcatcggggccaaggacacacgcctcctgtcagacacttctaggtgttggcttccttagagagcctggggttaggttagctttcctgcttttatcttctgccttggggacctgccaaacgaaatcccacacctgtacagaactgggataggcgcagtggagcgggttgcttggggggcgttggccgacttcttagagaaggccctccatgtgacttcctcccaggagccagatgcgatcctcaggctgctctcaccgtggcctgtccacggtccaggtccatctcagcagcgtgagggtgcactcagggtgttgttagagcgtctcgtgtgtgctagacgcacccctactcgttcctatagaacacagaggacataggaaacccttaaaacacacatgggattctctggtcacagttttgggttcaggctacgctgctttgggcaggtggagcaccccccgaggaagcctgcaagtccagggcacaggctgccttttggagggagggctggcccataggtgctgctggctccccgccaccagctgggcctcagccctcacggcattcctgctgagcaccgtggggcacccagggagcaggggcgtcagggatcctgctgccggcacccctgtgccgctggcatgagggccgtgtccccactgtgaaggatgaagagcaaggccctcaggacccgtgtcctcagagcaccacacactgagcacccagagacagcgggcctggcagcgggccgggccatgcagggagcgcctccctatgttgcctgccactctgggcaccggccagcaccctctggtgagaagaggtcccccctttttatgtgcactaccccaccatctgtgattataataaatttattattcctg

SEQ ID NO: 514 - DNA, 2407 bp, Homo sapiens
ttttcacttgttaattattttctgttctcatgattatgtgtaatcttttatgcagagatatcacattagatatacttttccccttatattattacattataagcatttccatatattagtactcatggttactgttttaaatagctgcctattatgctgtttgttgatgtctcagcatgactttgtttatatgagaggtattaagcttatgctgtaaacacctttattaatctgagattttgtatgctgttttgttagaggaaacattctattaatggtggcatatttcaagtaaaagcatgtgctttttatttttaaatcgcttatggcaaaaattcattttcagttcaataaagtatgtgtttgtaagctttgtcatctgccccttgactggtagatgtgcaggctaaggagttttaagtgtttggttttgcttttggtagttgtgtgtgtgtatgtgtgtgtgtgtgtgtgcgtttcttttcagaaggggcgggtaatgtcttctgttggaacatgcactccaccctctttgataaggcttgtggtaagatttgcatcactacccatgacagtcatcctcatagcattaagcacacagctcttagctcccataatgatgtgtggagggtggagtgtattgcagccatattcacctttcatttgtgtgtttgatgtggcatttatattaagtaggagtaattttttttctgatttttttttcttgtgtcaccagtgcacctattccattcttccatcgctgtgctcctgtgaacatttcctgctatgccaagtttgcagaggccctgatcacctttgtcagtggcaatagtgtcttacacaggctgattagtggagtaatgaccagcaaagaaattatattgggactttgcttgttatcactagttctatccatgattttgatggtgataatcaggtatatatcaagagtacttgtgtggatcttaacgattctggtcatactcggttcacttggaggcacaggtgtactatggtggctgtatgcaaagcaaagaaggtctcccaaagaaactgttactcctgagcagcttcagatagctgaagacaatcttcgggccctcctcatttatgccatttcagctacagtgttcacagtgatcttattcctgataatgttggttatgcgcaaacgtgttgctcttaccatcgccttgttccacgtagctggcaaggtcttcattcacttgccactgctagtcttccaacccttctggactttctttgctcttgtcttgttttgggtgtactggatcatgacacttctttttcttggcactaccggcagtcctgttcagaatgagcaaggctttgtggagttcaaaatttctgggcctctgcagtacatgtggtggtaccatgtggtgggcctgatttggatcagtgaatttattctagcatgtcagcagatgacagtggcaggagctgtggtaacatactattttactagggataaaaggaatttgccatttacacctattttggcatcagtaaatcgccttattcgttaccacctaggtacggtggcaaaaggatctttcattatcacattagtcaaaattccgcgaatgatccttatgtatattcacagtcagctcaaaggaaaggaaaatgcttgtgcacgatgtgtgctgaaatcttgcatttgttgcctttggtgtcttgaaaagtgcctaaattatttaaatcagaatgcatacacagccacagctatcaacagcaccaacttctgcacctcagcaaaggatgcctttgtcattctggtggagaatgctttgcgagtggctaccatcaacacagtaggagattttatgttattccttggcaaggtgctgatagtctgcagcacaggtttagctgggattatgctgctcgactaccagcaggactacacagtatgggtgctgcctctgatcatcgtctgcctctttgctttcctagtcgctcattgcttcctgtctatttatgaaatggtagtggatgtattattcttgtgttttgccattgatacaaaatacaatgatgggagccctggcagagaattctatatggataaagtgctgatggagtttgtggaaaacagtaggaaagcaatgaaagaagctggtaagggaggcgtcgctgattccagagagctaaagccgatgctgaagaaaaggtgactggtctcatgagccctgaagaatgaactcagaggaggttgtttacatgaggttctcccactcaccagctgttgagagtctgcgattatgaagagcaggatcttattacttcaatgaaagcatgtaacaagtttctcaaaccaccaacagccaagtggatttggtacagtgcggctgtctaataaataatcaaaagcatttgatag

SEQ ID NO: 515 - DNA, 2186 bp, Homo sapiens
ctccgcgcgcctgcccacgcgctccggtactcgctgctcgcggctggccggctcgggattccgggctttcttcccgagaccgcgtcccccagctgggccgaaggtggacgctcaggggctggaggctcagcggaatcccctgcgttcagtagccccgctctcccctgtcccgaaggattactctgcccctcagcggttccagtgccctcaaagcaatctgtctctgaagtactggctatcttctgagcgtgtgccagaagatccagctttgttgaaaagcgaagccgttagtcccttaatacaaaggagacaaattgatttatgcctggggcaccatcaccaaaagaagaggaaatggatgcaagccttcccagaacaacagaaagagtctcgctctgttgccaggctgaagtgctatggtgtgatctcggctcactgcaacctccgctttctgggttcgggcaattctcatgcctcggcctcccgagtagctgggattgcaggcacatgccaccacgcccagctaatttttgtaatcttggtggagatggggtttcaccatgttggccaggctggtcttgaactcctgacctcagataatccgccagcctcggcctcccaaagtgctgggattacaggtgtgagccactgtgctcagccaaaaaaacttgcattttaaagaaagttttccagaactgggtttgttccattcaataagtagattgagttacaactatgcacttagcttcatgtgacactgaagggaatatgaagaagaaagaagacaaattctgcttatactctgataggacgacctctgctattttccttctgaagctttgcagagagcagtgaattgtaatgaaaggagatttgggagtaaagactccgtgaggtattgaagtctctaggggaacctcattatagcattcctcttcccagcctggattctgaacaatttgagaaataaaaagcaaatgtgaagcacactgaggccaaagtatcacctttagaaccagtaaagatgaattggaattccaggcatggcaggccaaggcagacatcatccttagagacagagtccctggaggggaagaggaaggagataaagctgaagcaagcaagccagggcaagtcactttgacaccccagggacagaaagggaccaggagtatggtcagctgcaactaggaactggggaaagatgttcccgcatcactggttttttctgctcctcagatgcgtgacgttggatgagtccattaatccctctatccattatcatcttttctaaaccaaaggattttactagatcatctctgaaatttcttccaggtctacagtggtatgattatataaattactagacccatagtaaatcatctaagagctcatatgaccttatttagaaaggaaattacaaatcttttacacttggatctggaattgcttttgtaaatgtgaagctactatgagttgaattacacttttgtttcagagattgactttatgaagatccttaggaagttttaaagttgaataagattcttcttcttacctttaatcatcacttttacatctcatttgtggagaatcaaaagtcactggaatcaaaagtcactgacccacaaagtgtcttcctcttgcaagatgggcaaatggctccacaacaacataaaacccagcatcacactgacggttacagatctgtttctgccgggttgagtctcctggccaccagaatcccagagctctcacccaggctgagatgcaaaagccacaagcacagtggggagagaggaaaataagagaaggagcccatgactttgagatgtgaaataaaggagaaccaacaatactctgtgcctactcatgagcacctcggtgtactccagaactttcatttcaaaaagttaaataggaacctttgtccagagattggctcagatgttctcattagatcttagcttgaagcctcttctgccagttcctccctgtttttatagtaagtctcataaggcatggtcctggacccacagccctgtatcatatggaaaaatgatgcaggccgggcatggtggctcatgcctgtaatcccagcactttgggaagccggggcgggtggatcatttgaggtcaggagttcaggaccagcctggccaacatgatgaaaccccatctctact

SEQ ID NO: 516 - DNA, 2198 bp, Homo sapiens
aagagcctcaaattggaggcaaaacaaatgcttattagcagtagaatagataaataaattatggtgtatttcatacaatggaatactttacagcaacaaaaaaatgaagaaactgcatatgcttgcagcaacataaaaaaactttaaaaacataatataaaggtcaaagacagagacattaaagataacatatgatctcatttatatgaaattcaaaactaaccaaaattaaattatcatatttagcaatgcacacataggtaattgtattagtccgtttttcacactgctgataaagacatacctgagactggacaatttacaaaagaaagaggtttattggacttacagttccacattgctggggaggtttcacaatcatggcagaaggcaaggaggagcaagtcacatcttacatggatggcagcagtcaaagagcaagcttatgcaaagaaactcccatttttaaaaccatcagatctcgtaagacccattcactatcacaagaacagcacaggaaagacctgtccccatgattcagtcatctcccactgggtcccttccacaacatgtgggaattatgggagctacaggatgagatctgggggggggacacagatccaaaccatatcagtgacaaaactctaaagcaaagcaggaaatcactttttataagagtccagattgaaatatctttgtggggagagggaggagatgtacagagagaggctggcagagtctcttttttgctctaggtggcaggttcaagggtgttcagtttattttggaagcagtgcagagaagggagccagactagaaacagggaggtgatcaactgggtcttggttacatacagaaaacagcagaggcagctgaaagatccttctctgtgttcagagccatcatctatcattagcatccagtgatagcaggaacattgatgccaacatttttcaaagtctgcagaaatgacttggcccctccacagagccttgtgagtcagttcagaagaaatcaatatccatcttctgttctcttcttgcctgccaaggggacctggaatccttaagttttgctcctggtttcccacttcagtattcatccaaagagtctcctcctgcttgttttcattctttctgcccttccttgtcccccagagtggagatctgaagtgcataataccccactatgcggtgatgttagccccagggcacagctgaacacagcattcctcaggagaggattcatcctctatatagggaacactggagatattgctgccctaactccaaagaactaatcaccaaagcttgggactttgggcccatggtaggcaactggaagagctatctggggcaaagagtgtaactcaaacatcatcataactatctgacagactttaaggaggccaatccaatgttctcaaacctggctgcatcatgaatcactcaaggaatttattttttatccagatttctgaacccccaaccccagagattctgacttactgggttctgggtagaacatggaaatctgtatttatagcaactcacccaggcgattcatccaggtggctctggtgcaactcttcaatgggctggtacttaggagcatccccgggggtcagagctcaagttcctcatggccaggaactgtgtaggcctcctttgcttacatctaagtggtttcccctggtccaactggaacacgaatgttatctcctgagtccaactttattgcttcttctaaccatctagatatctgctagtaaaactcaagacatctctaattcttcctctttccactagagatttaaatgcatttttttcacataaagatggactttaatctaatgtagttatgcatgcatataaatgcccaaacaagagccaagttgggaaatatggccatgtgttgatgtgatgtcttggaacaaggaaggacacctctgcagaggtgttttgagggctatacccacatgctgatgtgataccttatcaaagcactctagagcagccattcttaaatattttggcctcaaaaagaccaaacaagtcctttatgattgcttatgtgtattgtatgcattgatatttacatggatatttataatccattcatgttaaaaattaaaactgaaaaaatatttgtttataaatcatttacaaataacaataataaactcactatattaacat

SEQ ID NO: 517 - DNA, 2250 bp, Homo sapiens
atattacagccctagtagcttaaacgacagatgtctgttgtctcgcagcactggaggccgccggcaggaaacctgaggtcagggagtcagcggggctggttccttctgaggcctggaggaagactgctccaggcctgccttctactgctgggggtgccggcagtctttggcttccataccttgtcatacctcaccctggtccccgcctttgtcttcacgtggccttttccccctgtgtgtgtctgtgtgcaaatttccctttttatagagatgcagtcatatgggattagggctccaccctgctccagtatggccttatctgaagtaattacgtctacagcaaccttgtttccaaatacggtcacattctgaggtcctgcagttcagtgttaacatgtgaattttggggatacacaactgaaccataacacaaactgtgaattcttagcaccttaagttgtagaagagaacagagccactcctccagccattgctccaatggctctggttaagttgtagctcagtagagagcatgaatgctctcaaaaaagcactacagttgtcctcggtatccacagggggttgcttcctggatcccctcagacaccaaaatgcacagacattcaagtccctggtaaaaaatggtgtagcatttatgtataacatatgcacatcctcccgtgtactttacatcatctctacattacttgtaatacctaataaagtgtagatgctatggagatagttgatatactgtattgtttttaatatttatgttattttttattgtttgggtttttttcccccgaatatttttggtccatggatgtggaacccgcagatgccagggccacctgtaacttgggggagtgacttggtggtggtgggtagcgttgcagacgccatcttgctggactttgtcctgtggcagtaagctctctgatgtgaccctgtttgttcctttaggagacgttgatccagcagcacgtgtcatttcattaggtcctgtatctgatgttgtggttagtggagtcctccagcaattgaatgagagcagtggacacatctcagcaggtcggtctagagagttgcgaatctaaacctgggacaggctggggccaggaggcagaaacaccggcctctgccaacaccggaacaagccgacgcttccagacaaggcggaaaaggccttttgtaatggaaatctcgcgagggttaatcttctcttgagaatggcagtcaagaaatgagatggttcacttgactactgagcagttacaccaaggagagcgtgaaggagatgattgagccagagaagaaacgggttgtgatggtaatggtgtgggggaaatgaacttgagctttaaacttgatttgagtttcagtgtctctgaattgaacatcccacgttggaagaagatacatttgggggctccaggactacagtagaaaagtatagagcaagcaggaaaatcttctagtaaaacttacatgcaggacaacaaaatgatgaaagatatccaaataccagataatccaccaggaaggcttttgtttaggaatttgtttcaagaggaacaagggatgagggagaaaaatccgttttatccatcagagtcagtgctataaaattgcctattaaggtaaaagaaaaatgtggagactattttactatacagagagcattaattcagatggcttagaaaagtgataccagcccaagaacagggatctaggtgagcccattgtaagtatcattgaaaacaaaacatgcccgtcaacatgtcacagaaaacgaacgaaggacaacaagaagtggatgagaatattttgttgaccttcatgggtttacagcctctgtctctaaacaaagtatggaaacaagtagagcttttattttgcttttgtttttgttttgttttttttttgttttcccccactaaatagaaatgagggtccttagtctgtttctgacaatctgttaatttcttaggacagctgtctttggtttgctttccagcaggcgtagtatatttagtcggagagcacatctgtatgcgacaacttgattacatctttttttctagctattttgcattttttcttttaccatgtttcagtttctgcatgtagatttaaataaaaaacaaaacttgtaaagttgtaacatttcacatggaaatgctgcccaatcttcaccagcttcagaaatctgacctttgccgatgctgcaataaagtgttgtaattt

SEQ ID NO: 518 - DNA, 1750 bp, Homo sapiens
agcaccatgagccgccagcttctgcctgtactgctgctgctgctgctcagggcttcgtgcccatggggtcaggaacagggagcgaggagcccctcggaggagcctccagaggaggaaatccccaaggaggatgggatcttggtgctgagccgccacaccctgggcctggccctgcgggagcaccctgccctgctggtggaattctatgccccgtggtgtgggcactgccaggccctggcccccgagtacagcaaggcagctgccgtgctcgcggccgagtcaatggtggtcacgctggccaaggtggatgggcccgcgcagcgcgagctggctgaggagtttggtgtgacggagtaccctacgctcaagttcttccgcaatgggaaccgcacgcacccggaggagtacacaggtgaggggcaggccggtcattgggggggcggtggccaggccgaggctgagggggactccctgcaggaccacgggacgctgagggcattgccgagtggctgcgacggcgggtggggcccagtgccatgcggctggaggacgaggcggccgcccaggcgctgatcggtggccgggacctagtggtcattggcttcttccaggacctgcaggacgaggacgtggccaccttcttggccttggcccaggacgccctggacatgacctttggcctcacagaccggccgcggctctttcagcagtttggcctcaccaaggacactgtggttctcttcaagaagtttgatgaggggcgggcagacttccccgtggacgaggagcttggcctggacctgggggatctgtcgcgcttcctggtcacacacagcatgcgcctggtcacggagttcaacagccagacgtctgccaagatcttcgcggccaggatcctcaaccacctgctgctgtttgtcaaccagacgctggctgcgcaccgggagctcctagcgggctttggggaggcagctccccgcttccgggggcaggtgctgttcgtggtggtggacgtggcggccgacaatgagcacgtgctgcagtactttggactcaaggctgaggcagcccccactctgcgcttggtcaaccttgaaaccactaagaagtatgcgcctgtggatgggggccctgtcaccgcagcgtccatcactgctttctgccatgcagtcctcaacggccaagtcaagccctatctcctgagccaggagataccccctgattgggatcagcggccagttaagaccctcgtgggcaagaattttgagcaggtggcttttgacgaaaccaagaatgtgtttgtcaagttctatgccccgtggtgcacccactgcaaggagatggcccctgcctgggaggcattggctgagaagtaccaagaccacgaggacatcatcattgctgagctggatgccacagccaacgagctggatgccttcgctgtgcacggcttccctactctcaagtacttcccagcagggccaggtcggaaggtgattgaatacaaaagcaccagggacctggagactttctccaagttcctggacaacgggggcgtgctgcccacggaggagcccccggaggagccagcagccccgttcccggagccaccggccaactccactatggggtccaaggaggaactgtagctgcccccgtgtcacccccgccatcactgctggacaggagccacccccttgggtaccagagggagctgtgcattgtgaataaagagtgagcttggttctgg

SEQ ID NO: 519 - DNA, 1793 bp, Homo sapiens
catataaattattaaaatgcacatttaaatctatggagtgtatctgcttaaagacatactacttgtgtttaagagccatgactatttgaaaacaggaaaaccaaattttagtaaaatttccatatattgagaccactgattctgtgtgagataattaggaaagaagatttattgtttacccttgcagtgtttatggggggaaaaggtatttacagaattactgttgctagcgagaatatacagtaaagtttaaaacattttggagaattgattttgattcttaaaatgtgtctttttgcaacatatgctctggttacctataaatacattaatttggcccttgaaaacattcacatcctattctttgttagccttatttttccagtccttgttaactctctcagtgctggataataaacctgcatttcttttaaaacatttgttcagtttcggcatcagtgtcttcccccagcactcccttaatctaaattagtaacattttactgtatgaaaaatagttgctgttaactaaaaattcaataggtgagttagacatggcttttcaagtaggattttcagtggcttcagattccatcatacacaagtgtatgttttttctgtgtaagttttttccgtgtaagttttttccgtgctcaaccgtaagtgctcaaccatcttctccccactttagtctgctatgtcaaaaaactgcatcaagcttttgtgtgaagatcctgttttcgcagaatatattaaatgtatcctaatggatgaaagaacttttttaaacaacaacattgtctacacgttcatgacacatttccttctaaaggttcaaagtcaagtgttttctgaagcaaactgtgccaatttgatcagcactcttattacaaacttgataagccagtatcagaacctacagtctgatttctccaaccgagttgaaatttccaaagcaagtgcttctttaaatggggtaagaactatgcagaggcggcggcacacacttttaaactgtccttcagttaactgtgtggccttcatatgattttactctcgtaactttaacttactgattcaaactcttaagccatgtgcgacaaaaaaacaagttttaaatacacgtttactatgccttgtatgtacacagcacactctatcaccttggaagctacaagctggtatcattaaatgctgaaaggtaataaagggaacatcttagtggtcttatctctagttgggtatatttttggaaacaatacttgtgatgtttctattactgcctatggctcctatgtaactgaaacaattaatgatctactgatttaaaaaaggcagttaaatctagagcattagttgccttgtgcagactcccatgacagccatgtcctagaataatggaacactctggaaatgggctagaatgttgagcagcagcctcccaaatcacagtatgcataaaagccaaaacagatgacagagctcagtaaggaagaccttactatttgtgacatccatcagaattttaacttgagaaactgatttcaaggtttgtttttaaaattcttatatttccttttccatttttcagaaaacactatttcaggctttggtctgacttactggtttgtgggcataaaataatgctattagtgactttaagaactaatgaggctgggcacggtggctcatgcctgcaatccaagcattttgggaggtcgaggccggtggataacgaggtcaggagattgagaccatctcaatggccaacatggtgaaaccctgtctctact

SEQ ID NO: 520 - DNA, 1684 bp, Homo sapiens
agtgagcaacagtcttactgcaaagcaggagcacaacccgtctctttgtctccgtggtcaaatcaattacttcttagaaagtctaatttttttcaaaatgaccatgtacaagagcaaacgcagacatcagagatatatcaacatggcaggagagcccaaaccatacagaccaaaacctggaaacaagaggcccctttctgcactttacagacttgaatcaaaggaacctttcctgtctgttggcggttatgtctttgactatgattactacagagatgatttctacaatcggttatttgattaccacgggcgtgtgcctccacctccccgtgcagtaattccgctgaagcgtcccagagtggcagtcacaacgactcgcagggggaaaggagtcttttccatgaaaggtggatcgagatctactgccagtgggtcaacaggttctaaattgaaatcagatgagttacagaccatcaagaaagaattaacccagatcaaaactaaaattgactccttgctagggcgcctggagaagattgagaaacagcagaaggcggaggcagaagctcagaagaagcaattggaagagagtctagtgctgatccaagaggaatgtgtgtcagagattgcagatcactctacagaggagcctgctgaaggagggccagatgccgatggagaagagatgacagatgggatagaggaggacttcgatgaagatgggggtcatgagctgtttctacagataaagtgatctgaaataacgcatgatgccacaaagcagaaaagagaaactgtgacaacccccagaaatgtgaaaggaggtttcttactggacagcagcatctttggttcaatttatataaaaacccaaataaataaaatggacagtattgctcagttttagaaattccatttcttctatgttttaagctgtacaattgtcaggtttttatggtttaaattgtaaatgtgttttcccctttgctaattatgttttttttttcagtcttaaaatgtgaaaggcatttatgaatggtaagggaaacactatatacaaatgtatatttgtaaaagctatttttatgattagcatgtttcactgttgatcatatataaagtcaggtgatattgcaattctgtatttaaagcttatttccaacaatgtcatgtaagaaaagatgcatcttatgctagtttttataatttatttataatttatagtttaaagtacttcagatcataatgataaaatacttgaaaaagttatatttctgccctgtataagcaccctttttattaataaagaatgcagatatttcagatgtgatataatagttaaagaactgttggtttgatctgtgattaagttgagcatgctccgctctactgaactaaatgatccaattattacttcagtctgggtatgagattccatggacaagtaaggactagattgccaaggaaaagactgtcttgcccttggatccaaaagtttaaattagtgcatacatcatgtcatttcacctcctgttcctaggaactctccattcccaagcattgccagtgttttccagataatcttagctgttgtcttgtgctgtggaaatggaagaaaccatcttcacagactgtaggagaattcaacatataatttcttaataaatactgtttcttttaaaac

SEQ ID NO: 521 - DNA, 1563 bp, Homo sapiens
agccctctgcctcccagctccccgccagcccaacagctctccttcctgcgcagtggcctcctgaacatcctctacctgcacatgcctgactgcccggtatccctgctccagtggctgttccagctgctgacatggcctccagaaacatctttgggagcctttggtcttctgtgggatctcattgtggatggaatcttccttcagcctgacgaagacaagcacctgtggtgcccctcactgcaagaagtcagggaggcattccacagcctgggtgcccacagtcctgccctgtaccctctggggcccttttggcacggtggcagggtgcttccaggcgaggctggcctgaatgagaatgaggagcaggacgctccccaagagattgccttggacatcagcctgggccacatctacaagtttctggcgctgtgtgcccaggcccagccgggggcctacactgatgagaacctcatgggactgattgagctgctgtgccgcaccagcctggacgtggggctccgcctgctgcccaaagttgacctccagcagcttctcctcttgctcctggagaacatccgggagtggccagggaagctccaggaactgtgctgcaccctgagctgggtgtctgaccaccaccacaacctgctggccctcgtgcagttcttcccagacatgacctcccggagcaggcggcttcgaagccagctcagccttgtggtcattgctcgaatgctgggccagcaggagatgctccctctctggcaagagaagacccagctgtcctcgctcagccggctcctgggcctcatgaggccatcatctctcaggcaatacctggactctgtgcccttgccaccctgccaggagcaacagccaaaggctagtgccgagctagaccacaaggcctgctacctgtgccacagcttgctgatgctggccggggtagttgttagctgccaggacatcactccagaccagtggggcgagctgcagctgctgtgcatgcagttggaccgccacatcagcacgcagatccgggagagcccccaggccatgcaccgcaccatgctcaaggacctggctacccagacctacatccgttggcaggagctgctgacccactgccagccccaggcccagtatttcagcccctggaaagacatctaaagggacagggtcagggcagcccagggctcctggcttcagcaggaagtgaacaggctcagggaactggaggaagcgaagcatcaaggccagaggaggccacatgctgaccagcctgatgaggcaagagcctgcccctgccaccgccccgacccctctcctctctgcaagagcctgcctctgccaccgccccgaccccctctcctctcagcaagggatgggcctctctgcctcgcccacccctcagccctcctcccagccatctcctcttccctaaggcctctgtctccatagctctggtttccctgggcctcagtcctccccaccctccttcctctgtctccctgtcactaatgtgaggtttctttgtgcacattaaagtcttctttcagcatc

SEQ ID NO: 522 - DNA, 1967 bp, Homo sapiens
gctgatgcatcgcagtgtccacatatgcagggaggctggtttcctaggaagcctcccaatgaggaaattgttgggaatgtgctgcaaggcgctgcctcgctctggagccagacgagaggccggagcatccgccccaacatggctggctgtgtgagcctcaggaacgctggcagctctgcaagactctctgccatctgcaaaatgtggcccaaaaactacttaaaaattaatcatatcaaaacaagagcatccatgaaccaacttctgagaattgctgttgctgagaaaggcctagtgagcccctgtttcctcaggccaccttcctcttcctcccattgccaagggctcctgtcgcccccgtctgcgttctcctgcctggcgctctgtcacctcctgtggaggccccacgtgttcatctgagggctgctgctgcccttccagtattatccacacctgccattattactgggtcttgctctctgacaaaggggctacagcgctccttcctggtacacatgcagccctcctgcccttgctcaaggaccgcacctcaacagggcacctgctctcatctggccatcgcctcggcataggtagctcaagatagatgttcagccccaagcctcatggctgactaaccctgtggaacttaaaagttcaaagacagggatgcctggattctgtctctgcctctgcacgtgtgtctgtgcaggcatccgagctgaccggccagcttcccgctggtggaggtgggaggcataggctgcttctacacgcccaaagcctacccactacagagttacttgcagtcacacatgctgactaagggaggagagcaactccaatcaaacgaagctaaggaagatagcacacaaactggcaagaaattcctgagagtctcaccctgttacccagactggagtgaactggcacaatctcggctcactgtcacctccacctcccaggttcaagacattctcctgcctcagcctcctgagtagctgggattacagaggaggaaaatgagctgcagaaggatcaaatgacctgcctgaggtgccctatctgttggcacaggccagagcacatggtggatgcaggggcacccccttcccttctcctcccctccggctctttgctgacaggattctctcttgccttctctgatggtacctgtgctacgtgccacatcctttccctcaatgaatttcaggcagtggaaggggccgcagaagttccttgactcatgaggcgaggcattcagcggcctcgtgacacctcccaggatctgcagtcattgggctgcacttgccaatagcaacacctggcaaaaatagctaagaagcagagcggcctgggctcaggagctgagcaacccctgactggccagatggagactgtgttgagctctgcccaagccctgtgatcctggaaaacagtgaagttaaggagccatctgcattctagggaatggcccactgcaaaaaatagccttccttataggacgtagaggactcatgatgtcccctcatttatgatgagccaacacacagcccttccaaattccgattctttgcttcataactgatgagctgttttgttcccactggtcaatcggaacaacattcttgctaaccagattttggttcagctcttctccctccccatgtacctgccctgtgtcctgtcctcatcctgagccagcacacacccctccttagtagctcctcctgcagcaggctgacctcggactctccctgatccattgtccaaatatatcaccctttcaccctacatcctcacaccccattctttctagttttgttcattcctccctgtgaaagatgaaccctctttgcctaaccccggacctgcttgcagactgctatgatggccagagtgtcccccctactgcaagagtcccttctgtcccttgcaacatcttttaaataaaatctctctttacc

SEQ ID NO: 523 - DNA, 2747 bp, Homo sapiens
attttgagttgattttcacatagaggtgggaggctagtttcattcctctgcatatgaatatccagttttcccagtatcatctattgaagatactgtcctttccccaagggatctctctgggatcttttaccttagtgcctggtggagttcctggaggtaaagcccacagaagtgtgggtctcgcacctcctgagactgcttccccgagtttctcactctcactagtccacaccgagcatccagcaccagcttatggctctggcagtttctgctccaggtctatagtgagcgagagctgctactttttacttgggcattcattcaaagtgttgaagaataacagcctctaccatcccttattcactggctcatcagctgtcccaggttttgctcttctaggaaattgacaatggcccttcagctatgctaggtctataatgggaagtgtcacagttcggtatttctgttatgggtgcctttttacatctgcgacctggacagttttgctttttgtttatttcaacttcagtgaagtgactcagccacttaagaatgtgcccgtcaaggggtctgggccccacggaccatctccaaaaaaattctatccccgtttcactcgaggcccaagtcgagtgctcgagccacagttcaaagcaaacaaaattgacgatgtgatagacagtcgtgttgaagatccagaagaaggccacttgaaactctcttctgaattaggtatgatttttaatgaacgcgatcaagagttgagagacttgggctatcagaaacatgcttttaatatgcttatcagtgaccgcttgggctaccacagagatgtgccagacacaaggaatgcagcatgtaaagaaaagttctacccacctgacctgccagctgctagtgttgttatctgtttctataatgaagcgttttctgccttgcttcggacagtgcacagtgtcatagaccgcacgccagcacacctgcttcatgagatcatccttgtggatgatgatagtgactttgatgatttgaaaggagaactagatgaatatgtccaaaaatacctccctggaaaaattaaagtcataagaaatacaaagcgtgaggggttgattcgagggagaatgattggcgcggcccacgcgacaggagaagtccttgtgttcctggacagccactgtgaagtgaatgtgatgtggctgcagcccttgctggccgccatccgtgaggaccggcacaccgtggtgtgcccagtgattgacatcatcagcgccgacacgctggcctacagctcgtcccctgtcgtccgcggagggttcaactggggactgcacttcaaatgggatcttgtccccctttctgagctaggacgagcggagggagccactgcaccaataaagtcaccaacaatggctggaggtttgtttgccatgaacagacagtatttccatgaacttggacagtatgatagtggcatggatatctggggaggagaaaatttggaaatatcatttcggatctggatgtgtggcggtaagctcttcatcatcccttgctctagagtaggacacattttccgaaaaaggcgaccatatggatctcccgaaggccaggacaccatgacacacaactctttgcggctggcacatgtctggttggatgaatacaaggagcagtatttttccttaagacctgacctgaagacgaaaagctatggcaatatcagtgagcgtgtggaactgagaaagaagttgggctgtaaatcatttaaatggtatttggataatgtatacccagagatgcagatatctgggtcccacgccaaaccccaacaacccatttttgtcaatagagggccaaaacgacccaaagtccttcaacgtggaaggctctatcacctccagaccaacaaatgcctggtggcccagggccgcccaagtcagaagggaggtctcgtggtgcttaaggcctgtgactacagtgacccaaatcagatctggatctataatgaagagcatgaattggttttaaatagtctcctttgtctagatatgtcagagactcgctcatcagacccgccacggctcatgaaatgccacgggtcaggaggatcccagcagtggacctttgggaaaaacaatcggctataccaggtgtcggttggacagtgcctgagagcagtggatcccctgggtcagaagggctctgtcgccatggcgatctgcgatggctcctcttcacagcagtggcatttggaaggttaaggtggatgctgtggcgggaacgttgcttcatcaggcgttgcctccggtgtggagtttggggctttaggaaagcctgggttgggtggagcagaaccatcttggagaagatgacagttccctgtcctcccggagatgcctgggtgtgttagcagaggtgacacgtgtctgacagagacgggagctctgagtgtccacgggtgaagaagtgagtgtccacgggtgaagaagtgagtatgtttcacctggacattaaggtgatgtttgagctgctgttaaggaatttcttgcttatagaggcaaaccacagtatcattttaactctagaattgggcttgtacagaaggataaaacccaggaaaatggatatttctattcagatttatttatgcctctttttaatcccctttaatgatgcagtggtttttatctgatcaggaacttgtcatgatttcctttcttagacttcataggagatagtgcttt

SEQ ID NO: 524 - DNA, 2544 bp, Homo sapiens
aaaaatcaagatggcgctgttctctgtgcggaaggcccgtgagtgctggcgcttcatccgggcacttcacaaaggacccgcagcaactctggctccccagaaggagagtggagagcgagtgttttctggcattcagcctacaggaatcctccacctgggaaattaccttggagccatcgagagctgggtgaacttacaggaggaatatgacacagtgatatacagcatcgtggacctccactccatcactgtcccccaagaccccaccgtcctccagcagagcatcctggacatgactgctgtgcttcttgcctgtggcataaacccagagaaaagtatccttttccagcagtctaaggtgtctgaacacactcagttaagttggatcctcacctgcatggtgagactgcctcgattgcagcatttacaccagtggaaggcaaaggctgcgaagcagaagcatgatgggaccgtaggcctgctcacataccctgtactccaggcagcagacatcctgtgctacaagtccacacacgttcctgtcggggaggatcaagtccagcacatggaactagttcaggatctagctcgaagtttcaaccaaaagtatggggagttctttccattgcccaagtccattctcacatccatgaagaaagtgaaatctcttcgagacccttcttccaagatgtcaaaatcggaccctgacaaactcgccactgttcgaataacagacagcccagaggagattgtacagaaattccgcaaggctgtgacagacttcacgtcagaggtcacctacgagccggacagcagagctggtgtttccaacatggtggcgatccacgcggccgtgtcgggcctctcggtggaggaggtggtgcgcagtagcgcaggcttggacactgcacgctacaagctgctagtggccgatgctgtgattgagaaatttgctccaatcaggaaggagattgagaaattgaaaatggataaggaccacttaagaaaggttttacttgttggatctgcaaaagccaaagaattggcctctcctgtgttcgaggaggtgaagaagttggtggggattctgtagcaaggtcagccagtcactgcactcaagtcaaggcagctttcctcccacagattttagcctgtccaaattcaattgagtgtgatgatcagctgcatttgatgactgctgtcaattgagcaacgttccaatccctgaggcaggcacagctcttccactccagttcaatgacacacagttttttggtctgaagtattcccgaaaacgtgaacaattactgagccatggcgtgtgcttgcttgtgcagtatttactgtgcaggtgcactttgtctgtgttgtgcagacaggtcctatgctgcaatcctgaatccagtgggtatttgcagttcataaagagaggttcattcttgcagctcatgtgatgatgatgtgatgatgtttatcctcatgtattggaatgacttgacttgtgctagcaaggtggctcgggctcaaggtacctgctgccaagctgaatagctggagctcaatccacagggccagcatggtggaaggagaaactgactggcaggttgtcctctgacctccgcttgtctgccatggtatgagtacacacacacacacacatgcgcgcctaagtaaaaatacaataacctacttgtttcttaaaaggcacacactgacttacttatttcagcaaatgtctgtacttaagtgatccaggaggtcattggagagcattatattgcttcagttccatctatttattatacagggcctgtgttcctggttgtattcataataagcacttctatttttacattcatctcagtttagtctcaccaaaccctacctctgtggaacacataggaactgaggggtagaacatggaattagctgtacagtgtcactaagtaaataagaagcaagtccaagagtgaaggcctagctcccctgcttccaagactggtgctttttaagacttctcccaaagctctgagggccaaagttttggacctctaaacattccagtattcagtttggatactgaaaagataaaggctgaaatactgatttttgtttatgtgaactcagctaatggttgtgtattttaaatctggatccagccacctctggtcacacttacctttcaaaaccccaaaaatgggtcccatggcctcacttccaaattcatgctggagatgcctgcttgtctcggccagattccagtgggagcgaagtctaaagcatctgacgtttccagtgaagggaagcttcccgtctcagcctgcctcaggctctgtgaaatcacagagtatagctctgcacgtccatgttcacagctgaaacgaatggcagtcctggcttacatcccaaggcctgtatcaagattgattttgcagggccagcaagatggctcagcagaaaagggctccttttgtgaagcaagcctgactatgtgagttcaatccctgagatccatgtgataaataaaggagagaaccaactcct

SEQ ID NO: 525 - DNA, 1624 bp, Homo sapiens
agcgccctgcaccgcaggcccagcgctcgccccaccgaaattgccgaacctggttcacacactcatttactcattccgcagataggtctgagggcctcccatgggccacgcgctggggattcaaggtggctgggacattcccctgctctagaggcgctcgcaagttagcggggacaccgttaccgcaattacaacacaatgtagcaagtgcttctaccaggtgcctgctgagatcatgccagcaagcatgttctgcctggatgacctagggccccacattgaactggggcctgggggatgcataagtttgtcacgtaaggggcatgtgcaagaatggaagatgtgcaaaaaagggaggaggaggcatttcacggagaaggaaacggagtggaagcagcctgaggccctcatccaatgcagatgtctgtgccgtgcgtcttgtccagcctgcagaaccatgagccaaataaacctcttttcactacccaatctcagctcttatcaaaggtgctggaagtgcttgatcctgaccggaagctggaggacacatgggcttattgtcaggacaccaggaaaggaatgaaggaacccacgaagcttttaaaaaaacattctacccaagtctacctgggaccttccaagaagacgtctgtgtcaaacgcaggccaatggctttatgaagaaaagccacataaaatggatttgctccatgaaaatggtcctcgtcctggtcttcatgaaaatgtatgcaaagcagttagtgacttctgcaagtgggttactacttttggaatttcggacatcgatgaagagttcatcttgaaacagtttgacattgactatgagaccaaaccaagccatgatgcgctccacacgatgaagctaaatcaggttcctctggagctaaagcgtagtgtggggctcagtaaactgcagaagacagagttcttccagaaactaggctatgagaggaaactccagaaaccacagaatccttataagccaaagtgggtgaagatgaggtatggagcatggtatttgaaccccaagttgtggaaaaagcaaagagtagacgagcctctggttgaccctgaggtctcacataaggctcaagaggagaattttaaaaaggagctgcaggaacaggaggagttacttgcagaccttcacggaacagttgcctttaaggatttcattctaagcaggggctacaggatgccacgtttccttgagaatatgtatatcgggaaggaatgtaaacgtgcatgtaataagactcctataaaacgaactcaagcgtagaagaatcgtaggagaatgattaggcagattttattactacgtacttggctatttctctgtctccttttaaagattaaacagagtttatgatgagtgtcccactgtggatgttcaactttgacttggcaacatctgtaaatgtaatacctgatggttataagcatttctcaatggatttctgcttcagttaatcaacattttgtatactttatcacccatgagatcaatattcacatgtaatcttctcatatttttgtggcacgtgaatattatataggtatatcaactattggtaaaaataaataaaggcataaataaaaac

SEQ ID NO: 526 - DNA, 2465 bp, Homo sapiens
acagcagagcctggcagggctggggtcacaggcactgcccagggctccttgggcctcccttccacagctgagaagacctctccacggagctccggacggctggggtctggctctgaggagccatgagcacagagggccccagcctcgccagctccccagccatcagccccctcgcctttctctcagctcccgtcactcccgggacccttgcagaggcaactgaccccctccccatgctcatcgccctggcctgcatcttcctcctgctggccacctgtctgctgttcatgacgctctgcaagccggccgcgctggacccgagccgccgcagggctcacgagtgcatgccccaccaccctgggagccccagtgagccccagctccggctctggaagcgcctgggctccttgcgcctctccctgcacagcttccgccatggccggcccaccgtccctcgacagcccctgccgggccccgaggacaaccgcagccactgtgactacatggaatctaccaagatgtaatggggtgtccacaaacatgcccccacatccccctaggtctacctgtagatcctcctgcttcagagaccggtgctgcaggctgcaggaagacagtggcccaagcagtctgggacacacactcaccccccgaagctccttgcatgcccaggccagcgccctttcccaaagatgatcctcagaagagcaccttcctctctgcagaccccctcgctgctgcttgatgaaagacttctggtcaagagatgtgcactcgtggtcatctgggcctttggcctgaggctccacagggtacaacctggggctcgtaaccacctcctagaagcagcaccctcgctcgccacagaagccttgccctccaggtgccaaagcccagcatggagaagttgccaaatggcaaaggttccctttagtcaagtgaaatgctcagcctacaccggggccaagacactgtcctggcatctgtgctggcccagtgctggggcaaaacctcggggctctcttccttgggtttcccgggtgctgccagcatctgcctggtgccctgtgggagcagctgcctccctcctggtggaacagatgcctgggtgccagctgggaggaggagcaaacagggctctccaagcatggtcttggcagccgtcttggtggcccctcttcagggcacccacgttgggatcaatcaggaagggattgaagatgatcgaggaggctcccttcagaggccagggcgggtgctgtgacagagtggcaagaggcagggcatttccagcagctggaggtgatgccacctggactcggaggaggacagctcacagcagctccacacctcacccagggaaagcggcagcctccccgagggtgggatggtctggacctctccaggacagctgtggggtcccaagtcctgcccacactagggatgctatctgtggttttggtgagtgctttgctgatgacccgtcaaagcagtcccaccccaggatgggcttctcagaatcccaaacccttgacctctcctcacaacgcgagggttaaacactttggtcaggtcccaaatttgaagggtgggcagagggaggacctgggctgcccagctcctgtcccagtcagctggccaggatcccaccacaaagctgccccacccccatcctgctgtgacccacagtgcagccagccacgtctccccaaggagtgagctctggcttgccactccccagctccaaaaccttcactggctccctaatgccaaatggatatagccaaagctcctcagcgcagtgtgcagtgccctctgggagctggctccaattaatctttctagcctcatcttgatccaaaactccaggaaaactgaaagacctgtcacccactaactgtggcttatgcttcacacacacccactctgtgaagccctcctgcctggagccgcccctactgtctcctacctctcttggggaggaaaaggaacattctcttggcagcatgggtcctttttgtctatgtcttctctttcctaccagcttgggagcttgcagagagccagacattgtccagcccctcactttgactccccagttctgtgcacagaagtatgaggcttctgtgtacagagtgaagcgtggcccagcctgggtgtgtccccaccctctgaggcaggagtcttggtggaagctggcataacacagagcctcatcttccctcagatgactctagaaagatttctctccaagcaggctctattggagaagcccactgtcccttccttccaagtcaatctgatctcaaaaagtgagtccggcttcacaagaaacttaccaagaggaccttggagaagtcatcctgagacgctgcatttctccctgagaaatgggagaactcagggctgccctatattaactcgctggctctaggatttcagtaagagtagtattgtgtaaatag

SEQ ID NO: 527 - DNA, 1464 bp, Homo sapiens
agtcgcggcggagcgcggcgttggcggcggatggagggcgcgagcgggcgctgatgcggcgcctggaccttcgctgcgcgacttcgggggcgtcggccgagttgggactccgcgatgcagctcctgaaggcgctctgggcactggcaggggccgcgctctgctgcttcctcgtcctagtgatccacgcgcagttcctcaaagaaggtcagctggccgccggcacctgtgagattgtgaccttggaccgggacagcagccagcctcggaggacgatcgcccggcagaccgcccgctgtgcgtgtagaaaggggcagatcgccggcaccacgagagcccggcccgcctgtgtggacgcaagaatcatcaagaccaagcagtggtgtgacatgcttccgtgtctggagggggaaggctgcgacttgttaatcaaccggtcaggctggacgtgcacgcagcccggcgggaggataaagaccaccacggtctcctgacaaacacagcccctgaggggccccgggagtggccttggctccctggagagcccacgtctcagccacagttctccactcgcctcggacttcacccgttctctgccgcccgcccactccgtttccctgtggtccgtgaaggacggcctcaggccttggcatcctgagcttcggtctgtccagccgacccgaggaggccggactcagacacataggcggggggcggcacctggcatcagcaatacgcagtctgtgggagcccggccgcgccaagcccccgccgaccgtggcgttggccctgctgtcctcagaggaggaggaggaggaggcagctccggcagccacagaaggctgcagcccagcccgcctgagacacgacgcctgccccaggggactgtcaggcacagaagcggcctcctcccgtgccccagactgtccgaattgcttttattttcttatactttcagtatactccatagaccaaagagcaaaatctatctgaacctggacgcaccctcactgtcagggtccctggggtcgcttgtgcgggcgggagggcaatggtggcagagacatgctggtggccccggcggagcggagagggcggccgtggtggaggcctccaccccaggagcaccccgcgcaccctcggaggacgggcttcggctgcgcggaggccgtggcacacctgcgggaggcagcgacggcccccacgcagacgccgggaacgcaggccgctttattcctctgtacttagatcaacttgaccgtactaaaatccctttctgttttaaccagttaaacatgcctcttctacagctccatttttgatagttggataatccagtatctgccaagagcatgttgggtctcccgtgactgctgcctcatcgataccccatttagctccagaaagcaaagaaaactcgagtaacacttgtttgaaagagatcattaaatgtattttgcaaagcc

SEQ ID NO: 528 - DNA, 2326 bp, Homo sapiens
ggcataccacttgggaagctctgcagagaggacgtgacctttcacaggttttccaaccttacacacttagaactcggaggaatagtacaacaattatgagccgtcacagcctggaagaaggcctggatatggtgaacagagaaactgcacatgaaagggaaatgcaaacggcaatgcagataagccaatcatgggatgagagcttgagcctgagtgacagtgattttgacaagccggagaaattatattctcctaagagaattgacttcactccagtttctccagcaccttcacccaccaggggattcggaaagatgttcgtgagcagcagtggattgccaccaagtccagttcccagtccaagacgattttcaagcaggagaagtcagagtccagtcaagtgcattagacccagtgttcttggtcctcttaaaagaaaaggtgaaatggagacagaaagtcagcccaagagactcttccaaggcactaccaatatgttatctccagatgccgcgcaactgtctgatctcagttcatggtggtgttatcaaggagaagaaattcctgccttgaccagatgtgtggagcatctacaaatgaatgaatagttatttacacacaaaccactgtgtacaaaagcgtccatggagctgtcagtgtctcgagtggtattatgaggcctcaggtgccttggggtacattgtcatgctataagggatgtatatcataaggtatggtggaagaggggccttatgtgaatgattgccacatactgtttctgttgctgctttttttccgattcctttttgtcattggatttgtttgttttgtcatgtggtgagtggtgttttagttattgtgttgctgccagaatcagaatccagttcttgttcttactgccttatagttattgtgttgccaccagaatcagaatccagttcttgttcatactgccttgtagtgagggcagtttaatatctacaaagaagcttttagaagctgaaaaagtcaatgtgattgtgcattctgcttttaagaagctgtttcagctatgaactgtgtatgtgctataagtgtgaggtaccataagttatttaatttttaaaagaggaaactcctgagtgagctgtttaagaaatctgagtgtgatctattgttacgttatttataactaggtaaaatgtctgtcgtgatagatttcttttaacgttcagatactgtggttgggttgtctatatttaatatgcagatttgcctgctggaatcataatccatttttaagtgaatgtaagaaatgaaaactactgcatttgtgtcttttgaaggcaaggatccttggattttaaaggaagagtatgtgctttgaaggcactcagagactagtaatagcatatggtttgaagggaaacccattctctttcaattacaagagagcatcacttagcgtgcagtacttctgttacagcatccgatgtgtcctttattttaaattgtaaccataacagccattaatggctttatttcttgtattgctctcatctgggaaaagtctctacttcttcaaacgtaacataaatctattatgaagcttgtcccctagtatgccattataaagaaaaaattcttcgatggtatgcagtgtatctattctgtttgtaaaagatcatgtcaaaatgttctgcctctataatgataatagatggttttgtctttcaggatatttatccacctactgtcttctttgccttaaagggacacttggccatcatttttaggctcgaacttaacactgttaagaaataactgaaatatgatggtatttacattaatttttgaaattcaatggtgggatagaattaggtcaggaaatggaagttgttccaatggtgtgagaactaggagacaagatgattcactttattatttaaaccaagcttcatttttagtttttgttgtttaaatggactggaaagttaagtttttgcagggattgttttgaaataaagagatatgctaactcacagatgaactttgttaagacccctttatttttatataaagtctaatatttgaaaagcgattgttataaagtaaaattctctcttcctattctaatatatatcatatatttcaggcttctatttgaaaacaggtataagagatgatatgatacaaccctatagataatgttttttgcttgattgacttatataatcactgtttcatgattactgcttttggaataataggaagttttgtgaaatgctggccttgtgtatatcttagaatgcaaatttaataaagtgtgtatacatgcataaaattt

SEQ ID NO: 529 - DNA, 1738 bp, Homo sapiens
aatgctaagaaacaaagggcatccattccaaatgagtagcagaggtgaccttctagggtttctacccatgctcagttgtatcccattccctgttcaccttttgtccccagcactgatataaaagccatatatatgttagtcaggtttgcactgagtcttcttccaaaccttcagcctggacaacagagtgaggtccccttgtggccagaggccagccctccttgcctgccttcctttgacctctcttttccatccatgaagccctcaggcccttgtcattttttcaccacagaaaactcatggcttctccagaagcctgagtatctctctttcccagcacaaatggcagcatctctatcctgccccatctgggccacttcagcttcctgtagacacccaagacagatggacagtgttggagggaatcaggctttgaggatccagtgtgaagaagttgcagagtgtctttttattttattttaaaaagggggaaggggcttttggttttgctttgttttttggatgaaggagtgagggaaatgagggaatacccccaccagaaacagactggaaagcctgcctgtctcttggagatccttctttgtcttgttagtggtacatgggaagttatgtttttactggtgtgtgtgtgtgtgtgtgtgtgtgtgtgtgtgtgtgtacttaatgatgggaaggtaagactctgatcaggattatgaactgcggtccttgggaccaaaggtgtggtcatggtagagagttgtaggacaatagggtgttttcagaatctgggtggccacagagtgggatttcctggtatggacatcagaagtcactggactcttctcccaaccccagagttatgggattttggtgctttctcagggtctctccccagactcactcttctcacccatatcccacagactcactcatggagacccccttgtcaatatcccctctacctttactcctttgccctttcccaattcgtcttctaccacctggattcttttccattcatgaacttcattcagcccttccaaagcccaagatttgcattcccttgacagggaggaaaggcaatggtaggaacctctggtggtctgggtgtctatgtgcctggtgaccagggctggatttttattactctgagcccactgctagtgaggagccttgaggggtggggacaggttgctgagtgattttgaacgttgacaccagtgtggagccagtgtgggtgtggggagcagtgccttcctcaggtcccagctggtcctgatatgccacgtagtggatggcatctgtcttggtccatgggcttggtgggaacatgcttctgcttgtgtgttttccatacctgagggctgacgtagcttaaaccacagggcatcatgccaaacactcactgctgggcaggtttatttctggggatgtcagggtactggggtgtaggcactaagcaggatagagttagggtgtctggctagtaaggggttctggacgcctctggggctgtgagttttcatctcaaagtctgttccagagaaaggaaagtagtatagaggtgatttttagagaagctgagaccatgaaaacaagcctaatcccttcccctactcatcgcactaatttacactcacaacaccctaggctcactaaacattctactactcactctcactgcccaagaactatcaaactcctgagccaacaacttaatatgaaaaaaaaaaag

SEQ ID NO: 530 - DNA, 1450 bp, Homo sapiens
aacccaagtaacttggaagacagtttccgctgccgtgcgagtcttcctgtttgtttttatccaaggtctggcagaattcgcccccaaggagaaagcgcctgtgcaccaaagctttccttaagagacttgtccacttgctcctcgacaagccacgcacatcatggggtgagccccatgcatgagtgcggctggaaaggccggcagagccgatacccgacagttgtttccttcactgggcaaacagcatggtcacggctgtcaccgcgtgcctcggcgttgttcccacggaaggcggaatgcatttctgcaaggcgcgtcatggctttcatctccgaggagctccggcagggtcagaagcgttgctctcgttcaccggcgccgactgccaaggctgaaactggtgatgaggtcatgggcacccggaggcagcagcctgagaaacaccctagagacctgtgacatctcggcccacaccccacattagacctcaagatatatccaaagtctctttcccgcccatctagacaggaatcttgaaaagtttatttttggccatcaagattgctgaaattcttgttgaccgaacgggtcaagctgccctgcattccaatgctgtccctccaactcaaagttgggcagaaaagggtgtaaacacgtgcagtccatggtccagtttaatcagccactacacaaacttcccacaatgttgacggctttgctaaacaccaaggaacatggtaagaaaccaatcctagactcactaatctacacttgtaaatgtaaagatcttcaaaaaatgccagaaatccttagtaacatcaatgataacatctttaaagtatctggtatagtgccacaaccggcacagaagaaatggaagaaatcataaacatcaggctttagacaatggttttctctttagaattcaactgtatgaaaagaacaaatttaacaaagaagtatgtgtaggtgatacataagtatcaattaaggcttcgaagtgccacacatcttgcaacccaaagctgtctgaaccagaaaagagccttctgcaaaccaaacccttattcctttttgttcttcataaaaatggttgaagtcatttttgttttaaagtcatgttgtaattgttttgcttttggacaaagtattatttattcttttaagaattgtgggccaggcgtggtggctcacgcctgtaatcccagcactttgggaggccaaggcgagcggatcacgaggtcaggagtttgagaccagcctggccaatatggtgaaactccgtctttattaaaaatacaaaaattagcctggtgtggcgcgtgcctgtagtcccagctactcgggaggctgaggcagaagaatcacttgaacccaggaggcggaggttgcagtgagtccagatcgtgccactgtactccagcctgggcaaccagcaagactctgtctc

SEQ ID NO: 531 - DNA, 1832 bp, Homo sapiens
gttctccccgcaggtgctgcatggagtgagtggcggcatccaccgtgaggaggagaggagctctgataccctcaggacccgccaggaggggcatcacggaggcttctggacgacttggagctgtgtcctggggagaaaaccgctcctgtctgggccctgagtgctgaggaggaagctgccatgcacttttccctggcatttttcctgcatggagagagaggtccgaggtgccctacatcgtgcgccagtgcgtggaggagatcgagcgccgaggcatggaggagataacaaggacgtgtcggtgatgatgagcgagatggacgtgaacgccatcgcaggcatgctgaagctgtacttccgtgagctgcccgagcccctcttcactgacgagttctaccccaacttcgcagagggcatcggtgcccctcacagggtcctcactggcggccagcgctgtgggtgtgacgatgatgacaagcctaaactgcgcaaggactcgtgtcccgggcgctccatgtgaccacctcgggagaggtctccggcttgtcgtaacccagaggagtgacccactgcctcctgcagctctttcagacccagttgcaaagaagagctgcatgctcaacctgctgtcgtccctgccggaggccaacctgctcaccttccttttccttctagaccacctggaaaggatggcagagaaggaggcagtcaataagatgtccctgcacaaccttggcacggtgtttggccccacgctgctccggccctccgagaaggagagcaagctccctgccaaccccagccagcccatcaccatgactgacagctggtccttggaggtcatgtcccagatccagatacctaataagatgctggaatgtaatccctggacaatccgtgtcctggcagcatttggtcttcctctaagcgcctggctccgctgttctcaggagtgggttctgaagtctctggagaacaggatacgtggagggttaggaaggggccaggcctagagacgggagactccctcccggagcaggtggaggcacaggaccattcgctaccccatctgccggcacctgcgggggagcccaggcattctttgtaagccctcctgaccacctggctcaaagaaaacagaagcatggaggccgccaagtattttcaagaaataaccccatgaacatggcatcacttttttagaaagaggggtttggggcaggcagaggagagaagggagagcaaactgagagccaagtttccagacagtcctgcaggaggagaggatgcagctgcgcagagggaagcaggatcacatttaaggaagtgtgtggggtccctggatgacaccagcacccagtgcggctctgtctggcaaccgctcccaaggtggcaggagtgggtgtcccctgtatgtcagtgggcagctcctgctgagcccgcagctcactggggagcctgacagcggggccatgtgcctgacactcctctctgcttgtggacctggcaaggcagggagcagaaaacagagccacttgaaggctttctgtctgcatctgtgtgcagtgtggatttagttgtgcttttttcttgctgggagagcacagccaccatttacaagcagtgtcaccctcgtgggtggcgaggacagaacaggagcctctgctctctgtacctatctgggcccggtaggctcccttgtcctggcttccatctctgtctcagcgaccattcagccctgcgcaggaacacgtgttgcttagaaaagccaaatccagccttgtctctgcctcctctggtctcatgatgtgcatctgttaccttgaaactgg

SEQ ID NO: 532 - DNA, 1867 bp, Homo sapiens
agtttcccaatgtttggggtccagtgaaagagagggaagttgggcctgtggctggggcctggtgtgtccttactggcaggaagaggaagggagggctccgcctacccccacccccacccccaccgtctcaagcctggggcctttagctcttgtggggaggctgaggaggcagaacttgtttgtatggagacaggctgtgtgccgcacttggtcccaaatgtgggaaaggagtcaggatgtaaggcaggacacaggtgttcttgaaagtggagtcaccccgtcttctccctgcctcttcttgctgagctctgggcagagttttcttccagttatacctttattgctgactgtgattctgcacctcacacctaacccgggcttggaggatacctgtcctcccttctctctaagatgtcagtcggctaaactcactcacactgaggtgcaaatgactgataacctcttgctaccattctcccctagagattcatgggggttcaagggcccagctccacatttcagaagccacgtccagctggatgatggctggcagaagacttccaatgcctaagttgggctgaccttggcttggctagtctctgccctgtaagagaaacagctgaggctgatgcattaggactttatttggggtgaagacggaaaagctacgtgcaggctaggcatgtccaggatgtcagggcggggctccgaggacacagacagcaggtctagagctgtgtgacaaggtagcaggtgcggtgggaggcggagagagtcttggtgacggcacagggaggggtgggaggtcttcggaacagagcagagtgctggggtgggaacgggcacacccactgtcctgagcctgcccctgccctcccttgattttagggggccattatgtgttacctggggcccaggctgaggtggggaacttgggttcgatggctgcccagcccttcctgaagctgtgtgaggacgagagggtcagaggtggggagtggtcctcctcccagggaccagtcgaggtcactgcacaccctcctgcctgtttctcctcagctggggcgggatggtggtctaggcttcaggggtgggccctagcacccttggagcaggcaagggctccagaagaggggctgttaccagattggtgctggagtgcctttgggagtgctgtcggttccagaaatatcccaggaccttgtctcggaacacctggaggcaagcaggatgggaggtggccagtgcacaccttccccctcatcctaggggccctgattcccacctcccaccccctgcagtgggggccctggcccacctcacagaggtagtctaggatctcgaggatggtgagcaggctggccccgatgaacagccccatctggcccccaatgtcacctgtggagacagggtcacccttcaacttacagccacctgcctgcccacacccccccagccctgggggccctgcacacacaccaagcagctctgacatctcataggccttcttctgctccacggtctcatagttgagggcctcaaagaagatgtccagggccagcacgttctccctgaggacaagaatggcctcaaatgtgcgctggccaccgcctggtgcccactgctggcaagaagcagctgtgggttctcccactcctttcaagaaccctgggagaggccgggcacggtggctcacacctgtactccctgcactttgggaggatgaggagggaggatcttgaggccaggagtttgagaccagcctgggcaatacagcgagtcccctcccctcccctcccccgccccccgccgtctctgttttttaaaagtaaagattaaaaaataaaaggaaaggaaaaaaaaacag

SEQ ID NO: 533 - DNA, 3099 bp, Homo sapiens
tattcggttccacgtcagaaagtgacacgtcaactttccacggctttgatgaggacgatttggaagagcctcgctcctgtcgaggacgccgcagtggccggggttcgcccacagcagataaaaagggcagttgctaaacccacggaacagactctctgggcaattagccatccccctctgactttggtcattgtgctggttctgatatatattttttttaatgaaaggcaactttagattttccctctatccttgctttttttcccttcacctcccacgtgtccctccatccctccccccacccctctgttttgggtatgtacaacagaagcacaaactactgaaacaaaacaaaacagcagaatgagcgttcttccgagagatggcatcgtgatgcgctatttattttccatagaaataggaagttagacggattgtctcttttctgaggggagggggtctttttgacaggagcagagttgatgtcctcaattttcatatttattggcaaaaggaagagaagaggaactttgggttggaaacaaagaaccaataacattaaaacattattatttatatattctagctgttattagaatcagactttttttgcgagagagagagagagagagagagaagggaaatcaaagaaatcgaagcaatatcctgtttagaggcaagccgcccggtggggagaatttcctcaatgggagacggttgcactttctgtgccccacggagtttgtggctccccgcggcagacccctccctcattctcctccctgacctttccatcttcctctctgcttgcgagaaaatgtcagtagttccagagaagtcggggtgcctatgcctggcctccctccacacctgggccctgaccagccgcctcctgggctcctcctcctccgtcagtagagctgctgttttgttattgctggttttttctcactttcctcctggcaaagaacgacttccaaatgcagggatggaatataagcagaacgtcatgggctcagcagtgactccaccacccgaggccgaggccgtgcttctggaagatagaaggagacatcatcgtgtgtttcccctccccttgcccctgttaagaaacgtatcaatacccattggatgatcaaggctaccgtatttcttctatttttttttatagtgcctgccaggcactttgttttatgtttccaatagcacttcctgaaataaaccaaagcaacactgctcaaggcccctggggcgatggagaaggccacccacctcactgacagtcccaagaatgaccggctgcgaggtcctagtcaaaagtcaacattatgacctggggactccagcatccttcaagcaagccatttccgaagaaggtgaaaagaagccaggatgattggcacctcctcctcctcctcctcttcttcctcttcccttgcccagccccctcctgtgcgtgtgtttcagacaacacaggagccagcacaggagtggaaaatcctgcagcgcaactcagctcagcccacagaagccttgggaatggcctcagtttgtgcaataagaagattttttttttctttttaaatcttcattatattttctttgattgtctgtgagaaagtacccaggtccgcctggaattactctacagtagaaataactgaacacaaacaaactgatggaaaaaaagagttaactattttatttatttcaatatttaaaaggaaaaaagtgctgacattgcacagtatttttgtttaaagtacctcctacttcaaaagttaagcgcaattttgtgaagacatgaaatcataagagtacttaatgtaaaataaaagactgcatattaactctaaagaaaaatgccccacattttaagtaagaaaataaagatcaactctgctctctcaggctttttaaaaagccattcatgtatgtgctttaggtatttttatttctgcgagttggatgtggtaagtgaggagtgctcagtttttttttcctccttcaaaagtctattgaaagtgttggtgatgttaaatgattgtgtgttaagatttgactgaaataacttagccacaaatcagcagtttcccccaccctcattgccccctcaccccaggcaagccccttttatctgaatgtcagaagcagcctgcctcctagttatcatgtctgatgaggtctagctcaggaaggaattccatctattgatggaatatatcccctcaagttcaatagattcgaacacagagagctttgtttaaaataatgcagcaaaaaaaaaaaaaaaagcaaaaataaaagcatcagctgaggtgatattagttcagtcacctaacaactcctagaagagatgaggaaagggaaccttctgctgagctggcttctggggcctgagcttccagagctgtccccaagggctaggaaggccgacctgaaggatgagaacctcaaattcagttgctggtgggagccaaggaagacggcgggtgttctaacgtggccctttctggctgagctggcggaagtgggcgttttggccgatgggatgtatctcggcgctgtgtctgtggcccagcaaaggtgcagggctgactggctgagccactgggttctacccgcaggctccccactgcactgggctttcacacagccatgctcttgggtttccctcccttgtaagcagagtcataataacacacgaatagtctaacgctgggtattctggtcagcagaggtccttgagtcacagtgttactgaaatggttctgagcctgagaatctctttggcctctgaaagggcagggcaggtgggcaccgacttcctgccagtcctttcaggtttcctgttcaaagccagtcctgttggtggaggggatcaccgagagtgtctgtatcattttgtagcccttttctctgacgttttctggtagaaaatgtcccttgtcaaaatgctaataattatcataataatctgctttccaaccaactcccacaagtgacaacctgtgtagaactgtgataaaggtttgcataatgtagggtttgtaccaagtgtgtgtaagtttctgttaaataaaaagtctgtttccaatg

SEQ ID NO: 534 - DNA, 2046 bp, Homo sapiens
tatttcttttctgtctgtaaatggttattgttgttttgttctttgagacagggtcttgctctgtcaccaggctggactgtagtggcataatcatgcctcactgcagccttgacctcccaggctcaaacttccgcattccgaatagctgggactacaagtgtgcaccaccacccccagctaacttttttcttcttttggatagagacagggtctcactgtgttgtccagaccggtctctagctcctggccttaagcaatcctcctgcattagcttctcaaattgctggaatttcaggcatgagccaccatgcctggcctgggctagtcctatattctctagagttctctttactttgtgctagtcaatctctcattatgctgttcacctgttataatgaataattctctgtattaaattttaccactttaaacttttgagtggtttatgcttcctgattggactctgactaatatgttaggaagggtcccaggagataaacccacacagatgggatttgggcagtgctgagctctttgccagtgggaaatgggatgctggtgatttccagtaggtgacctcacagtgactcaagctaccacttactgttgattgtgacgaaatgccagctgaggcacatgccttgggagctaagtggttgctgcacttgaccactgtgaagactggtgtgggaagaagggtcgtttctgatgcacttgagcaggggtccccaacccctgagccatggagccgcaaggagccacacagcaggaggtgagtggtgtcgagtgagggagtgagggaagcttcgtctgtatttacagccactcccctttgctcacattcccgcctgagctccaccttctcagatcagcagcagcattagattctcatagaacgcaccctgttgtgaaccgtgcatgtgagggatctaggttgcgctgtccttaatgagagtctaatacctattgatctgtcacttcctcccatcacgctcaggtgggaccatccagttgcaggaaaacaagcttaacacgcccactgattctacattatggtgaattctataattattttattatatattacagtgtaataatggaaatgaagtgcctaataaatgtgaatgtgcttaaatcttttggcccagctcctacctcccggcagcctctccaggcccagaactttctccagtcagcctctacagaccaagctcatgactcacaatggcctatttaggcccataccctacctcacggcagtctccgcagatgagcctactgcctcacaacagcctccacaggcacagctccatcgttacaatggcctctttagacccagctcctgcctcccagccttctctccaggccctgaactttctcaagtcgacctcaccaggcccagctcatgcttctttgcagcctctccaggcccagctcctgcatcttggtggcccctccaggcccagcctgtgcctcccgtcggcctctacagtcccaacatctgcctcacagcagattcttcacgcccagcctctgcctcacagtggaccctccagacccagatggtgtctcactgtggcatcctcaggcgaagctcctgcctttcagcagcctctccaggcccagctcctcctgcctcccagtggcctctttcggcccagcccagctcatgcctcccggcggccttcccaagccccgcttttgacttttggtggcctctgcaggcctcgacaaggcccagcctcctgcctcccgaaggcctgcacaggcccagcctctgcctcacagcggactctccacgcccagctagctctcgcctcactgcggcctccccagtccaaagctcctgcctttcagccacttcggcaggtccagctactgcctgccagtggcctctttaggcccagctcattcctcacaacggcctttccaggccccgtttttcccttctggcagcctcttggcttctaatttgtttatcttttgtgtataaatcccaaaatatggaattttggaatatttccaccattatatattttggtcggt

SEQ ID NO: 535 - DNA, 1597 bp, Homo sapiens
agccttctgggtccgaggctcccacctgctctaagcgcttgacaccctttaaaaaaatgtatttaaagaggctggttcctatccatccgactggaggcatctcagtgcaagagcaaagctaagtcctgcacacgctcctcccctcctcctcctccttctccccccaggttttcccgaatgtatctactccggttacaactagacgcggcccctcccccacctgcctccccccttccttccctcgatcgtggagggagcgttctctgtgccttcccaagtccccgtgggggaccttctatgttggagtggggggagggggggagggtcatataacgaaggccagaaagaacaaattagataatcaaaagaattatagtaattgctttcactttcccccgcccgctcagcggattccctcccccgcccctcccctggtttttctgtctgtcgggaatactcggtctttccgaccccctcccctcccccaggttcctcctctcctctccccttgctcgcgcgttccctctcttcctccgttttctggtgtgctggaacgttcagcggaatatgatgaatgatcacctgtcacagcttgtttattataatgcaggcaatcaattacacatccccaatgctggccggcccgcaggaaatttatatgctcagcacaaaccaatgtgaaaatggaatctcatttgccaaatgtctttctccccgtacagcacgatgattacagtctgtgtttgtttcaacagtcgtgtacaactgacagtgccatcatttactgcctggctcaggtcacgttactctaaggctttatttatggtgttacgaagggcagcacaggaaaaggacaagggtgtctgtcagggatggcactgtgttaaaaagtgggcgtgcaagggccgcattcccgggcagccgctgcaacctcagcccctgggcccttacctccgcagcctctcccagcatccagctacccagactccaaggccccaggcgagagccagctctcggtacctggagctccacaggtcccagaatcggggtgggtcagagttcaaattctggttctgctactgtctaattgcgtgctgcagggactcaatctcttcatctgggaaatgggagtaataacccttggcaggaatgttgcgatcctctgggatgtcagaggtgttgatgaatgttagttcccgggacttcggaaagaggtcccgttggaagagatgtgaattggaattcacaccctatattaaaatctcctccaatcttcacctctgagacatggctgtctcaagactgttttgtttcccttcctggtggaattttgcacttttatgtcctgtgtagcagcaggtagtgtggctttgagaaaataaaatggccaccttgctccgctgttctttctttgtaaaaaaaaaaaaaaaaaaaaaaaaacggcatagcaatcttggcctttctagctgtgtgaccccaggccggtcaatccctcctcctctccaagcctcggattcctcccctgagaagtaaagaaaataactcctaaactgcctcccgaggcttgctggcaggatccaaggtgtccagagatgtt

SEQ ID NO: 536 - DNA, 1675 bp, Homo sapiens
gagtggctcagaaaggccattcctagagggctgcggccctcccttctcccttgcccatgcccccagagctgcctgccgggcagggtggcaccactgcaggagaggagcttggcctccgggggtcaggcaggaggcgcctggctagccagtgctggctccgctgggcgggaagccctggacccccaggtatgaggagggggtggtcttagggttctgttccaggtctgccccgcccccctcccagccatgccccaggcagaacttggaattcaggtgtgcacctgcaggctgaggggctctgtgagcaggtgctgctcacacagggagttcaggcgccagccaagcccctgtgctgctgggataggcctgcttcacttagggagcactgcctcaagacaggtaaagccccctcgtttgcccccacccccatggggccgctcaggagagaaactcccattcacccctttcccagggtgctctctctctaggtggcatgccagcccccaaacacaagtggcttttgggcccaggtgggtcagcctgctgcccctgccccataccccctcgggccattgggacccctgcccttcagatgtcctagggtctaggagtggggccagtcactgtgggaagaggccaggggcttggccggagaggcagcccagggcaggactcagtcctgagtcctggagcagggccagggaggcgcccatcccgccccggccagccgccctctctgctgtttcttctatttgttcttcttttcacccacagctctgtgttcctgtcatccctcctttcagcaaaagtcctgttcccattccctctgtccccacccactcctgttcccccaagaaaataagctatcgttgtatttacaatctatggattagaggtttaagtatttattattattggttaattattattaattatgtaaatttgcctcccgtatgtctgttgcgttgggtttctgaggagaccctgggtgaggaggatgcactggcttcccgcttctcgccccccacccctgtgctgtccgggagacagtggtctggggccactggttgggcccccttctcccttcccccttccccttgtcccttctgcaggccgttgaggggggctgtctgtctcagtctgtctctgctcccactcttgaggcactggttaccgcaaagtgagcagccagcaggggggcgaaggtcctgtgttggccactgcctcctccagtgctgcaggaggcgggctgaggccccacctggtggctttcacctgacccagccctgagtcctctccaagcctctctccggcccctcccacctggccactgcctcctccagtgctgcgggaggcgggccagggccccacctggtggctttcacctgacccagccctgagtcctctccaagcctctctccggcccctcccacctggccactgcctggcattgggatcgccccaaaatggacccggcccctcctgttatttgctgggaagtccagcggaggagagggtgcaggtcccccgctgagcctccagtctctgtagactgggctgtcggcccttcagccccccttggagcccctcccgccacagccgcaccttctgctcccggcccctccctttgtatttggagacaatgtgttgtaataaagcttaaagtggatgtttt

SEQ ID NO: 537 - DNA, 1704 bp, Homo sapiens
agacgcgcggcggcggcggcgagcggtggcgctcggctcgggcgaccgcggcgggggagggcgcggcgcaccgatgggcgccactgagaagggaggccagaagagccggaagctgttttccttgcggcggccgtggaaggcgacccggcggctgtggaggccacgctcagctcgccaggcggcgcagggtgagtgtgggcgcggccggtcgggacctgttaccctgaggcaggggcgcagcggcggcggggccgtccccggcggtctctcgggtcgcgttcccggccctgggagcctggatgcctaggcgacgcccgaacccgaccctcggtcgcgggtaccgggaccgctggggaagcgcaggggctgatgtcggcacagtctcctttcctctagcccctgctcgttgctttggctctggacacagggaagccacggtggcgcggcgacacagcctcactgaggttagcttgtccccggcccccagcacctggcctggcgcctgcaatgcagtgcctactgggggaatgaatcagaacccgaggctcccttcaaggtcctcccgccctgtacccacctcctctctacctgcctgcggtgatttcgaagctctcgccacgataaactatttccaagcacactcagtcctgtcctcgccagggcctcaactcacagccaatcactgactcactccattcattcattccacaatttttatcgagcccctccatctgccttggccggagaacacgatgggcaaagcccggatcttggaactacttctagagaggaagacagacattacacacgcaaaacagagaaagcccggtacacattgctatgtgcgcttagagggaatcagtctgctgacagaggaaaaaaggcaggtccccgagcttccatggcaggcggactgggaaggcctctccgaggcattgcaagtcagcggagacccgaggactgactaggagttactctagcgtgaagccgagtaatagagaatagcaagtggaaaggttcccagagtgcctgaattgagcaaggggaaagagagggatgcagggcctggatcgaggtctgggcagaacatgaagaggagttcggattttattctacgtgagctgggaaaacactgaagtgtgctaagcagggaagtgacctgatctgggggctcccggcttttctctgtctgcagtgtccatgctcgcatctcagcctgccggattcctaccctcctgccaagactagcacaaatgcagtctcctcgctgaaatctctgtggttcctgccacctgtaacccctcctttagcatttcgtcacctgtagagcgtttgtcactgttcatctggtattaaagattccacattctcatccatttcatctttgcatcccccacgaggctaagtgcagggcttggtactgtgtagatactgcttatgaatgtgtcttgtcttgtcctttttgtctgtttccatcatctgaggatccttcctctggggggttgacatgccttatttctaaaatggccgaccggatgcagggcagagccagattgcaccaggaccctgccatcgatatagtccccctcacccacccccggtgttttgaggattaaataaattaatgaattaaacgagttagtagttataaagtgttagcacctattaagcattataaaaataaatttgaaaatgaccagcaat

SEQ ID NO: 538 - DNA, 2118 bp, Homo sapiens
gacaaggtttcactgtgttgcaaggctggtcttcaactcctgggctccagtgatccccccaccttggcctcccaaagtgttgggattacaagcgtgagccaccgcgcccaggctttctggtttttggccgtgtagagctgccacaattgtgctgtgaacaagtacttcagtgaacatatgttctccctttggataaacacttggagtggaatttgttaggtcctggggttagtgtgtgttcatagtttcccaaagtggctttgccatttgcatttgaaccaggacttttgtgtgtgagaattctagctccttcttgtccttacagagcagctggatgctgcgtgtgtggagccgatcacattgggttttgtgtgagccattagcagggttaaggattttagggacttcacagaaggaggctggagagcatcagcagaggcagcctagaccttggatctgtaaaaagaagacactgtttgaaactgcacaaatgagttggggtttccaacagggcaggtgggggcctgtgggtggatgggtgtggcagccacagaggctgggatagcttggcactggggtcagggctcagccagcctgtgtgccttcacacctggtaatgagatcacttgtaaacaatttctgtttatcaattacaggatacaaaaaaagaagcacggaaggaaaaagaaatttatgaacaggaagcaaatgcctcaacatttcatagaaggaggactccattggataaaggccttattaatacggggatctgtgagtcttctggcaaacagtgtttgcctctggttcagctcatacaacagcttcttaggtaaatcatattagctgtattgtattgtgttttatttatttacttttttgttttttgagacagagtttcgctcttgttgcccaggccggagtgcagtggtgcgatcttgactcactgcaacctccgcctcccaggttcaagtaattcctctgcctcagcctctcgagcagctgggattacaggcatgcgccaccatgccccactaattttgtagttttgttagagacagggtttcttcatgttggtcaggccggtcttgaactcccgacctcaggtggtccatccactttggcctcccaaaatgttgggattacaggcattagccaccacgcctggcctatttatttacttattaatggtgtttttttttttttttttttttttttttgagatggagtcttgctctatcgtccaggctggagtgcagtgtcacgatcttggctcactgcaacccccgcctcctgggttcaagctattctcctgcctcagcctcccgagtagctgggactacaggcgtctgcaaccacacctggctgatttttgtatttttagtagagatggggttttaccatattggtcaggctggtctcaaattcctgacgtcaggtgacccacctgccttggcctctcaaaatgttgggattacaggtgttagccactgtgcctggcctgtattgtattttaataggtgattattggttttcatattaagatagtgaaatctagcgcaaggatctcaaaaatttgtttgatgattgaaggaatattctgaaaattacctagtatagatgttaggataaagagcagacccttttcaatataggtgagaggagaagttggagggtgtgatgatactcaaaagtttttcactgaagagaaattggggcgtgcagtaaacatgtaaaaagattcttactaataagcaggtggatgcaaatgaaaatcatcatggaaggttatttttaaaactggttctatcattgcctcactttatatattacagagttatacatactactttgtaagataacttttcttttcaaaactgaagtcaatgtgatagaatggtgagcattattttggaaggccagactaggaggaggtgggaggaagaagtcagactcagcctgtgaacagacgctaaccttggcagaagccaaaacagtcagacagtgttgtctaaaaatgatcattcaagaagagcgaaacagcaaggtgatttgtgaaagagatttattagaaaatgaaacacatttatacctctgttcaataaaaatctgcttttcgtc

SEQ ID NO: 539 - DNA, 1772 bp, Homo sapiens
attctcctgcctcagcctcccgagtagatgagatcacaggcacgtgccgccatgccgggttgacttttgtatttttagtagagacggggtttcaccatgttgcctaggctggtcttgaactcctgacctcaggcgattcacccgcctcggcctcccaaagtgttaggattacaggcgtgagccaccgcgcccggcttgaattgtacacttcaaaaggtggaattttatggtgttgaattatatctttatttttttaacggggggaaaatgacgccgctggagaggagttagcggaactgaaacaatgaaatggtgcgcgagtgtcgcctgtccccgtcgcatccatcccaacgaagtttgggccctggaacggtgcacccagaaggcctgcggggagagacgctggggcatgatctggaagaaagacgtctcaggattcgaagggaatgcagctaaggtggcggcggaggttcgcctaggactggggaggcgtccctaggctcagaagttggcccggccggagcggagatttaaaggttggagcgcagaggctcttaaagaggccgagtcgaattcccactcggcgtccaccttaaagccagctccccggcaccacggatctgacccgggtctgacctacgagaaacatggcaaccagcgccgtccccagtgacaacctccccacatacaagctggtggtggtgggggatgggggtgtgggcaaaagtgccctcaccatccagtttttccagaagatctttgtgcctgactatgaccccaccattgaagactcctacctgaaacatacggagattgacaatcaatgggccatcttggacgttctggacacagctgggcaggaggaattcagcgccatgcgggagcaatacatgcgcacgggggatggcttcctcatcgtctactccgtcactgacaaggccagctttgagcacgtggaccgcttccaccagcttatcctgcgcgtcaaagacagggagtcattcccgatgatcctcgtggccaacaaggtcgatttgatgcacttgaggaagatcaccagggagcaaggaaaagaaatggcgaccaaacacaatattccgtacatagaaaccagtgccaaggacccacctctcaatgtcgacaaagccttccatgacctcgttagagtaattaggcaacagattccggaaaaaagccagaagaagaagaagaaaaccaaatggcggggagaccgggccacaggcacccacaaactgcaatgtgtgatcttgtgacaggcctgaggccctgggcacagtgacggtggcctggccagccctcgggacccctccccacctaactgcactgaaaccatttctaaccacaacccttggcccaaggacttggtacaggaagggagaagggcaggtgggcagggagcagacagggtctggctttgcccagagggcacgggctttcccacctctcaaagagacaaggaagccacctgtaagcagaagcagcatccaagtgcccctggcccccccatgtgttgattcaacccggttcctccccctctctcggtgggtgtgttgtttattgtaactacatagtgttggtttgatgtggaagtgtttatccacatacaaagtacaaaacaagccatgaacaagcttctttcccttaccccccatccacaatgtctgagcttggatgtcttttatagatttttaaattattttagtgattattattttattaaaggggtctgggctcactgcctggtgaagttt

SEQ ID NO: 540 - DNA, 3222 bp, Homo sapiens
aataaatgttttccttttccttcctgcccttgacaactaaaacctgccaatcatcaagtcccttttccccaatctgttccttttcaaccccaaagtcattatctaggccagcctcttatcactaatttcaatggacttgatgacgtagttctgggttctccctgagaaacccaccttaacatccatcacaaaatattttggagttcccagttggtcttccacatgtactcaagaaaatgtctattcctatggtctctgtgttactctgccaggcaccattgttaatccaagtagctctgccaagaacagtagctataagggagaagagattgtgcttagtggacagcattcttcaaacatggcatcttttcaacttttttttagtaggctttatttttcagagcatctttaggttcacagcaaaattgagtgaaagtacagagatttcccatttattctttgccccaacacatgcaaaacctcacctgttaccaatatcccccaccagagaggtacatttgttataatcaataaacctacaatgacacattgctatcacccaaagtccatagtttacattagggttcattcactcttcgtgttgtacattctatgggttttgacaaatgtcataacatgtatttataattatagaaatatgtagaagagttttattgctctaaaattcctctgtgctccatccattcatccctttcttctcccagtctcttgaaaccactgctactgttacggtctccatggttttgccttttccagaatgtcatatagttggaatcataccgtaggaagccttttcagattggcttttttcgcttagtaatatgcattttaggtttctccatagcttttcatggctaaatagctcatttccttttagtgctaatattccattgtctggatgtaccatagcttatttatctgcttatttactgatggcatcttggttgcttccaatattttgcagttattaataaagctgctataaacatctgtgtgcacatttatgtgaacaagttttcaactcatttgggtaaatatcaaggaacatgagtcttgaattgtacattaaaaatatgtttagttttgtaagaaactgccaaatgatcttccaacatggaggtaccatgttgcattcccaccagcaatgaatgagagtttctgttgctccatatctttgccagcatttggtgttattagtgttttagattttggccattctaataggtgtgcagttatatctcaatgttgttttaatttgaaatttcctaatgacatgtaatgttgagcatcttttcatatgcttattttctatttgcatatattctttgatgaggtgtctattcagatcgtttgtccattttaaaatcaggttgttcattttcttgttgggttttcagttattttgtattttagataacagttctttatcagatatgtcttttgcaaaattttttttcccagtctggggctggttttctcatctcttttcaacattttcaaaaagaaaatacataaatatgacagttggtaagattgcgatgagaaggcatagagtagctcttatcagtaggaatattactcctccctaaagagcatttcagaaatttgaggaaggattttttgtctcacaatatcactagcatttagcaaatggtgtccaaaaattctggatgtcctataaagcatgagagaatactgaccaatgcagattgtctcacatcctgtacagctttcaaatgtcccaccagacactgaaataactgacaaatttatgaatcattatgtacttccataactttagttcattctgcatagaaaaatgtgttttaaacatggttttaatatacacagaaagtttctagagatgcaactctataaattgaaatttttattacatctattttgtttagatttttattaaacaatattcacccatttggaaagcactgttataatttactacaccgcttgagctaatggactgtgaaaaaacacttttgtatcagtctacatttgtagctattataatcgctgtgagtctacatttaaatgtaagcacctaactacttcattttgtttattctgcaataaaaagagcctactgatcatacagcaacataaatgaatgctacaggcattttgcaaagagaaaaatctggatacaaaagagtatatactatataattcaatttatatgaagttccagaacagataaaataagtatatggtgaaaacaaatacaatttctagctctttgctggtagttcccctatgtcatccactatatccgtgttttcctttaagccctaaatatatctgtaacaggtacttttagagtctttgtcttctattgcaaacatcttggttatataaagttgggcctttatttactgcttccctctgtttgtttatgagtcatattttcttttcttctctttttttttcccatgtctagttatctttgattatatgcataatattgatgacatattgcaaggaagctggattttatgtcttgttttaaagggcatttatttaaattgctagaaggtcctccagatcctttcaggcttggtgtcattccatgttggagtcagtctctttcggttttgtctcttgtcctagcatgtggctcttattttaaagcttgacttttattttcaaggtatttgttgtcttaaacaaatgcctgaggcgctcaatgaactctctgcactctggctagactataacatgtacaacatcatctaatccagtgtaattttaggtatctttgttcaccactcactcctacagtagccactttctcctagttctcgtggcgatttgttctacacatgtgcaacccagctctataccaaagatttatggagagcctccatgcagacagctgtctccctccatcacatcactcctttctctcttgcccacaaattccagtcacttccactgtgttgaactctgctctgtcttctagcttgggaagaccaccattttttactggagctctacctcccagggtcaaagtctgaaaaatagtcctaggtagaaggatgaaataatttacataatgcatgtgcctgtgaagcacttagcatgatgtctgcacagagtaaatggccaataaatgttgatttttattatgaaatctgtatttgatacaaattttatctataatattttattaaagaaaaaagtctt

SEQ ID NO: 541 - DNA, 1881 bp, Homo sapiens
tttatagatggtggcactgaggttggggaggtcaggaggctcggccttggcccctcagggacagagctggtgttcagagccacatctgtctgcctctgaagaccagggttccttgagtcccccaggtgagtgtgtgagactcacagtgggcgccttgggcacccaggaggcacagacggggagggaaggggtgagaaggagagtggagctgaggacatgggagaggtgccagcttccctctgcctggtggagccgcccacgcggctctctctcccttccctttctctgttcccagcattcccgggcttagtggtgtccggctcaggtcctgattcactcctctaatggcacatgtcaagcatttctccctaggtgccccttgggaatggaagcccctaactgaggacagtgaaaatgccatcctgttcctcctgccccagacagtgggtggcaactcagccaggagctcagggaggggatgcccagcaggccgtggcttctctcccccgtgtcccatggcactcaggagtggccttttccatatctccaggcctcagtttcccacccattcagtgaggatgctggacttttttttttttttttgagacggagtctcgctctgtcgcccaggctggagtgcagtggcgtgatctcggctcactgcaagccccgcctcccgggttcacgccattctcctgcctcagcctcccgagtagctgggactacaggcgcccgccaccacgcctggctaattttttgtatttttagtagagacggggtttcactgttagccaggatggtctcaatctcctgacctcgtgatccgcccgcctcagcctcccaaagtgctggtattacaggcgtgagctactgcgcccagccatggaccttttttttttttaaagctacaatatctttctcccccaagggaaatgatgtgcccagcatagtcaagacagacaagagggagctcccatggctgagttggggcctcaagccctccctctactcctcctcagaggccaggggtgacagagacagatcttgaaaaccttgggacaagtgcccttgggctgcagggttgggaacggggggagcatggccagcctatcacctggtgtgccctcaggtgaaggaatacgactccatctcccggctggaccagtggctcaccaccatgctgctgcgcatcaagaagaccatccagggcgatgaggaggacctgcgctaagccccacccagccccccagtgcccgtcttcctgtcccatctgctcagagagaggtggggccgagacttgctggagagcttccctcctttcccacctggggagtcccgcgggccacagtgggcaggtggcaccgggggtcagcatgcaggggcgccagaggcccaggctgctggccggacagtcaccctctgttctcgctacatcccttgccccctgtccatttatttaagcccccataggtgcccttcacccccaaaaccagctgtacagaatctttgatacagacctatttgctaggggtgctgccggggatttggggtcagcatctggctccctatctcctgaccagctgagtcatgaggccggtttctctctctctcccacttttgtcccccagccaagctctaaagcacatgtagccgctgagacctgctgtttctgctgggggcaggctcctcttcccccagccccgggagcctcccccagcttcctgcagccccgacctctcaggttagaccctgggccctggagcttaggggattctccccaccccagccccacacctgctccttccctaatgctttgaggttttcttggttggaagctgcagctggcccaagaaagaaaataaaaaacaacacttttgcatg

SEQ ID NO: 542 - DNA, 1631 bp, Homo sapiens
catggagccgtttgaggctagttttttaaggccacaactccagacccctgatttagactgagataggaaacagatcttgaaagaatccttattttaatgatacatgaatatcatgttcctatacgcttaataattggtctctacgttttaatgatacatgaatatcatgttcctatacgcttaataattggtctctacgactttaatgtttttgtttttttaagctgtgtaagtatttttaaatcaaagcttaggaggtgtgttgcgtggtactatctgctgcaaatttatctgaagtttgttaatattttccaagatttttgtcagccttttcataatccagtcattaacaacctattggtaaacaagaatgtaggtgccagtagactaaaccaaatttatttttccctgagtctgatatatatatgtataaatataaataactcaatccatctgttccaccaaaataactcaaaagttggatgattatttgtcttccgctttccagttcaaagggatgaaattcctttagaacttgaaagatgacactagcgaacaccatgagaatactgtctacagtttttggtacgtcatcactagaacagtgaccccaaactgaatcatgaaaggtctgacatgatgtaatctgatcttccatgtgttattttggccccacatctcttcttgattttttagtcttatttccttagtgttattatcatacttcccctgatatatggccgtacttcctggccctgggcttgacatttcccacccttcattctccatacatatgagatgtcagaaaacatgcagtaattgatattatgggacacattggaaaggattgaatctggaattagttctgtccactgtggaggggagaggaaataatgctgtaaatgttgagttacagaaagtccaatgtcaaatatagtttttttgtttcctttcaaatgtattacagactgtgccaaaacagttaccaattcacactgtcaatattaaagtataccatagtatacaaattagtcagtacttgctgttaattttaatatttctgatttaacagttagttattaagtggtacttcattgctgttttagccaacgttttaaaaataatttgggagtttgactattttggcttacgtactcatttccttttctctgctaaaaatgttttgcttgtgtgcgttcctgatttttgtcttgtataatcttgatctttgaaaaccctcaaacatgtattaaattgttgtaactttttttcattagagggaagacattaaggggattggggacatttgtttcacacatctgcagtaatatgagttaactaatatttaacaagctctttctttacattagctgctgttctcatttgtatgtattgtcatatttaatcctcagagtaacctagtgaggtaaatactgttgttgtcagcatggtgtaatcgaggaattgagtgagttgagcagaaaagttaggaaacttgctcagggtgataatacagttaggagtgtcagggcccatggacaaatcttgtcagtctccagaacctaagatatactacgtcactgacagcttgaacatttgtatttattgtacagaataaatttaagaaaaat

SEQ ID NO: 543 - DNA, 1948 bp, Homo sapiens
atatccttcatctttatgctgctccactccagctcacagcccctccaactggatggagctcttcgaagggaggggcatttcagaggagggtctcagggatagcccctttgtggggctgggccaccaggttggggagagtggagctgctggaactctggagggactggctgagccagctttcccagtgcacccctctgggagggcgggctctcggtgtaggctgcccatctcctcgctctcctctggcactgctcctatgcccccttggttagcctgggagcccatactacccagacttggggtcaataagcagaggacctgtaaggagtccttgatgggatgtacagcactgcccaaccctgcacaaggtagggtattgctgtttgttgtgtggtgagctgcctgcttatggctgggtttgggcctccatccatttttattttctttgagttggtctctgggcaaagcttctcccagcaggcggaatctggcctgggggctccagcttctctcacctgcctggcctcccaagagctagagagctccacatctcaactcatctataactcattagcagaaccatcagctagcagaaactaggaataataaaaatgtgccgtattttcacaagctggatgccaggcttggtggtcaggacacagactgctttcagctcccacatgcccctcctgctagctgctttgtgcagagtagtggctacatggctgcaggtgagagccctgcctgtgaacaggccaccaggatgctgggacatacgagttgataacccatgggctcctgagagcagagattgtgacttactcatctttgatgtagccaagttctaacaaacctaaatgtgcagccatttgtaagagaggatcatggaatgaatacgggcattgagtcaagcagtctgtgttccactggcggtgtgacctggggcaggccatttcacctcactgagccttagtttcctcacctgtaaaatgtgaaaaatatcaccttccttaccaggcttttctgaggatttaatgacatcatgttcagtgcccagtatgggtggataatacccaggagtttcttcctcttctcctcctaagttgacttgatgccccccgctgaagatcatggctgaactggctcaattcggatccaggactcctggctttgtctcttccctagttgcccaccacacccatggacacccttaggtagtttatccttttgggacaactggatttattagaaaagggtattctggggtggaataaggcccttttcagtccccatggagcctttttggaagatgaagttctcaaacccacaagagaattcataagacgagcacaccacccacagttaggtttccctctcaagtgctttatctccacgtggggcaaatagctctttgtctgcatatgttattggagcttttggagtccagccttcagaagagctctaatttttggattcatatcagtttattagagaagcctagttctaaggattagcaaatgggtaggtgctcagccagcccagaacaagcagagccatgacagaagtttctggaatctcacagagtcggtgtcttcatggactcagggggcctaaatccaatagcctggatttgtcactttcccttattcccttatcaaactcttcccttttggacatcagagaaggaaagtacttcctgtaagggggcaatttgcaaagcttcatggaagtggcatttgagtgtggccttaaaggatgtgtaggattgggaaccatagatatttagaggaaggcattcctggcagaaggaacagcagcaaaacactgaagtggaaattagtagcagcattaatggagaataatttggggaataagatatacaaatggaataataaaaatagcattaattaaacattgtgggagtcattctgtaagatggcccctggtg

SEQ ID NO: 544 - DNA, 1727 bp, Homo sapiens
attgcaccttcctacccaagcagcttggttttctttcgctttgaccctgtaatttctttcccacttcgttgtcgtctctgaattacctttctcttgattcttgcccattagcatcctccaatttcagatgtttgtagatccccaagtgttcccagggaaaactactagaaaaggtcaagctgatgcaagagatggtttcccatggtcttgggcagctccacccctgtggctttgcagggtacaatctccctcctggctgctttcatgggctggcattgagtgtctgcagcttttccaggtgcacagtgcaagctatcggtggatctacctttctggggcctgtgatgagaagggctgccgtgaagacctctcacatgccctggaggcatttttcctattgtcttggggattaacattcggttacttgttacttacgcaaatttctgcaactggcttgaatttctcgtcagaaaatgggatttttcttttctatcacattgtcaggctgcaaattttccgaacatttatgctctgcttcccttataaaactgaatgcctttaacagcacccaagtcacctcttgaatgctttgctgcttagaaatttcttctgccagataccctaaattatctctctcaagttcaaagttcgacaaatctctagggcaggggcaaaatgccactaatctctttattaaaacataacaagagccacctttgctccagttcccaacaaggtcctcatctccatctgagattacctcagcctggatttcattgtccatattgctatcagcattttgggcaaagccattcaacaagtctctaggaagttccaaactctccgacattttcctgtcttctgagccctccaagctgttccaacctctgcctattacaaagttccaaagttgctttcacatttttggctgtcttttcagcaacaccccactcctggaaccaatttactgtattagtctgttttcatgctgctaataaaaacatacctgagactgggcaatttacaaaataaagaggtttaattggactcacagttccacgtggctgaggaggcctcagaatcatggtggaaggcaaggaggagcaagtcacatcttatatcaatgtcagcaggcaaagagagcttgtgcagggaactcctgttttgaaaaccatcagatcttgtgtgacttattcactaccacaagaacagtatgggggaaaccacccccatgatttaattttctcccacagaatttttccctcaacatgtgagaattatgggagtacaattcaagatgatatttgggtgggacacagccaaaccatatcaatcatcaaacaagaaaagagggaaactttcacaaccaagagatccctaaagaggtatgctgactgaatgtaatgtgggatcctagggcaaaaagaatattatgtaaaaacgaaggatatctgaataaagtatggactttatttagttaataataatgtgtcaataatggttcattagatgtaacaaatgcaccatattgatgtaagatgttcaaagtagggaaaactgaatatgagtatatgggaactttctttatctttgcaacttcttggtacatctaaaactattctgaaataaaaaaatttttaaagagttgcttgaacctttattctaacatttccttaaacaagcctcaccattgacctttcttttaaaacaataaattccttttgctt

SEQ ID NO: 545 - DNA, 1521 bp, Homo sapiens
agcttccggcacggccttcaagcgcgggacgcgacaaagtcatggaccgcaacccctcgccgccgccgccgccgggtcgcgacaaggaggaggaggaggaggtggccggtggagactgcatagggagcacggtctacagcaaacactggctcttcggcgtcctcagcggactcatccagattgttagccctgaaaacaccaaatctagctcagatgatgaggagcagctgacggagcttgatgaagaaatggagaatgaaatttgcagagtatgggatatgtcaatggatgaggacgtggctttatttctccaagaatttaatgctcctgatatattcatgggagtactggccaagtccaagtgtcctcgattaagagaaatctgtgtgggaattttaggtaatatggcctgtttccaggagatatgtgtgtccatcagcagtgataaaaatcttgggcaggtgttattgcactgtttgtatgattcagacccacctactctgctggaaacaagcaggttgttgcttacttgcctttcccaggcagaagtggccagtgtttgggttgaaaggatccaggaacatccagctatttatgatagcatttgcttcattatgtcaagttcaacaaatgttgacttgctggtgaaggtgggggaggttgtggacaagctctttgatttggatgagaaactaatgttagaatgggtcagaaatggggctgctcagcctctggaccaaccccaggaagagtctgaagagcagccagtgtttcggcttgtgccctgtatacttgaagctgccaaacaagtacgttctgaaaatccagaatggcttgatgtttacatgcacattttacaactgcttactacagtggatgatggaattcaagcaattgtacattgtcctgacactggaaaagacatttggaatttactttttgacctggtctgccatgaattctgccagtctgatgatccacccatcattcttcaagaacagaaaacggtgctagcctctgttttttcagtgttgtctgccatctatgcctcacagactgagcaagagtatctaaagatagaaaaagatcttcctctaattgacagcctcattcgggtcttacaaaatatggaacagtgtcagaaaaaaccagagaactcggcagagtctaacacagaggaaactaaaaggactgatttaacccaagatgatttccacttgaaaatcttaaaggatattttatgtgaatttctttctaatatttttcaggcattaacaaaggagacggtggctcagggagtaaaggaaggccagttgagcaaacagaagtgttcctctgcattccaaaaccttcttcctttctatagccctgtggtggaagattttattaaaatcctacgtgaagttgataaggcgcttgctgatgacttggaaaaaaacttcccaagtttgaaggttcagacttaaaacctgaattggaattacttctgtacaagaaataaactttatttttctcactgac

SEQ ID NO: 546 - DNA, 2521 bp, Homo sapiens
tttaaaggtaagcttgactgcactcatttaatttgcctctggagtcaggagtttacaattcttcctctgtatctattaataagcagtttgactaatattactagaagctttaatctttaattttggcatttgttttgcagatgctctacccatggtaccccaggaccagaaggcaaccatatttcagatttaccacttctagacagtcccaagtaaggttaattgataagttatgggcctccaaagctaagttgctgcttagcattgaaaacattaaggctgagtgcagtggctcatgcctataatcccagcactctgggagactgaggcgggtggatcatctgaggtcaggagttcaagaccagcctagccaacatggcaaaaccctgtctttactaaaaatacaaaacttagctgggcatggtggcgcatgcctgtgatgccagctactcatgaagctaggacaggagaatcgtttgaacctgggaggcagagattgcattgagccgcgatcatgccactgtactccagccggggcgacacagtgagactctgtctcaaaaaaaaaaaaaaaaaaaagagaataagagaatgttaagaaattgggaatagtatggtattgagtagaatgtattacttgtatcctctccgtactgtagtttgagttacctttctgttcagttatgttgtttctgctccctccccatttcctggtactttccaaaattttctctctaatactggtccaaataaaacattagttcttctgtttttctgtttctcacctcatcattctgtaatctctgcgaaagcttccaggttcgctcatcgtaggtcactggaaaaaattgtagcattgctaaagagtatttcagagaaaattttgcatgcaaaaatttaggaagatgagtgaaactcatcattctgtaatctctgtgaaagcttccaggttcgttcattgtaggtcactggaaagaattgtagcattgctaaaaagtatttcagagaaaattttgcatgcaaaaatttaggaagatgaatgaaactcattattattattctttcagtccctggctatcttcttcagtgactgctccatccatggtagccccagtcacttttgcatctattgtagaagaagaactacaacaagaagcagctcttattagaagtcgagaaaaaccgttggctctgattcagattgaggagcatgccatacaagatttattggttttctatgaggcatttggcaaccctgaagagtttgtcattgttgaaaggacaccgcagggaccactggcagtacctatgtggaataagcatggatgctagttcactgtggagttgagatgcattttacataattatgagtttgttcatataaagaaaagctgtggaaaagagtcttagagattttgtaatatcattctaaatagattaagaaaagatataatttctttactgcagttaaatcatataatgtttgtatgattaaaaataaatttctcagaattgtgattttagtaactttatataaaatgtgtgagacaaaaacttattaaggttaaatagaattgtttcttctgaataatctaacaaaggaaaatataagtgattgaatcataagatataaggggggtaaagtattaaaaataacttttttgtttgataacttgagaatttagaagattttgccaagtatgtgttgttgcttgacttcttaaatatggcattgatgaatttaaagtaggagcatcagttattacttctgattcattaatggccagaattttgtgtttggtgtaatagttgtgtcaccattcttgttgctttttaaaaatcaggctaatcatgtggtccatgtctcttcaaagcttgacctgcacaaatgccatatttctatttggaccacatattctccattttgcattgagcagtagagtacagtggaaagggaataagaatactgattattctgaacagtttagtcccaagagaatagcgttttaaaaaagaaaaacaagatttggagtcattgtgggttatttttggtgggatggaggatcttaaaaatgcctaattgtgagagaatcaattgctgaaagtgttaaaatttctgaaaataaatgcttaattacatatacaggaattaaatagtttggaagagggttggattatcattacctttacaatactgtataatcagaagttctctgaacctcaattgtatatctagacataaaaattgttttctgtataggatgttgtttggtttgtttctgagtgtttaaattttgcaaaaacaaatgttaaatttgtgcttcagtacctagataaattggaaaggttaatgttctagtttctggaaggtaagcctgggagacacataagcaattcactgctataatttagttgatgtaaaatgacggaaactgactcaatatgtcaggtttaactctgcccaaaagcagcagacatgtaagcagatgtgcaataaaaaatgatcttgatccatttcact

SEQ ID NO: 547 - DNA, 2956 bp, Homo sapiens
ataaatcaagtccgcggggcatggaggctgctgtcgctgcagcagctcagcttgcccggggcgggaactccccctttctcctttcgcctccccagcacccacaccctgtctcccccttaattcttccctggataatagcaccctaacgacaacagtcataataatagggttagaacgacgggggaggaaaactcaacagcctaaatatctctgaaaactgcatcgcaaaatggaagaaagagggggtcccactactgtttcaaaagagagccatggaagtcaaatgctgaggatggtggcatcataggatgaatggagctgggttcttgaaacactgcctggaggaaagacagcaaaaatgcctcatgaatccaactggactgttaggatgctcacccttggagaccagcaacaatgtgtgcagaaacccaggccatgtggagaggccccacatacgtgtccaactgaggtcccagctgacagctggcattgacataatgttcactctgggggaagccagctgccacgctgtaaggacactcgggcagtcctatgaagaggcccgtgtggtgagaaagagaggcctccagccaacagccatagatggggtcttgctatgtttcccagttggagtgcagtgattattcacagacatgatcccactactgatcagcatgggagttttcacctgctccatttcccacctgggaggtcatcatattgatggcgagctaagtgtggacacctgatcagcatagcacagtacagcccagaacccctgggctccagtgatcctcttacttcagcctcttgagtagctggaactacaggcctgcaccactgcacccggctagtttgtttttgttagagttttgtctctaggattttcctcagctgagtatgtgaaggctaacttctccttgtgaatctgcaaatatccttattttaccctttattttaccatgtatcatttacaggtaaatgatatcttagctgtgtattgaatttctgttttttgttttttcttcagtactctataaatattactccagtatcttctagcttctcccattttctcctagtgaatggttattctgctcttatctagcaggtgataaatctgtcaacagatagtttttcctttttgttttatgtgtaagttgttatttcttccttaaagttcataatcttttcccatttattctctaaattttagactataaccaggatgtgtttaggttgatatctttgcttatctattctgcctggaaatcaggaacctcttccaatattcagacttgtgttttcagctcagaataattattttatcatttgtttgattattcctttagttgcactggatcttagttaaaatgcccattctgattcaaagtatctggaaggcaagtatttgtcaactaagggaaaggtgaccatgcatcattggttttgctgagactacctggtttacaccttcaggctttatacttagaaaatattgcgatcatcttctggtcatgaagttacaaacttcaggacaaaggctaaccagctaagactagcagagcaaattccaagaacttggggctttaattaacttgaattgatttggacttgccctacctttaacttcacactgagataaaaattccccacattttcaagccatttttgagatgagtctcttatggttgaaagcatcctaatttatacaacatccttttggtacctaactaaatattcaccaatatttggcacatttgttaaatcttttggtgtgtgcctcttctatgtaatgtaaatatggtctgaatatccattcagaaattatagttgatttgcaaaaataactactatatcacctatattaattgatagttattccttcccaaccttctttcactcttccatatatatacagagtaaatctacatcattatgttgattaaacaaaatagcagtgaaatcaggatgttactgctcattgtgcatttatttcaattatggaaaaagccaacactttactcccttatttaacacttctgtagaaaagcagttgaaataacctagtgtcattctaaaatgatttgtatactatgtagaccagaatctagggctatacctaaaaatacataaatgaaattattctagaagttaaatcttcatgaaaaaacaaattaaatggtttactaacctcaagctgattaaatgtttttattaaatgcagcctcagccagcacctcttttcatggctgcaataattaagtataataaatattcaaatcagtaattgaatttgttaaaaaaaacatgctcagctcagtgaagactttctaataaatagaattcaggtaccatattttcatacttcatgacacttgcctcatcttagtttgatgactgccgtttcttgcactgtaacaagattttatttttattttgttttacgctattcaaacaaatacattcaaagtcataggctacacctatgtataaccatattctgagagttggcttatgtgtttgtttattttctcacaagtaaagataggtcagatgttgccaaattagtaaataactaaacttgagatgggaaatactctagagacacaatctgcttagttttgcatagttttgcatagttttagtcacttttcccgttactctgtccagctttccagtaatactcataacattgccttgatttcatatgaccacgcagtaaagtgattactgcacttagaattttgttgcttttgctgtgctaacaacttaaaagtttaaaataactgatgttcaaaacagtgaagatttccttttataaacaagttggaaaggaaagtttttatgttattatcctcaagtattctaactaatataaaatgtctttcagtcttttaggcaaaccatttagacaaaaagtacaaataataaatttacattgtgttaagctgcg

SEQ ID NO: 548 - DNA, 1635 bp, Homo sapiens
acgcttcctgtacagcctgcagaactgtgagtcaaccaaacttccttttaaaataaattacccagtctcagctaggtctttctagcagtgtgagaacggacacgtagagggtgtgagagccagaagactttaaggagagggacgagctggggcctggatgcccggggaggtggacctggaccaggacaggtgtcagcgggcagagatggggcagaggtgcggctgtctacccgcgaccggggccatgccctctcgggctcggttgaggagctgctcttcctccagaatgcgctcggacggaacgttaggaaggccctggtgagtggccccgacctcctcccccaggactggcttctccggccctctgccctttcgggcagaacagctcgtggctcttccaggacctggggctccatcttgcagaacagctcgtggctcttccaggacctggggctccatcttgcagaacagctcgtggctcttccaggacctggggctccatcttgcagaacagctcgtggctcttccaggacctggggctccatcttgctgaggggtgctttcttgagactccttagggacgattctgattttccctggagctgtacaatggcggtttatctttcaaggtcccctgggcctgggctccgaggcagccactttccctggagcccgtgaaggaggtttggacgccagctgggctgcctgcctgtggcggggcaggaatgagagctggcgcggctggggcccctgggtgcctggtcctgctctcatgacgcccaccccttgaaccctgacatgggcgcccaaggattctccccgcaggctcgcagactcacctgatcaccgggagatgtttgagaaggagcctgtgtcaaagtgtaggcatcagatgaaaatttaccttcttgttacctatgtaaatgggccgggctccacgaagtccttggctgagaacggtgccactgaccgactgagctcccgatcgttctgagagaggcttatgtgcacagtggacgtggaaggctttgatgatgttggtgaaactctctctgacgctgtcagagatggattggggacaatcctgcggggaggtgctgaggagggcagctacgacaactggccccacaccaggaaaagctgggggccgctgagcccaggccaccaacgggagctgtggacccagcctgacccctggaccgaggtgctttcagggcacaagggggatgcgggagcctgtggctgctgttgcttctgctctcagttcataaacgcacgctgtgcacatcccctgtgcttggcaaggggcctggatagaagggccagtgaggagatgcccatcctccaggcactgtgcctcctcccaaaggtcagcacccggagcatcactgtgccctccccacaaaggtcagcaccccgagcatcactgtgccctccccacaaaggaaaatctccatgatgccagcaggcgtgtccacagaggaaggggcgaagaaaatgtcgaatggacaggcgacctgcatcctgcccagctcggaagaggaggacgtcctgagatttgccacagcctggaggcgattgcgctcgtgacaaaagccagacacagaaagacaaataccacgttctaatttgtgc

SEQ ID NO: 549 - DNA, 4400 bp, Homo sapiens
tctgctagaaatgcaaataacagaaggtggagggggtagggaacatgccttccagattattcctgtgggtactgatctgctagctaaattgagatgtactttatcaggctaaatggcttttctctccccgatcttttattgtttgtgatggagttgtcaaatatttgcatgcaatataaatacaatttttaggcagcgttgtgatatggatggtgcctgtatttaccagctcagcactgccagtgaaagatgtagaagataaacctgaacaacaaaccagaacaagagagactgacaaatcacccaccagtactgagcctcgacagcaaccaagtgccttatttgctagaggaaacaggaaagcggtcaaaagtccccaaagatcatcgagtaaaataaaagaaaacaagcatccatttgctctttatggctggggagaaaaacagaccgatacaggaagccagaagactcacaacgtctgtgcgtccgctcctgtgcacgagattcatgaatcagcattacgagccaagaacagaagacaggtggaaaaaaggaaactggttgctcaaaggcaacgagctcactctgtggatgtggagaagaacagaaagatgaaggcttcctcctcagagaacccatggatgacagaatacatgaggtgctattcggcaagagcttaaagaaacacttgcgtggacagcctcttttaaaaagtgtaaatgactgaaaggaaaaacaaaacaaaaaccatcaaaagaaacggacacaggtttaagaaaccaactgattatgcaaggttttttttagggaatttgtaaaagattgttttattttgatgaatattggtcacctacctcggcagtagggcagacagttgaagccatagacatttggttatttatgaagataattccctaaatctttgacattcttataaggtttttgttttaaagcatcttaatcttttaagatactgacaccaaatgcctttaaatggcaacagatgcttacagttcagtattcttttcataagcttaggtagagcctattatcatcttgttctaaataactttccagattccatagctataagatcattccatcctacagcataagactcgttttccttatatgccgttttgtttgtgaaagaatatcaagtcaaaaatgagtgtcagcactactactgattccatgtataatgaaagtagaactttgctagttcctgaaaatttttaacttatttgtatttcagttcagcagcatctttatgtagattgtgatatttaagaattatctgggctgggcgagggtctctttttctctttcagtgatcatctaggcagttattatttaatagtttaatagctcaagtacattccaatagacgaagtgcacacaacacaatatatgtgaacagtagtagtaaagtttcttttgagtagtcaaagactcactttttttattgcctttttttttttttttaaagaatacatactgtggattcagtcccttgtcacacttgaccttttggcatacacccactgtggacttttgcctcttctgtaatggctggcaatgacatttcaaacttacaatctggaattgcacttggtacattggcattgcttgttccactgggatggggaccagtgtgaagatgcctgttagatagactgcccacccctactttctctttttctttatagcacttaacaataacaaagtcttgatgatgtacagtattcaaactttaggttgaaatacgttactctttgattcctagccagtagatcttatctacactttaatgggagagaatggtggtgtgtgggtaggcacaaatttatgtaaatagtgctccttctctttagtatgtttgctttgggggtagaaaaatggttttaacaaacactggtttccatcaaatgaatgatgtcttctccatcctgtggagacaagaatctgctagaaggatatgtgctaagttccttataagagataatggtgctctgcctatgccagcttggcacccgaagatgtgtgagtggacgtgaggctgagtattaccttagtatttttctctgggtctttggaaaaccatagtcaatttttagaacatattgctttcattccccataaactcttcacacatgataactgtttaagctttgaaaacacatactgaagtattgtgagcttaaaaaaactttttaaatatttgcatagttttgaggtgaatttgtttccttacagatctctcctaatcattgagatgtatatttcaaaagaggaaattttacatgttgtccaaaacagccttgctagtaactggtgaattttggtattaactattattaaagtctttaaacgacacaggtacctaaagatcaccttaatgtggcaatttgtgatggtgtagctagctgattgtgaaaactgttcctttaaagtcgcttcttgcatgttcggtgttagtcatccagctcaggcttgtgttgcagctgacaatctaggaaagacggccttagagagtggtgcaggccccacactgacggactgccttagaaacccgacttcctctagactttgaaccgccagacttttctcttgtttagaaaacaaacttatatttaatgtacttactacttaaaactccagacagagatataatgtagaaggcaaatattggccaattttttcctctttttaagtggaagacaaatgaacgggatttttaaagtgcttttaaagtgcatgaatggttaataaatcagtatgaattgtaagccttcatcttacatccaagtccttagttggttagggtttcttttctttcttttttaaagagtgtcaattaccttttgaacctgtgaaaatttgatagttgttaacagtctgatggtcctaattctttcttttcattctagaaatgaatgtggttgtaatcatgttcctaattcttgggacaacctgcaagacagtgagacagtttaaaaattacctttcatgttgaaaaagtctgaaacagagaacccaatgatatttaaaataaatgctacataaaactctttttaaaattttgattttaacttaattaaaacaatgtcataaatatgctttttgattttgttactgcttttaatattaaagtaatagaatattgaagcaatattgtctagcactctgctggacattaagtccgcgggaggagaagtgaacaggaatcgattctttgtcttttaactgcccttagttaggagatgttaaaatacttggcacctctggttatatgtatgttatgtgtgttctcccccctaaaatttctaagcacatttattcacttttaaaatgaatctttaaaagattatagttagtagttatagttaatattctatttacttggaaaaatgtgaataaatggatcttcaaaagattcattttaaaaatgaataaatgtataataggctataggtgatcttacttgcgtattaggtaggaggcacatatttataccatttcatatgtaatatctttgtcattgtgtttcatcgaagatcaattgctagcaacttgaagggtatttatacttgggtcacttgaactcagctgactaaattgtaagaacgagagcaagcaagatggctgttattggaagccataacttccagaagataattctgcacaattcgtaagttaaaaaaaatctgtagggtcttccactatcctttttcaggttgataatgctgttctgggcacacactttgtaaatggaatgttatggtacagtcgcctctcagtatccatggggcattggttccaggcctcccttaggatgccaaactccatggatactcaaaccccttctataaaatggtgtagtatttgcatatatcctagacacatcctcctgtatgctttaaatcatctctagattacttaaaatacctaatacaatgtaaatgctctgtaaatagttgttatactatattgtttagggaataatgacaaggaaaaaaaagcctgtacatgttcagcacaagtgaaaccatcctttttgcccccaaatattttcaatttgtatttggttgaatccatggatgcagaactcacggatacagagggccgactgtactttctttaaagtgttcaaaagtattactagcaaagaggaggaggagcaaagcatatatcagaagtaaaacaatttttcttgttgactgctttggtaaaaaacagtttgatggatagttttacatttcactggactagataaaaaatggtgctaatatttatgtagcttgatgctatagttgctttggtatcaaacttaatacctaacccatataagatccttattatataattttgtgatcagtaaaatgatattttaaagagtg

SEQ ID NO: 550 - DNA, 2176 bp, Homo sapiens
cacatccgatgtgcctaaacaatctgttcttgtttcaaagcaccacttggaggctgcggaagatacccgtgtaaaggaaccactgacttcagcaaaaagcaactatgctcaatttatatctaatacatcagcaagcaatgctgataacatggtttctaataaagaaatgcccaaggaacctgaagacacatatgcaaaaggtgaagactttacagtgactagtaagccagccggactttcagaagatcagaagactgcctttagtatcatttctgaaggctgtgagatattgaatattcatgctccggcctttatttcttcaatcgatcaggaagaaagtgaacaaatgcaagataaattagaatatttggaagagaaagcctcatttaaaaccataccactccctgatgatagtgaaacagttgcttgtcataaaacattaaagagcaggttagaagatgaaaaagttaccccattgaaagaaaataaacaaaaggaaactcataagacaaaagaagagatatccacagattcagaaactgatttatcatttattcagcccacaattcccagtgaagaggattattttgaaaaatatactttgattgattataacatctccccagacccagaaaaacagaaagctccacagaaattaaatgttgaagagaaactctcaaaggaagttacagaagaaactatctctttcccagtaagttcagtggaaagtgcactagaacatgaatatgacttggtgaaattagatgaaagtttttatggaccagaaaagggccacaacatattatctcatccagagacccaaagccaaaactcagctgacaggaatgtttcaaaggacacaaagagagatgtggactcaaagtcaccggggatgcctttatttgaagcagaggaaggagttctatcacgaacccagatatttcctaccactattaaagtcattgatccagaatttctggaggagccacctgcacttgcatttttatataaggatctgtatgaagaagcagttggagagaaaaagaaggaagaggagacagcttctgaaggtgacagtgtgaattctgaggcatcatttcccagcagaaattctgacactgatgatggaacaggaatatattttgagaagtacatactcaaagatgacattctccatgacacatctctaactcaaaaggaccagggccaaggtctggaagaaaaacgagttggtaaggatgattcataccaaccgatagctgcagaaggggaaatttggggaaagtttggaactatttgcagggagaagagtctggaagaacagaaaggtgtttatggggaaggagaatcagtagaccatgtggagaccgttggtaacgtagcgatgcagaagaaagctcccatcacagaggacgtcagagtggctacccagaaaataagttatgcggttccatttgaagacacccatcatgttctggagcgtgcagatgaagcaggcagtcagggtaatgaagtcggaaatgcaagtccagaggtcaatctgaatgtcccagtacaagtgtccttcccggaggaagaatttgcatctggtgcaactcatgttcaagaaacatcactagaagaacctaaaatcctggtcccacctgagccaagtgaagagaggctccgtaatagccctgttcaggatgagtatgaatttacagaatccctgcataatgaagtggttcctcaagacatattatcagaagaactgtcttcagaatccacacctgaagatgtcttatctcaaggaaaggaatcctttgagcacatcagtgaaaatgaatttgcgagtgaggcagaacaaagtacacctgctgaacaaaaagagttgggcagcgagaggaaagaagaagaccaattatcatctgaggtagtaactgaaaaggcacaaaaagagctgaaaaagtcccagattgacacatactgttacacctgcaaatgtccaatttctgccactgacaaggtgtttggcacccacaaagaccatgaagtttcaacgcttgacacagctataagtgctgtaaaggttcaattagcagaatttctagaaaatttacaagaaaagtccttgaggattgaagcctttgttagtgagatagaatccttttttaataccattgaggaaaactgtagt

SEQ ID NO: 551 - DNA, 3641 bp, Homo sapiens
actttctttcaggaaaacgtagatttgggctttagagttagatgggatagagcagaatctaggggatttttgagggacggtgcttccaagtttgtgtcaccggtgtgctgaggaagggaccggtcttgctggaaaaagtcagattgcgtggtgtttggtagcaagaaataccaggcggtatcctggccgtttcagaaaccacaggaaaggaaagaggctggctttgcagtcgggagggcaggcactggatggacgttcttgtaatgttttcttactctgggagagtccgtttttgtttgtttttttgtttgaactgtggtaagcacattccgtttttgattccccaaacttcaggacattcatgttctggcgaggtttaggagacaaacttccttcgtctttagccagtttgcttaacttcatctgagtttgggtttccaatacttatctacaggaatcgccatgaccccagctctgagggaggcaacagcaaagggtatcagcttttcatctttgccaagtaccatggagtctgacaagatgctctacatggaaagtcccagaactgtagatgaaaagctaaagggagacaccttttctcagatgcttggatttccaactcctgaacctactcttaatactaattttgtgaatttaaaacattttggctcccctcagtcttcaaaacattaccagactgttttttttaatgagatctaattctacattaaataaacacaatgagaattataaacaaaagaaattaggggagcccagttgcaataagctgaaaaacatactgtataatggcagcaacattcagctcagtaaaatctgtctttctcattctgaagagttcatcaaaaaggagcctctatcagataccacgagccagtgcatgaaagatgtacaaattattctggattcaaatataaccaaagacactaatgtagataaagtacaactacaaaactgtaaatggtatcaagagaatgcacttttggataaagttactgatgctgagattaaaaagggtttattgcactgtactcaaaagaaaattgtacctggccactcaaatgtgcctgttagttcttcagctgctgaaaaagaggaggaagtacatgctcgtttacttcattgtgtaagcaaacagaaaattttacttagccaggctagaagaactcagaaacatttgcagatgctcctggcaaagcatgttgttaagcactatggtcagcagatgaaattgtctatgaaacatcaactccccaaaatgaagacatttcatgaacctaccacaattttgggtaatagtttacctaaatgcactgaaattaagccagaagttaacacattgactgcagagaataaattgtgggatgatgcaaaaaatggctttgcacggtgtacagctgcggaaatccaaagatttgcattttctgctacagggctgttgtctcatgttgaagagggtttggattccgatgcaactgatagcagctctgatgacgatttggatgaatatacccttagaaaaaatgtggcagtgtaagtgcaaaattattattagactattttctgttccatatatagcagcaattatcttagtttccaggtatgttgacaagaaatagattttctaaaatcttaatgctataatctttttttttttttttaatttttatttttgagacagagtctcgctctgtcgcccaggctggagtgtagtggtgcaatcctggctcactgcaacctccgcctcccgggttcaaacaattttcctgctttagcttcctgagtagctgggattacaggtgtgtgccaccacacccagctaatttttgtatttttcgtagaggcaaggtttcaccatgttggtcaggctggtctcgaactcctgaccttgtgatccacccgcctcggcctcccaaagtgctgggattagaggcgtgagccaccacatccagccaccataatcttttatgttataaaacttttgttgaatttttttaatgttttgtttgttaaattattgtgtgtgagtatatacatactatttaaaaataaatttactcaacttttctatctaggaaaaacccatacaggaataatgaaattattgagctataaataagcatattttctattcttgaataggctgtggacaaggcctaatctttgtttaagtgatctagttaatatgtgtatctaactaaaaaactttagtctgcacatagggagccctcattgtctttgggagtgtatcagttgagagtacatgtaagttgacttactactttttttccttaactctctactcgtactcatagctttcagaactgacctttaacaattcagttagtttttgctagcttagtataactaaaacaaaactataatgtcagctgtaagatatctattgaatgcttattatgtgctagacactaagattcagttgtgagcaacatattcacaacctctgccttttggggcatgtacttgagagagaggtatctcgatattgaataataaaaagcagagaaaaatagtttcagttatcacaccgtgataacactacagaccaactctgtccaatagaaacttctgagatgttggaaatcttttatgtctatgccatctaataggcactagacttatgtggatattaaacacttaagatttggccagtgatactaaggaaatgagattttaattttatttaattgactaaattttagttgaaatggtcagataaagcataatttttaatttagttttcaggggatctattactgtccccaaattgatgtgaattattgtttgtatatatagcattttgggggaaagaagtctgtcacacatggatacatacaggggcacaacactcactggggctttttaaagggtgcagggtgggaggggggagaggatcaggaaaaataactaatgggcactaggcttaaaacctgggtgatgaaataatctgtataacaaacctgcatgacacagatttatctatgtaacaaacctgcacttgtacccctgaacttaaaagttaaaaataaactttttcaaattctcaaaaataaatgagaattacagaattagaagccaaacacattgatatttactatgaaatagaagatcagtatattagtttttatagtgagaaataaaatataaagcaaagtaagcattcgggtcttctagtgttctgatatcactgtaattgaaatttgtttgcatgtggaatttatagtagttaataagcgcagattatttttctggctggcattgtgctagttatttaacatatgatatctcatttaattctttcaacaaccctagcaggtagttgttatccttatttcacttaagaagaaacagactcagcatgggttaaataatttaccaatggttaaaaagccaagtaaggggcagaaacaggattttgctcatatatatgactctaaacacatacttattctcttgtaatatgctgttttctcaacattgcatcactgatacttagagctacaagaattattaggtacatgtgttctgaaagaagtctgaaaatttaccaatttttgtatatacaatgcttgtgaagtatttaaataaaatgtagtgggcac

SEQ ID NO: 552 - DNA, 2650 bp, Homo sapiens
atttttagtagagatggggtttcactgtgttggccaggctcgtcttgaactcctgacctcatgatccgcctgccttggcctcccaaagtgctgggattacaagcgtgagccaccatgcccggactagttttgttatttttatgcagctacaaggaggaaaatgatacatacctttcattactgaagatggaaagatgtgtaagttagataagagaaaaacagatcctgatgaccttccttccaacataaaccacctgtcagaagacggtgcagggagactcaggccaaagggaaggtatctgtcagcctctcctctgactaaaactcccctaggaggggcagaggtcagtgtaaaatatgtattttttgagacagagtctcacattgtcacccaggctggagtgcagtggtgcgatctcagctcactgcaacctttgcctcagcctccctagaagctgggattacagggcatgcaccaccatgcctggctaatttttgtatttttggtagagactagatttcaccatgttggccaggttggtctcaaactcctgacctcaaatgatctgcccgccttagcctcccaaagtgctgtgattacaggcgtgtgccaccgtgcccggccatagtgtaaaatctttattcttcagtgtggtttatcccaattccaattatacattaggtctaaaacaaaactcaggccttgggaattccaagctttgccctagagtgaagcccattcccttgctgggattgttctggggacagaagctgcatagctcactgtcctgtggagttgagggaagctatctttccacactggtcccagcaaggggtgcagggccgggagcctaggctgggagagtgaagctgggccagatagactccaacagtgacagtccctgggctcacaggaggtggctggcaggaccaagtaggtggcctaatgcctggcatcaaggtggggcgctcccgggctcagctgccactgaaggtggaggtagaagaggtcacggtgcctgagggctttgtccagaagctcaatgaccacctgctcttggtgtacactggcaagacccgcctggctcggaacctgctgcaggatgtgctgaggagctggtatgcccgacttcctgctgtggtgcagaatgcccacagcctggtacggcaaactgaggagtgtgctgaaggcttccgccaaggtgaggggcttcctctgggggggtcagggcactgggagcgagtattctgtcacttgtgggtttgaggccagggtcatctgcaggcttggcacaagctccagatattcggcctctgggaacagaagcctactgtctgtcctctccagggtctcacatttaggggagagctacatctgaggacaaaattttcatcatgggaaaggccctccagccctaacaggaagcagagaggggaagggactcaacccatggctgagttccaaggaagtctgagctgggcagggtccccagtgtgtggcttcacagctccctagatgccgactatgctgggtgtggtgttggttgcttcctgcacattggtcctcaggcagtcctgggaagtgggttactcctggctccagccgacactggaatccggcttctttaccatgacactggctcagcagcacgtcttggcacttcatgcaatctccagatgggtgctgagtatcttggcccaggcacgtcactcccctctgccccacctcaggaagcctgcctctgctgggccagtgcctgacctcgtactgggagcagaagaagctcatggctccaggctgtgagcccctgactgtgcggcgtatgatggatgtcctggccccccacgtgcatggccagagcctggctggggcaggcggtggaggctttctctatctgttgaccaaggagccacagcaaaaggaggccttggaggcggtgctggccaagaccgagggccttgggaattacagcatccacctggttgaagtggacactcagggcctgagcctgaagctgctggggaccgaggcctcaacctgttgccctttcccatgaagctggcttctctctgcaacaggagaaaacctggagctacagtgtcccccaccttccttgccccatgggaacctccacctcctactccccacccacctctgcgaatctgctcccaaaggaagctgaccggagcaagatctgggcaagcagagagtgcctgggacaggactgtgacctggtggacaggggcctagatgtagcctctgttcctcctggacataggaaggtcccaagcttagtatcccacgtggcctttacaaatcctatggctggccttctcattccacaagggccctggaaagggttgacagccagccttggcatatggctgggagtcccttagcaaggccaaccctgaagaggccctttgaggcattccctatggcttagagttgtagacttacactcaaccctcatgtgagcgtgggagtgagggtggcggtcccttgccaagttggtagcagtgacccagtgattcactgccatcccaggccttaactagcaaaactacggagcgtgccaagtgacctggtgcctgtgggaagtgggttctcaggactggcattcttggaataaattcactctgtccttgc

SEQ ID NO: 553 - DNA, 2262 bp, Homo sapiens
attgctagaattgttggcaacagtgcagcagcagcgatgacagcaggtagcgcccattttgccatgtgcaggcacggggttgttttacgttcattcatttaacccaatggagagtatctgtgttccaaacatcaaaaagggacagtaaaaatacggtcctataggactgccattgtatacatggtctgttgttgactgaaaggtcattatgtgacatgtgactgtattatccttggccccttttacaagtgaggacaccatggcccagaggagtttaggatgggccccaggtcatgtagctggagagtggcagagccaaggtgtgaatcccgcacctggctctggagccctgttctcagccaccgtgctgggcagcccacacctggcatcctctctgttaggagcaggggcctgcccccacgccctctctgacattgctattcttgctaaaatgaagagacagagctgaggggagagctaaaaagaatgaatctggcctggcatcagaaacatgctgcttcccaccagcgagttttgtgcttcactcttgggcccagggcctgcagggtgtgctgtgacctcatctgaagaagcacccacacgggcaggccctgaggggctgcagcagagccacctcgatgcctctcgagccccacccggccctacttatgccttccatctgcaccaacaccgatgagaagcttgcacctccccagtcttccctggttttgctcgtagctggctggctggatccctgcatggattgcccttggacaaccctttgtgccggatgacctggccgccgtgtattgagagcgcacacagaccaggcgctgtgcctgtggtgttcccccaatgcatccgcatggcagccccactttacacaggcggaaactgaggctggttaggggagtgctcagctgcaggacctcgtggccagaccccaggcaggtcagcctccaaagccccagctcttccccaccccaccgcccaacttcttgctggtttcaggggaggagcccgctgtgccaggccctcatctcgtggtggtacccagagcccatgctgtctccccaggagggcactgctcagccgccctctctttctgcaggccagaagcacttgtgtgtcaccagcctcctgatctgccagggtctgctctgggtgggcactgaccagggtgtcatcgtcctgctgcccgtgcctcggctggaaggcatccccaagatcacagggaaaggcatggtctcactcaatgggcactgtgggcctgtggccttcctggctgtggctaccagcatcctggcccctgacatcctgcggagtgaccaggaggaggctgaggggccccgggctgaggaggacaagccagacgggcaggcacacgagcccatgcccgacagccacgtgggccgagagctgacccgcaagaagggcatcctcttgcagtaccgcctgcgctccaccgcacacctcccgggcccgctgctctccatgcgggagccggcgcctgctgatggcgcagctttggagcacagcgaggaggacggctccatttacgagatggccgacgaccccgacgtctgggtgcgcagccggccctgcgcccgcgacgcccaccgcaaggagatttgctctgtggccatcatctccggcgggcagggctaccgcaactttggcagcgctctgggcagcagtgggaggcaggccccgtgtggggagacggacagcaccctcctcatctggcaggtgcccttgatgctatagcgcctcccctctcccctcagagggcacagctgcaggcctgaccaaggccacgcccggctctcgtgctctaggacctgcacgggacttgtggatgggcctggactctccagaaactacttgggccagagcaaaggaaaacctcttgttttaaaaaaatttttttcagagtgttttggggaggagttttagggcttggggagagggaggacacatctggaggaaatggccttctttttaaaagcaaaaaacacaaaacctcacaactgcctggcaagcccagtatcacttgtttgggccctagcgggactccaaggcagccacacgcccctcctggaagggtgtgtgcgtgtgagtgtgtgcgagtgtgtgggctggtgtgtgaatatctataaataagtatatatggtgtatattatatgtgtataaataaagtctgtacatattggagctctgggagatgctggaataaaagacaagagttacatctggacttgg

SEQ ID NO: 554 - DNA, 2060 bp, Homo sapiens
gtgaaattcaggcatttgcaaaaccagctacctgtccctttgcagactggctccatgcatggaaaggccttcactgattagcgcaccataaaggcttggtgtcctctcaaacttttcctggggatgccatcttccctgggcctgtgcatatgcattagttttagtttcctcctatacacagctgcctttcagtttttcttagttttcctgagtttgcctccagcttcctcttggagtcttagctgttctgttattcttttgtctctgatctcttgcccacaggtttctgtaggtctgtgttcccctgcagctcactcatgccatggtacccatcattgctttcagctctttccaacctcctatccaaactatgccattgttcccattagcactctgattcaggcaagacagaaagcagtcccttgggcagctccacacaaaccagaacattgtaggtcagtttcattctttaccttatgtcctgagggaagagccagggtagttttcttctgactattgtactgaggagggcatttggcaagagtgagcaaaaatgccatgaaatttcctgctactttgagtgtggctttttcttggataggtggttcctttggttgctgctcaactggtttctagagttctcataaagctaaacatttttaaatttttggtccatatgtttattcattattttttgtgggggtttgggggcctggagcttcacagtctatcttgctgacatgaaactactttttatgttcaaaatcatttttataggttatgctattaattgctagattggcattacgaatgttacacttttagaagtcacttttttaaaaaaaagtatttgggacagtatagtttgttaggtgggtgtccacgagtgactagctgtctttccataggtctggtttggtctgttgtattcacaaggtccttatgcctcatggacagtgtgaattaaagttctattatctagaaaaggactgactggtgtgctgatggaaagtcatctaaactgatttgatagcatgtatgaagtaccttgatgagacttcctactctggaatcttatgtgtatatttaacaaaaaagaacaatgtagtttctttttgccacttcagtctgggtttatgccttgtaaatgagtttgctgtgacacagagaatgtgaaactgctattttgtcaggcagtgttcctaaataagcatttcagttgcactacatatatgtgggttacattccaataaaccttatcatatgttgagaatatcgtaagtcaaaaatgcatttaagaccctggaaaacccattagaaagtcaaaaaaattgtaagtcaaaccatcataagttgggtaccatgtgtattaaggaaaaaaaatcaagaaaatattaatggttgtttataatcttaacatatctgctttaactttgaaattttcaaaatttacagtgagcatgcattttataatcagaagatgttaataggctaatttaaatttgttagatttttaccatttttaagattatgtttaaaaacctgtatgagagaacatatttggagacaggaacaaaaatatggcttggaacagaaacagtatgtggctataagggttaatggcaggggggtgggggcggtggtgggcatagaattgagaaggaaaaaagcagaatttgttcaatgcacacaagcaatgagagtaaggtgtggtatgcccaaaatggaaaagaggctattcagagtggtcagggagcttagaggagcgtaaaggagagtgaaacttggagtccaggtagcctgaactgtgctttttctgtggctgagggtgagtgatcaaggtgtgaagtctactagtaggaatagacctcagttgatcctcaaagatggtgagtattgagagagtgtttatctctaacttagcctttgtgtttctcttcacagaatttcttcaggttgaattacctagaagtttgtcactgacttgtgttcctgaactatgacacatgaatatgtgggctaagaaatagttcctcttgataaataaacaattaacaaat

SEQ ID NO: 555 - DNA, 1732 bp, Homo sapiens
gcgtacgcgacggagcggggtgtgaagatggcggacgaagaggccgagcaggagaggttgagttgcggcgaaggcggctgcgtcgcggagctgcagcgcctgggcgagcggctccaggagctggagctacagctgcgggagagccgggtaccggccgtggaagcggccaccgactactgtcagcagctgtgccagacactcctagaatatgcagagaaatggaaaacttcagaagatcctttacctttattggaggtatacacagtggctatccaaagttatgttaaagcccgaccttatcttacctctgaatgtgaaaatgtagccttggttctggaacgcttggcattaagctgtgttgaacttttactgtgtctgcctgttgagttatcagataaacagtgggaacaatttcagacactggtgcaggtagctcatgaaaagctgatggagaatggcagctgtgaattgcattttttagctactctagctcaagagactggggtgtggaaaaacccggtactgtgcactattctttcccaggaaccattggataaggataaaggattccatccaggataccacattacatttagtcgtcatgtcttcttaggctcctcttggctgtgacagtttttcagactttccttgtttttgatgaccttgacagttttgaggagtactggtcaggtattttgtagagtgtccctcaattgagatttgtctgatgttgttctcatgattagactggggttatgggttttgaggaggaagaccagaaaggtaaagtaccattgccatcacattatataaagggtatctgttgtcaacatgacttatcactgttttgaggttttttgaggttttttgtttgtttgtttgtttgttttttgagaaagggtctctcactccatcactcaggctggagtgcagtggcataatcccagctcactgcaacctccaactcctgggttcaagcgattcttccacctcagcctcccgagtagctgggaccgcaggcatgtgccaccatgcttggctaaacttctttgtattttttggtagagatggggtttcaccttgttggccaagctggtctcgagtccctgacctcaagtgatccacctgccttggcctcccgaaatgctgggattacaggcatgagccactacacccagccgacttatcactgttgatgtgaacctagaccacctagctgtggcagcatgtgtcaggtttctccactgtgaagttactcttttctccctttccatgttatattctttagaatgaaattacaatgtgcagcccatcttgaagtgggaagttatgctccacctccttgaggaagcagtatctacatgttatctggaattctacacaggagatttgtctcctccctatttattttttcaatcagtcatttatattagtatggccttatatatatttattttattctttggtcataatctgatactactttattttgttgctcagtttcttccagtgttggcagctctttcctttgactcttgtgtccctcatcaatgggttttgttttttgtgtgattacttccttgctttctggcactgtaatatgctccaggctcatctggcgtatttcctgcctgagtcctggaatcaaccgtttctctagggaggacttgctccttttattggagaatggtattagaaaccaagatctatattaaactaaatatgaattctt

SEQ ID NO: 556 - DNA, 2816 bp, Homo sapiens
gtctgtttcctcagaacaccggtcttcaccaaaggcgtgggaaagggcagagagcacaggacatattctggaattcaggtcaccttttacatctgcctggagttgggtgagcgcctcatgaatgactcggcaggactgactgccactgctaaccagggggatgcaagcaatgaggaggacctgcccaggccgggtgggtgtctgctccctccctctggtccccggcacatctctggaccccctgccctgctgtcggagagagatgacgggcaacggcgtattctcagagacagggcctgcctgcaaatcctttaaagtcaatgtgatgaaatgtatacccattgttagaaaaaaataggacttagcaagttgagtgcaaataactgatgcaagactgggatggagatgggaggggtttggggcaaaagcagaagtctttctgggtccgcaccagctgtgaaatacctggcttgttgttctgtgcctgtctccagcacccaggcagggctacctgaccactctgctctctcagccccgccctggctctggagcgagcctgtggaaagggggacacttagccaaggccccagccacatagcagcagcagctgcgccctctgtcagctccttgcacctcctcactgggcctcctgcaaggcacctgctccactccaccactatcacctgggtcctcctggccttggcctggcttgcttaccttgttatcaagtcctgaatgggggaagcaatattccttctccactacaaatcaccacagtattcacaaagaattccagagaaataagaacagagacatcagaccacactgagcactcaataaagagaaaattcttcaaaggtagctgattgatgagagtttccacatgcagatgggacaggcactgatttgtgcacaagaagatcaacttgattgaatccaaaataaaggaatgtgtgtgtgctgcatgcacgcacacacatatccccatggcaaactcttgctatcccaggagcgcagaccgcatgtgaggatcctggctccttatctcccctccccgtatctcccttccctgattacctttgcgatctgcacacaccagttgagcaggtactgggagccaatattgtctttgtgttcccggacatagtccaggaggcagccgaagggcatgagctgcgtgatgagttgcacggtggaggtgaggcagatgcccagcaggcggcacacgtgggggttgtccacgctggccatcacgtaggcttcctggagggagggagaggcacgtcagtgtggcttcgcatggtggccagaaggaggggcacatggaccccttccaggtgaagacgcatgaatgcgatcttgagtttcaaaatacgtactcatggaggaaaagctgtgcctgcaaaagacctagcacagggacgtttacgcagggctgtgaagtgacagatgcagtgggagggggcccctcctgggtgcatctggggattccccatgacagagaggcccaggcaacagtggccatgaggagcacattggataaaggaggagtcggagtcacctgatctctgagtttgggaactgatagtatctttgttatgaagacctccgcctcaaggttgaggatgctgtgttttaaaatatcatgagggcctgtaggaatctgtgtggggtccggaacaccctgggtaatgactgaccctgcacatcaggaacgctggctgtgggtgctgcagaggacaagcgatggagaaggcatctggggagcaccgagccagcagggagaaaggcctcccttccccacaggccaggcttggccctgactgtgctctgggaaatgggtgggcatttgggctggggaccctgcccacagcacctctgcaaagagtagctggataagctctttcaatagaccagtcccaggttttgaaatggacagagcattcaatctacagtgactaaaggctgcctggctgcccgggacccatttctaaagagaagtggtctctctgtgctgcgcccccaggctccctatgggaaatccatgctgcactgagtcaggcatctgctgccctgctaattccggctggctgccaaggcaggggccttcctttgacagagccataaatacagactttattttaacccttctgctattcttgggctgaggaagctaaatttatttgcaatcaggcacacaatggggccctcttttctgtctgactgagaatgagggaatccccaatttccacccataaattctctttctctttaaaatacaaatggtggtgaccttttattcatatggaaaagaacacacagactgtagcagaaagcatccacagctgcttttcacatctcagcaatgcctatgttttgagtgtggacttgggcaagttagtttctctgcagaagtgaacacactgagccaggctctgagatagggtgctgctccagggtgcccgggcaggtcaggagcaacaggctggcgggaggcagggtggagataggagacaggagacaaaggcaaggtggggcgaggggacacagacagtggaccctcagtatctggggaattggttccaggacctcccttaaatatcaaaatgtgaggatgctcaagcccctgatataaagtggcacagcatttgtgtgtaacctacagacatcctcccatctacagcatctcctgattacctatagtacctaatacagtgcaaatgctatgtgaataattgttatgctgtattgtttagggaataatgacaagaaaaaaagtccgtatatgttcagtaccgatgcaaaaaaaaaaaaag

SEQ ID NO: 557 - DNA, 2490 bp, Homo sapiens
aaagttgaggtcaaatcacttctctgtataatagacaagacttgaatctggcacccttgttggtttctttcttgtctttttactacttgaagttcctaacctggactaagtgagtgtgtccttccccaccatgtaaccctcttccagatgacaacgtcgtgtgcttcaccaggcatgagcccattggtgtctgtggggccatcactccagtaagtatggcagcctttctcagtagattctatgtagatcctgccccactgccctgtgtcctttggaatcaatttctggtgtgtttttatctgattgcaccagcgttgaacaagcattttcttcgtggcatggaactccatgcttgggggctcttgagatggattagaccccatttctgctctcctaagaccggctttaggcatgccacagaaagcactgtggttcccagccagagtggtcaggaatggccagcattcccaggaaggtggtctcttagctgggccttaaagataagaaagacttgttcaacaaggaaaaggattttccaaggagtgggaatggcctaggcaaaagtgcagaggtggctgggctacttggaagggaacagcaggaaagctggtggggctagagctcaggcaggagcaaaagtgaggaaaagggtgagcacacgtggcaggtggtgtgggccagcttccagcagctttggctgctaaggggccgggactttattcattgggcggtggggatgcttataggtgcccaagaagtgcaacaatgctgcctgtctgtttgggaagcctctggccattgcaacaacagccaggcaggaagctgaagagccaggtggcaacatgaagtgagggttcaaaaagtgcccatggaggcagggaggaggacacgtcttcagcagatgttttagagggagaggtagaacacatgcaacagcatcctctttgcaaaggctgcctattagtaccacccagaatgcagtttaggaagtgctgtgcaggattgcagttctgatcattgcacactcctatgttaccccacataccccaaatccagaccatgaaaagcaagtgtcctccacaaaggcatcgttgagcacatgggacagggtaagagggtggatctgggcctccaaagcccctgtgctctgtcgcagtggaacttccccctgctgatgctggtgtggaagctggcacccgccctctgctgtgggaacaccatggtcctgaagcctgcggagcagacacctctcaccgccctttatctcggctctctgatcaaagaggtgagacatccaaaaagaaaatatcacatgttcttggtaacattcccactcctaggaaccaggccaccgtcacgagatgggacagtggcagactgctggcaatcgagtgggaagggaatgacttccagtgttttgtttggcgactgcacgttctttctcctgcttgtggccactgagctggagaaactccattcctcccagtggtcctaatgagaatgcttaactcttattatgggctcaaacctatggttgaggacccagtggtttgtctagagaattttcagggggggtcaaccaagagggagccaaatatttgggaggttctctgggatttgcattctcagtttatgaaatggtccatttttctctggagaggtggcctcgtcagctctagctgggcggctgcagcagtccgtgtgccgggtccctgctaatcagtgccctctgctctgaatgcaatctcttctccctcaggcagccagaacttagggaaacagaggctcaatgggacacctccttccagacatacctttagtcattccatccccaggttgtatggagcaaagatttagagaaagcaacaggaagcaaagagggacagaagaaaagatccattcctttctcttcttagtcgggctgatatgaccggcaggcaggtccacagttgcttagaagcaaggtgggaacagctggtgatgagccaagtttccactttcctttggtgatgtggggcataattaagtcacactggtgagacttaggaatgtgaaaatcccaactgttaggaaacagtgcctaaaaatctaaagactcaagcaccgtgcctaaaatcttgattttctgaaataatgtgttctaagtaagactcagcacaggtggggaagagcatcctccacctcgtttgttttgtgttctcgcctgataaagaggcttagtatatgaaaaacacgaggcatgaacgtgaacgagttggcagtccctgccttccagaagggcttgctccaggtgagacccaggttgaacaagcaaagaactttaagggagtgataccctgtcaccatttggaataataacgggtctgattaaaaaatgaaaactgggctcacgcctgtaatcccaggactttgggaagccgaggtgggtggatcacgaggtcaggagatcgagaccatcctggctaacacagtgaaaccccatctctactt

SEQ ID NO: 558 - DNA, 2116 bp, Homo sapiens
atcccgcatctgagaggcgcagctgcctccacccgcctagtcccgcccaagggttcaatgagcgcctactgtgtacttttggggcaggagctggggtctccttttgtggcccagggcacaagttcagcagctggccaagggccgccggcatgcattcttgctgctacccttgatgcattcattccagccagggcagggctcgcgtgtctttgggacctattaggcagatgccctagaggctgagcgacttgctcaccgctccagcgacatgggccacccgccacccctcagctgaagccggaagtcagcacctattaggtgccgcctctattcagtcggacttggaaagggttcacgtggatcccttgctcagctcagaggcaaggtctccaggtgaagtgacaagaaatgagcatgggccaaggccggaggcggtggctcatgcctgtaatcccaacactttggaagtctgaggcaggcagatcacgaggtcaggagttcgagaccactctggcctacatggagaaaccctgtctctactaaaaatacaaaaattagctgggtgtggtggcatgtgcctataatcccagctactcaggaggctgaggcaggacaattgcttgaaccagggagtcgggtgttgcagtgagccgagatcgtgccgcagcacaccagcctagcgacagtgagactccatctcaaaaaaaaaaaaaaaagtctcaaagtcaagattccacctggcaagttctggaaggcgtgcaagatgaattgcgtatcacagccccctttctacaagactaccaagtggggttgagagaagtggggaactgcccagggctacacctgcctcccacgccttcctaatccacagacaggcaatctatacctgcgggggcccctgaagaagtccaatgcaccgcttgtcaatgtgaccctctactatgaagcactgtgcggtggctgccgagccttcctgatccgggagctcttcccaacatggctgttggtcatggagatcctcaatgtcacgctggtgccctacggaaacgcacaggaacaaaatgtcagtggcaggtgggagttcaagtgccagcatggagaagaggagtgcaaattcaacaaggtggaggcctgcgtgttggatgaacttgacatggagctagccttcctgaccattgtctgcatggaagagtttgaggacatggagagaagtctgccactatgcctgcagctctacgccccagggctgtcgccagacactatcatggagtgtgcaatgggggaccgcggcatgcagctcatgcacgccaacgcccagcggacagatgctctccagccaccacacgagtatgtgccctgggtcaccgtcaatggggtaagaatctttttagccctcagcttgacactcatagtcccatggagtcagggatggacaagacagagggaccagagataaaggaacccaggcggaggttgcagtgagctgagatcatgccactgcactccagcctgggcaacaagagcaaaacttgatagctttgcatagggaaagagggcattgatgctggggttttgaaaggtgagtaggagtccatcaggcaaaaaaagtatgtattaattcgaagtattaaacatccctagccacccccattgggaaagatgtgccactgatttgcgaggcgggaggcgggggccagacttgggaatatgtgcagccctttctgggctggaaccagggtgcatgggttggggtagctgctgggaatatgcgacccctgtcttgctttgtgcagaaacccttggaagatcagacccagctccttacccttgtctgccagttgtaccagggcaagaagccggatgtctgcccttcctcaaccagctccctcaggagtgtttgcttcaagtgatggccggtgagctgcggagagctcatggaaggcgagtgggaacccggctgcctgcctttttttctgatccagaccctcggcacctgctacttaccaactggaaaattttatgcatcccatgaagcccagatacacaaaattccaccccatgatcaagaatcctgctccactaagaatggtgctaaagtaaaactagtttaataagc

SEQ ID NO: 559 - DNA, 3249 bp, Homo sapiens
ctaagatgctattttcagcaggtcgctataaacgctttctactctgaagcacacaggggctggggctggccttcggagttacgaggaaacgaggaccaggaccagggattctgcatcagcacagccgccaggagccggccggggccccatccctgacactgctgtcgcccggctgtacctgggtgctgtgtccgcggggcgtctggagacgtcgatgtggtcatagcagggcctggaacggggaggtctggcctgaactagagaaatgaggggcgtatccgcttctccaccctggcctcagatgaagaggctctgggggcaggagggagtcagacacgtgcagggcaggcggcctgtgcagggcccaaccctccggcaccagaacctgacctcctcagaggcccccaccatggagggatgtctgggggatgctgtgcgctgccgctacgatgtttggttagagattaaagccatttcagaagtggacacctgcccatgtgatgcaaagggctgggaacccggtcttgactttgcctggaatgcctttcggaaagacctctgtccctgaggctgagggacagtgcctgctcctgccaggtgcccagctcttaagcggtccccagactcatgccgcctgccccggggcctcccccaactcatttgtttatttccctgttgggaatgtattgatacctctaggatgcaaggacggaaccacacctgaggggtggacagtcagccggtgcccagcaaatatctgtggaatttcctccacacaacagggaaagcgatggagacagaaacctctgcaggcccccgagggcacccacttccctgaccccgtccacctccctgacccccgcccacctccctgatccccatcccgcaagctgggcctagggtatcggtggcctggctggtcatgccctgggcgccagcgcctgttcaggaggtgaagggtttatctcagcttggcccatgactgcgttgaaggacaggagggagcggctgtggctgtggctggaatctgaagccggtgcgggcggccagggcctttccctgggtggtgacgagcgaggaccagagccctgtctgcccgagggaagggcgaggggacactccccgtggcgggggtgggatcccggtagccggggctcagtgaccgctgcctgggccaccgcctgtggggacctgaccttcctggggaaacccatgggtcaaaggagccgagaaatccaagcaccaagtggccgctagggcaggacgggcgcgttcgcagtggagaagctgggtgtgtccgtgggaaaggaaagaaatggaagcagaggctcttcaggggcacctgggaacgcagcctacactcttcccaggcctcctccctccgtccactgtgccgcctgggtcctgggacagcctgagggccgcaggctcccatgcaaggcccgctgggggcctgcttgtctggggctgaatttggactttatggggctatggctttaattccacaatgaccgataaccagtgaactgaagccaggacagcaccgtgagcaccaagtcagagaattttcacgagggaaccaatgaacaggaacagagtgtgaggctgccccagctgcatcctccgggaggcgccttcccaagggagtgcaaggctgcctgctgtggccaggccaccaaagcaccttcttcaccgccaggcatcttttgaggcacgcgaacatcagaggccccagccacgtgctctggaggagaagctgagagccccaggccacaggcagggcagcctctgagggccggctcagggagagtggccggagcttctggcctggggcaggtggacccgttagaaactgcatgtgttgcctctggcaccagccacagcaagagattctcttcctatcacacagggaacaaactcaaggatcttgaccttgccctcctctccccagctggccgcacttggggacgctgatgccacaaaggaaataaccaaaacaagataactctattgggcggcgggaacagaaaggaacatgtagcaatcactcctcttcatccatgcaaggaagcgaggcgatgccttgaaaaggacggccttctttgctgcaaatagccagaagtgaactgagcaaaggaagcacgggacgcacaggaagaaaagtgctccaagggacggacaggacggtgccggggttaggaaagcgcaacactgttcagacacagtctccgatatatgaatggcaagcccagttaaaaatatctaaagggcttttttaggtttttaagaatatttttaaggtttagttttattaaaaaataagcaagacaaccagaaaaaagactgaggagggcataggagacccacccgcgtgcatgaggccgagtctaaagctgtggccacggcctgtggaaacccggcagaaaatctcccaaatacccagcatatgaggacggcagcaggtgaggcactggggtgagacagactcaaatgtgtggtgttggggcaggaactgagcctgcagtctagatccccacctcatccatcacgtcaaaagaaattacgggcgggtcacagatgaaaacacctaacagcaggtaactgttttgtaatcttggggagaagcctaaagcccaggaactaagagagtataacaagtgtgaatacagaatttaaaagaagagactggtttagcaatcactaagataaaacacgcgtgacaggatctgcttgtctcctctgagcacgcaggagcctctgccccaaatgcagacattgggccctacgtggcacctggctactgtgcatggttgcaggtcagggcaggccgggccacagggcggggccaccctcccattcccatgtttacagtgagcatttcctctgcctgtgtctcttgggctggggtctgtgatacaagtccgggaggccagagacgcccacggacagtgcgtggggcttggggagcgggactgagccacctctgactccttctgctgactgggatccagctccaaagccatgcctgggaagagactcctgcctctcccaggatgactccgtcccgccacgcctctgctctcagcgcccacagggactcaccaagctggactttcatctaaaactagacacacgtgacgtcagcggaccacagacccagtgcaaggggagctgtgtgggttgtgctgaaggtatgttaaaattcatacaggacacccaaaacaatcaatcttattgcatgataatttt

SEQ ID NO: 560 - DNA, 2486 bp, Homo sapiens
aatgtagccaaggttactaatgcatagatatgttatgcgtatacaaggatgtacacatatattttgtaaatataagtatacataaagagcttctactaatttttttctactacataatattctgtgtagatatattataattttttaggcagtcccttatttgtgaacatgtaggttgttcctaatctttttcttttgtaaatgatacctattttgcacatttgtgagtatacctgtagaataaaatcatagggctagaattgctgagttaagaggtatatgcattttttatttttatgttttttagagatgaggatctcactatattacccaggctggcctcaagcttctgggcccaagtgctaccatagataccactgcactccagcctgggtgacagagcgagacactgtctcaaaaaaaaaaaaaaaaaacagatgaaaaaagaaacaaagcagaaccaaagctatccctagagtttagtaaatggcatcccacacttgcgctttagagaggcccagtgctgctaaagaagtcaagaaatcagaattggaggaaagatgatatcatttgtcaaaatcctttttttttttttttttttttttttttgagatggagtctcgctctgtcgccaggctggagtgcagtggcatgatcttggctcacggcaacctctgcctccctggcttaagggattctcctgcctcagcctcctgagtagctgggactacaggcgtgcgccaccacgcctagctaatttttgtgtatttttagtagagatcgggtttcaccatgttgcccaggatggtctccatctcttgacctcgtgatccacccgcctcagcctcccaaagtgctgggattaccggtgtgagccaccacgctgggccattaaaatcttatcagtagcttactacatatattcagcccataaatactcccttcaccctgtcgtgttgtcagatgtctaccattttatgtatatattcttctgattgattttttccgttctcttttccattgatgttcattatagcatgatttattcttgatgaaagcattaaagatgagaatgatacgatttgtcccttcccgttctacccttaaggccttgctggtccttatttaattacatcttaagagtcttcttatttttggacttaattcaaaagcctgttattctgatagaggtgacaggtagctagtaagtgtgtttggtggcaaattaaagtatccttggtttttaagctttaccataatgtgcatagataactaagagtttactctaatgctattgattatggtagatgtatttaattgtttgtatcctgtcccaataaggattggagtaatcttgattatattgttcttttgaatatacatatataaaaataatatatttctcattatttattttatttttagcttatgtccctgatgccaaaaatgcacctactctttcctctaactctggtgaggtcattctggagtgacatgatggactccgcacagagcttcataacctcttcatggactttttatcttcaagccgatgacggaaaaatagttatattccagtctaagccagaaatccagtacgcaccacatttggagcaggagcctacaaatttgagagaatcatctctaagcaaaatgtcctcagatctgcaaatgagaaattcacaagcgcacaggaattttcttgaagatggagaaagtgatggctttttaagatgcctctctcttaactctgggtggattttaactacaactcttgtcctctcggtgatggtattgctttggatttgttgtgcaactgttgctacagctgtggagcagtatgttccctctgagaagctgagtatctatggtgacttggagtttatgaatgaacaaaagctaaacagatatccagcttcttctcttgtggttgttagatctaaaactgaagatcatgaagaagcagggcctctacctacaaaagtgaatcttgctcattctgaaatttaagcatttttcttttaaaagacaagtgtaatagacatctaaaattccactcctcatagagcttttaaaatggtttcattggatataggccttaagaaatcactataaaatgcaaataaagttactcaaatctgtgaagactgtatttgctataactttattggtattgtttttgtagtaatttaagaggtggatgtttgggattgtattattattttactaatatctgtagctattttgttttttgctttggttattgtttttttcccttttcttagctatgagctgatcattgctccttctcacctcctgccatgatactgtcagttaccttagttaacaagctgaatatttagtagaaatgatgcttctgctcaggaatggcccacaaatctgtaatttgaaatttagcaggaaatgacctttaatgacactgcattttcaggaactgaaatcattaaaattttatttgaataatt

SEQ ID NO: 561 - DNA, 1967 bp, Homo sapiens
aactctaggggctggactcagggcggtttgaaagatcggcgcgcaccgcaggagcaacggttggtcctgcggctgtgatgtcggtgttgaggcccctggacaagctgcccggcctgaacacggccaccatcttgctggtgggcacggaggatgctcttctgcagcagctggcggactcgatgctcaaagaggactgcgcctccgagctgaaggtccacttggcaaagtccctccctttgccctccagtgtgaatcggccccgaattgacctgatcgtgtttgtggttaatcttcacagcaaatacagtctccagaacacagaggagtccctgcgccatgtggatgccagcttcttcttggggaaggtgtgtttcctcgccacaggtggtaagtacgttcctcgcctgttactgcccacccccagccaagggaaagctggggcggccgtaggcttcttgctgaggcaccctgggtgatggaaagagcatgtattttacacacactggggcctatcggagggtggagggcaggaagaaggagaagatctggaaaaataactaatgggtactaggcttaatacctgggtgacaatgatctgtacaacaaaccccatgacacaagttttaactacataacaaatctgcacatgtacccctgaacttaaaataaaagttaaatttaaaaaccgaaagaacacatatacacatactttggaatctgacctgttgtcagcctttctaagagtgaatatgagcagataactctgccattacttggagttgcctagtggttgcctgtggctttcggtaaaatccaaactctaaagacataaaacactttgcagtttggcctctgccttctgagctagtctcatctccggtgactctccttctctgggtcagcttatcgttctctgaaaaagtcctgctgttcctgagactttgtaatattaacagtgaaaataataatggctgacatcttttgagctgtcactgtgaggcagacacggtaattgctttgttttcatattcctattggaggtaggtgttattacctctgttttacagtcatgaggttaagttgccccaggcccctagatgaaaagtggtagagccaaggtttacacctaggtaagtcctgttacagggcccgtccctttttttttttttttttttttgagacggagtctcgctcagccgcccaggctggagtgctatggcgtgatctcagctcaccgcaaccaccgtctccctggttcaagcaattctcccatctcagcctcccgagtagctgggattacaggcacccgccatcatgcccagctaatttttgtattttagtagagatggggtttcaccatgttggccaggctggtcttgaactcctgacctcaggtatccgcctgcctcagatagtgctgggattacaggcctgagccactgcagcattcaccggcacaccgtggtgaagctggcccacacctatcaaagccccctgctctactgtgacctggaggtggaaggctttagggccaccatggcgcagcgcctggtgcgcgtgctgcagatctgtgctggccacgtgcccggtgtctcagctctgaacctgctgtccctgctgagaagctctgagggcccctccctggaggacctgtgagggtggctggcccctgggctgccccttctcatggcttcgtgctgactccataaacattctctgttgaggatgtccagtcagggcttgacaggcccaggctcagcccgccgtggctgggaaggttccctgcagtgccagtgctgcagcagggagagctgggcagaagcagcgagggggcccagctggcgagactgtagccccctcccactcccacactcactcttgcagagcctgtgtctttaagcagctggcgtgttacatctccatttaaggtttcctttgaacaaaaggtctgtggctaaaaaaagttt

SEQ ID NO: 562 - DNA, 3232 bp, Homo sapiens
tttcattgcagtatatgggattgtacagcaggaaatgcttatcattaatttctgatgttttttaaagcacaactcgaaacatttcgatcatacatacatagcagtagagatctgtgcccttcaggtacattgaatctgaccatcagtttatatatgtcattgaattttaagaatactcatgttaataatagtcatctatccttgcattttgaaactgttctaatcttagtgaacttgaattggatttctgggtaaaagaatgtgtttcttttatgttgcttatgtccgaaggccttgtcagaatctgtcagactcttgtttaggtttagtgtgatcatggcgtcagagaagcaaagctttcaaataaatagtacttcaggaaatagaaatgattgaccaactttaaaaataatttttttttaattgcaatatgcagcttcagttgcccagaatcttagttccgtttctcattcttggtcttgagctggtcaggtgacatcagcagattagaagttgaatggagattaagtggattcaggaggatgttccacttagagcagtcttcaaaatgataaggtgttctagaagaaaggaatgtagtaggaactatactatgcctaactttctatcccagagtgtcttgcaagagtttaggagttttggaccctgtgtattggcagaaaagttatctccatcttaagcaggcatgacttttatacctgtgagctcatttaaggtgcatttaaacctaaaataatttccctgtattatgcttcatgggattaacactgcttttccagaacattttcagattcccctccttacatcctgagctccttctgtatatacatctgttgattttatccatccacaaggaacaatgatagtcacattagagaacaagaaaccagtaatacatggtctctaactgatgattcgggcctggatttgattgaaagtgtttgcagttcctcttccgtagaatacagagtggatgaaaatgttttcaatgcacagaacaggatgaatccttttttctttatttagcgatttacacttttgttactctattatatattcagttagtgtctgataagattttctttgcttaaggagaacggacattgccttggtatgttttttttttttttttccctccacttttggagcttatcaggtaaaaatctcaagccacatgaattgttaacacctctgttgggaaaagcctttgtgagtttttatgtacttggtctttgtttttgttattcatcctgtgtcctccctcttcccgatgtgctgttttacctaggagttagtctgctttctgaggatcttttagagagaggctgtgaagtgctgaatcacctttaatgatacagcacttctgccatctcagcatctacataggacttacatagacttcctgaatgtgtcttcttcagatactaaagtacagttggatcattttcttatctccttttcttaagcagtactttgcaggtactcccctttgaaagccagaagcataaaccattggggaatcttaacttgtagacatgcagtaaaagaaatgcatttatgtaagatctgtgagtacttaaaaagaaagccctcagtgtgtgtgaagtgaatgtgaaatgtgtgtgaaatacatagaattcccaaatagtttagcaaaggcagggcgcaatatcaagtaatttaaaaatggtccaaggaactgtaagaaggaggaactaattctagaataaatgttaaaatgccattcaagaacaaaaccacagatgccatacagacctcctgtgcttaagttatagaagaataaaaatctgaatgaatggaaggccttacgtgtatacagtttacaaattcctatttctaaaatttaagtcccttatttaacagaagtatgtattttaatgcttaactgtctcgggaaacctcatttgtgacatcatctaaggggatgggaagactagggagccagtgccacgttgaacagaacagtggtttagtgaatgtgtgaggaaagacatgggcaactgattattaatgtttttgtagttcagtttataacttggaaccaatgaaaagcaacaaaactaaactggtttgacagcctgccacttctggcatttcctgtaagtcactagcagtaggtgtgaggtgggcttgcccatgaccaggaggggtgtgtgtgtgtgtgtgcatgtgtgtatatgcgtgttggtctgcagtcacagcatacctttatgtgcatgtgtcctcgcagcttgggactcagcagtattctgggagggtggaggtgaactgtcccatgtattgtattatatattttttgagatggggtcttgctctgttgcccaggctggagtgcagtggtgcgatctcagctcactgcaacttttgcctcctggttcaagcagttctcctgcctcagcctgccaaatagctgggattacaggtgtgtaccaccactcccagctaatttttgtatttttagtagagatggggttttaccatgttggccaggctggtctcgagctcctggcctcaggtgatccacctgctttggcctcccaaagtgctgagattacaggcgtgaactaccgcgcctggccccatgtattgtatttttttcaggttatattgaaatctactaccaggaatgtcggaatgggttttggtatgtataatggaaatagatagagtggttaagtctagaaacacatacattaattgtattgaaatgttatatcaatacatcatttatgatgtgtgtgtggtcccagacctcatggccaccagtttgtttaagcattgtgaatgctttttaatagcattcattagcattaatggaggaggacactgtgttttctcaattaatctcattgatttgtttggtataagtttgggtcagaaatgaaactgccaaaacatcgatcagtacaaggaagggacacagggcttaaaatgtccacagtcttggcagtggacttggcagttctcccagtaagcagaagtacttgagcttaattctgaacttcaaagtaatattttatacttaattttaggagttttcatttacatattgaaaaatgccttgactgtattcacataaatggtgctaaaacattgtaccccttataagaactgcagcaatccacagtaatgttggttacttctgagtatttgataaaggaacaaagtcaaaatgaatgtatttaataag

SEQ ID NO: 563 - DNA, 4205 bp, Homo sapiens
attcccgggccctggcttcttggcgcgatggtgaggcactaggggcgaagcgaggcttgggctgctggagcgggaatgagggggcgccaagtggctccggaaactgggggaggttgtactggcctctccgcaaacacagtgtgtgcgggcgtgagggctgtgagtctggtagggaaaagtccaccactctcccgctcccgagacgggggcgggggtacggggcgggtaagacagagcaggccggccggcttagagtcccggtgcttccctggcggaaggaagggcccctgcctcccggggcaggaactagggcttgtctggagctgggagtcctttcaggtcttccccatccccaagaggacctcccaaggatacccccttccccagccctgccgtggggcttgtacaagaaggtgcttagaatcaggctcactcttgcacactgttaggaagcccctccgctctttccagagccagaaagtagtagttttggggttgagacttatccatccatccatccaatccatccatccgtacgttctaagcgcctggtctataccatgaagtgtgctaggcactgggaggacttgagctgccaagggaaggggaaatcggaggcttgaattggagtcatagctaaggctccaggggcagagacctaactgcgccttgtgtgtagtgctaagggggcttcctaaggatgccatcaaacttaaaggcggatggatggcaggagctggctggctgaagtacagtttgtgtaccaggggtagggaggcaagggtgggagacgtgtgtcttcagacagggaacagcatgtgcagagacttcaggttagagagagtatggctccccaggaatggatgcatttcccatagctgggagagtatcatctgcaggttagggaaagatgaggctggacaagtagagaacaaatcttcctggctcttggatcaccacaatcaagataatgaacgtatccactggcctccataatttccttgtgtgaggggctattttaagaagtataatcaagaaaggctgttctggctgggtgcggtggctcatgcctgtaatcctagcactttgggagagtgaagagggtggatcacctgaggtcaggagttcgagaccagcatggccatggcactccagcctgggcaacagagggagactctgtcttatttttttattttttaaaaaaagaagggctggtctgatgtgtcacttaaaggatagcaagccactggccaggcgccgtggctcacgcctgtaatcccagcactttgggaggctgagggggacggatcacttgaggtcaggagttcaagaccagcctggctaacatagtgaaactctgtctctactaaaaatacaaaattagccgagtgtggtggcacatgcctgtaatcccagctacttgggaggctgaggcaggagaatcacttgaacctgggaagcggaggttgcagtgagccgaggtcgcgccattgcactccagcctggggaacaagagtgaaactgtctcaaaaaaaaaaaaaaaaggatagcaagccacacagagagtgcagcaggcatggaggcgggagcaaggctggtgtgccccagcagcagcagggaagctggagtggctggagttgtgtgggtatggggaagaggggagagagttcactcgtctctgtgaggcccaggactttgttttatcccatgctgtacccccagcacttaagagtgggagctagcacagagaaggtgctcaattgatgtttgctgagcagatgaatgcctggagtagacctcagagcagggtttggtggcagggtgggtcagggagagagtttactcaacagcctggtgataggggagaacaagaggccagagggtatccatctatgtcggggaccaggggtccctggtgggcagcagtgtgggagacacacggatcctggccacacctcaggcctccctccagcctgattacctgcctccctcccttgcagaggttccggttctgtggtgatctggactgtcccgactgggtcctggcagaaatcagcacgctggccaagatggttgagtgcacagggtctagtctgggtggaggaggggtgttgggggtggggattgtgggtgtagaggatggtgaggtttctctggggttagggcctcagtgctctcagcctgtgctaccatgctttgtgaccttgatcagtggctggcctgctctgagcctgtccccaggaaggaggggtgaggtttgccagcctggctgatgtaaggacttcccttccagtcctctgtgaagttgcggctgctctgcagccaggtactaaaggagctgctgggacaggggattgatgtgagtacaagatccagcaccccattgtcccatgaccttatgaccaccactgccctgaaactctgcactaggcccagggagacgggtgagccagcctctcaacctctctgggcacctcccttccttctttccagcctgtctgttccttatcgcaggatccaggctgggggtgaggggctggtgagcaggggcctggcaccccctgaaggtctcctttccccatagtatgagaagatcctgaagctcacggctgacgccaagtttggtgagtatcccgctgagtctataggccccaggcaaccctgggaacttggcctggtgcctggtacagaggggccccccacccctcccagcagcatccttaacttaccttccctagtggaggagcatgagggaaagaaagaccgacagtcccaccttcctgtcctctgccagctcctggtggagcagtagcagtgcctgtggctccaggaggcctgggggctttgagctaaagttaatagggcaacagggaggtggctggacccacagtgacaccccctgccccacccacgggtccctcagagtcaggcgatgtgaaggccacagtggcagtgctgagtttcatcctctccagtgcggccaagcacagtgtcgatggcgaatccttgtccagtgaactgcagcagctggggctgcccaaaggtacgggttgtgggtgggcagctgggcagcctgtgggccaagggctgctagagaaggggacaggccctgtgaccctgaggtgtacctgccctgtctgggccaggagcccaagccaggccccgacatgctacctccagagctactccattctacccccagagcacgcggccagcctgtgccgctgttatgaggagaagcaaagccccttgcagaagcacttgcgggtctgcagcctacgcagtaagtatgaggccagccagggtccgggctcattctagaaggtgcacgcagcacacaaagtgcatggagagtccagggagacgacttaaccacggtcacatggttactagcagccgtagagctgggacctggccctgggtctcctgactccccccaaggtttcttgtcactgaggtctgctgtgggtgatcagaactgattatcgggcacctgccctgttctgagcctgggtcagcaggatgggagcttcttagaggccacatagccttgaatggttgagagctgagccagggtgtcggctgaggtctacttggcttgcctgctttgatcctgagagccacccaccccatctcacagtgaataggttggcaggtgtgggctggcgggtggactacaccctgagctccagcctgctgcaatccgtggaagagcccatggtgcacctgcggctggaggtggcagctgccccagggaccccagcccagcctgttgccatgtccctctcagcagacaagttccaggtcctcctggcaggtgaggctcagctattcctcgacgggtgagaggctctcccagatccgcctgactgcctcccacctgcccacctcttccctctgcagaactgaagcaggcccagaccctgatgagctccctgggctgaggagaagggtgttccaggcctgtgtggagccgccctgcccgtatggagtcacgccctctgaactgctcttcgggaggcagccctggttctaggatgctgaggccctggcccggactctggcctcccagatccccagctgcctcacttctctcttgagaacttggctcagggctcctgaggacctttcccagcattaccttcccttcccttgaaaggcaattgttggctgttttcataagcaggaaaaataaacagaagtat

SEQ ID NO: 564 - DNA, 2117 bp, Homo sapiens
gttcctgctggcgacctggaagttttcctcaggccacaacttttgcagagtggacctgggaaaaacacccgcgccgcgcataccctcaaagctgagctcggcaggacacccaaggcgacccgtcatgcccacccgaggggaagaagctgtgctgtcccgcccccttctccccaggccacccaggaggcccgggctgggctgtggggggccgaaagccccagcgctgctggtgatttctcgcccggagccccgccaagccagcgcgccctctcgcaagcctggcagaccaggagctactggaaaaaaggcgcggtcgaggaagcctggttgttgtggtcccacaaaccacaaatcatacgagagaggatcccgaaggcgggagaaaagtcagtacagacttgttcctgccacctttggaaagaaaaagttcctcaccaggcgcggggcgtgctttgctctgggcagggtcgcgcttgcaggggcttgggtgacccccatccctccctggcggctcacctcctgccgaggagggccacctgcctcctcctggcccagggcgcagggcgcgtcctgccccggcactgcggacccggggatcgcctctcccgggcgcgcgggcggggaaggaggaagaggcgggcggggaaccgcggggtgctcaccgccctggggcattaggggtgcggaaccgcgttggaggcctcgcggccccggctcgcgagagcgcactgcggagtggccgccggagctcggcctactcctctcccccacccacctcccgtcggacacagtctccactctccaggccgccggccgtgggggagcccctaatcagttcgcgcccggcctctctgcccgtcttcctcacgggaaccgcactgcgaccgggacggacggggtgacctatctcccgatgcagcgtcagaagttagcctaactacaacggactcggaatctggactgtataaggatgccctccgcacttccatcaggggtcggggatgcgatgcctccgggcccaccttctcccacgcccagggcgcgcctgcggaatgagaatatcgtactcaagacgggtgggctgcttgcgacccaaatacaatgggtccctcgcacatcctgcactcgcacgcccccttctcccccaacgagttgtcccctctaaaacgcgagcggcgaccacacaacttggccgacccgatctggcttctgaagatgaggtcggctgctctgggagcggagaaggggagagagcttagtggtttcatccgaggcctggccaacctgctccttcccacgctcccgtccaggatttgagtcttggagaagcgtgagactcgagggagctcttccctggatgcaagtcggaggccagggagccccttggcacacactcgcgcctgcacatgcttgcaccctcgaagcgatctggttccttagcgctggtttcctttccagcttctttgagatcttcgaagtcccctttcccagggaggcgggcagggccgggctaagcaggatggaaggcagccctttttattgaatctgatagctactttcccaaaaaggccagaaaagccgtttcacatccccatagttatgggaattagctttttctccaagatgcccccattagccagttaaaccatcagcgggccaacagggtcaaagttagtggcttggtggttgaaagctcggagtccgaactctctgaagacatttttcccgccttgccactttctagttggtgaccttggcaagcaaggtactcagccgctgtgtacctcagttttgcggtttgtaaaatgggagttacaatagtgcaccccttgtagagtggctataggtttaagagttaatatacgcaaggtctttaggacggtgctgagcgtacagaaggccctctcttgagtggtcgcagttggctgctctcggcctcatctccgtttgtgaaaacccgtccagattccggtcctcccaggccccagctgaagtttggagagaggctttgctgaatagctgtttagtctcccccaacccccttggccctcggagctcctggaaaaagttcttaatgaagtaatgttgagagcgtccattaaaaatgcaatgctggg

SEQ ID NO: 565 - DNA, 2774 bp, Homo sapiens
gagccgcgacgacagacggcgagccgagcgaggcggagctagcatggccggggtcggggccgctgcgctgtcccttctcctgcacctcggggccctggcgctggccgcgggcgcggaaggtggggctgtccccagggagccccctgggcagcagacaactgcccattcctcagtccttgctgggaactcccaggagcagtggcaccccctgcgagagtggctggggcgactggaggctgcagtgatggagctcagagaacagaataaggacctgcagacgagggtgaggcagctggagtcctgtgagtgccaccctgcatctccccagtgctgggggctggggcgtgcctggcccgagggggcacgctgggagcctgacgcctgcacagcctgcgtctgccaggatggggccgctcactgtggcccccaagcacacctgccccattgcaggggctgcagccaaaatggccagacctacggcaacggggagaccttctccccagatgcctgcaccacctgccgctgtctggaaggtaccatcacttgcaaccagaagccatgcccaagaggaccctgccctgagccaggagcatgctgcccgcactgtaagccaggctgtgattatgaggggcagctttatgaggagggggtcaccttcctgtccagctccaaaccttgtctacagtgcacctgcctgaggagccgagttcgctgcatggccctgaagtgcccgcctagcccctgcccagagccagtgctgaggcctgggcactgctgcccaacctgccaaggctgcacagaaggtggctctcactgggaacatggccaagagtggacaacacctggggacccctgccgaatctgccggtgcctggagggtcacatccagtgccgccagcgagaatgtgccagcctgtgtccatacccagcccggcccctcccaggcacctgctgccctgtgtgtgatggctgtttcctaaacgggcgggagcaccgcagcggggagcctgtgggctcaggggacccctgctcgcactgccgctgtgctaatgggagtgtccagtgtgagcctctgccctgcccgccagtgccctgcagacacccaggcaagatccctgggcagtgctgccctgtctgcgatggctgtgagtaccagggacaccagtatcagagccaggagaccttcagactccaagagcggggcctctgtgtccgctgctcctgccaggctggcgaggtctcctgtgaggagcaggagtgcccagtcaccccctgtgccctgcctgcctctggccgccagctctgcccagcctgtgagctggatggagaggagtttgctgagggagtccagtgggagcctgatggtcggccctgcaccgcctgcgtctgtcaagatggggtacccgagtgcggggctgtgctctgccccccagccccctgccagcaccccacccagccccctggtgcctgctgccccagctgtgacagctgcacctaccacagccaagtgtatgccaatgggcagaacttcacggatgcagacagcccttgccatgcctgccactgtcaggatggaactgtgacatgctccttggttgactgccctcccacgacctgtgccaggccccagagtggaccaggccagtgttgccccaggtgcccagactgcatcctggaggaagaggtgtttgtggacggcgagagcttctcccacccccgagacccctgccaggagtgccgatgccaggaaggccatgcccactgccagcctcgcccctgccccagggccccctgtgcccacccgctgcctgggacctgctgcccgaacgactgcagcggctgtgcctttggcgggaaagagtaccccagcggagcggacttcccccacccctctgacccctgccgtctgtgtcgctgtctgagcggcaacgtgcagtgcctggcccgccgctgcgtgccgctgccctgtccagagcctgtcctgctgccgggagagtgctgcccgcagtgcccagccgccccagcccccgccggctgcccacggcccggcgcggcccacgcccgccaccaggagtacttctccccgcccggcgttccctgccgccgctgcctctgcctcgacggctccgtgtcctgccagcggctgccctgcccgcccgcgccctgcgcgcacccgcgccaggggccttgctgcccctcctgcgacggctgcctgtaccaggggaaggagtttgccagcggggagcgcttcccatcgcccactgctgcctgccacctctgcctttgctgggagggcagcgtgagctgcgagcccaaggcatgtgcccctgcactgtgccccttccctgccaggggcgactgctgccctgactgtgatggtgagggtcatgggatagggagctgccggggtgggatgcgggagaccagagggctgggtcagaataatctttactgccctagggtggatctaaaatatttattacagtaagaaaaagccccgaggctgggagccctagctgaagcctgtgaccccgacaatttgggaggctgaggcaggaggatcacttgagcccaggagttcaagaccagcctgggcaacatagagagatcttgtctctacacaaaaaatttaaaatcagctggtcgtggtgcctcttgtagttccatctactccggaggctgaggtgggaggattgcccaggagtttgaggctacagtgaaccgtgttttcaccactgcactccaggctgggtgacagagtgagaccttgtctc

SEQ ID NO: 566 - DNA, 2568 bp, Homo sapiens
agcctgggaaggaccctaccctgtgctgctaaccaccaagactgctgttcgtacagcaaaaaaaaaaaaaaaaaaaaaaaaaagatggactcatcacacccaagtcaagaaagtgccaccccctccagagtcgtgggccatagtcccaggggaaaaccctaccaaactaaagctaagaaaaatgtaactcttttcatctattctattactctttcttctttcctcgttctattgctgaccatctagttattaacataaccaagtcaattttgcctcaaactactgcatttaatgattgtcttgttataccctgtggggacttgccaagtcaaagacagctctctacttcagaaaagtacttctgtccctcctgactctcctcagactgggaattggtaaactaggaccattgaatccagggagatttcgataaagaccccagtgccaaccaggagtcttgccccccaatgtagttgccatagttggtccaacgttctgtggaccactaaagagcaaggatggactgccccagccggtttttgtaatttcctaaaagcatacattcattttaccagaggatcatagaagttgaagacttaaacaaacttcagcaattaagacaggataccaagatgcaaatgcctggttaaaatggatcaaatagtccatctgcatattaaacaaaagcaattgttatgcttgtgcacgtggcaggccagagaccctgattgtcccccttccactaaggtggtcctccagtcgaccaggtgtgggctgcatggtagctcttttccaggattctacagcctggagtaataagtcatgccaagctctctctgctgtatcccaaagtccgacaccctgcgggtcagccccagagggccatccatcctccgtctcccaacactaagttcacttcgtgtctctcacgacagggaggaaacagcattccttggagacctgaaaggatgcagcgagcttaagaattttcaagagcttatccatcagtcagccctagttcatccctgagtggatgtgtggtgctattggggtggacctttactgggcactctgccgaataactggagtggcacttgtactttaatccaattggctatccctttcgccctggcatttcatcaaccagaagaaaaaaaaaataagacatcataaagcgagagaagccccttaggggtctttcgactctcatgtctatttagatgcaattggagtcccacaaggaataccagatcaatttaaagcttgaaatcaaatagctgcaggatttgagtcaacattttggtgggtgacagttaataaaaatgtagattagataaactacatctattacaaccaagagcaacgagcttttcatgagttaaaggaaaaactcttgtcggccccagccctgaggctacctgacctgacaaaactctttacactctatgtgtcagaaagagaaaaaatggcagttggagttttaacccagactgtggggccctggccaaggccagtggcctatctctcagaacaactagacagggtttccaaaggctggcccccaggtctaaaggccctagcagcaacggccctgttagcacaagaagcagataaactaacccttaggcaaaacctgaatataaaggacccccatgctgtggtaacttcagtgactactaaaggacatcattggttaacaaatgctagattaaccaagtaccaaagcttgctatgtgaaaatccccacataaccattgaagtttgcaacaccctaaaccccagcaccttgctcctgggatcagagagcccagttaaacataactgtgtagaggtgttggactcagtttattttagcaggcccaacctccgagaccatccttaaacatcagtagaatgtgagcagtacatggatgggagcagctttgccaacccctgcaaagtgactctgaagaagatgccaagccctactccagtcacacccagaagctgactggtccacgcaaggccaaagcatgaggaaactcatcgcaggactcattttccttaaaatttggacttttacagtagggacttcaactgaccttcctcagactgaggaatgttcccagtgtatacatcaagtcagtgaggtaggacaaaaggttgctatggtcctagtattttatggttattgtaagtgtactggaactctaaaaagaacttgtttgtataatgttattctatacaaggtaggtagcccaggaaataaccaacctgtgtgtgttatgacccatctgagcctcccataaccacagtttttaaaataagattaaggactgaggactgatgggggctcataaactatatgagtaaagttttagccaaaacagaagaaaaaagggtgcccaaacaagtcaccttaaaatttgatgcctgtgctgtcattaatagtaataagttagaaataaggtgtggttctcttaattagaaaggaggctatatggcagaaaataaatacatctgtcataaattaggactgtgtggaaataaatgtaaacaccggtcttgtgtcatttaggccacttggat

SEQ ID NO: 567 - DNA, 2072 bp, Homo sapiens
gtagagacggggtttcactgtgttgactaagttggtctcgaactcctgacctcaagtaatccacccgtctcggcctcccaaagtgccggagttacaggcgtgagtcaccgcgcccagcctgatatgcaaatattttaaacttctatgacgttccactttatctatttgttcttctgttgcctgtgcttttggcgccatatccaagaaatcattgccaaatgcaacgtcaggaagcttttcccctgtgttttcttctaagagttttgtggttttagctcttgagtttaggtctttgatgcaagttgagttgatttttgcatgtggtgtaagggctggtccagcctcatgctctgggctcttgattcacttctcttcttttctcacgcccagctggttccgctgggtggcggggaggagtggggaagtcccgggctgggcctgcactcgatcatcccctctcaggccagccagggagtctcagctcctgcccaggacctggctggacgtgctccctaccgggaaagcctgggccgtctttctaggctgatggcagggccagcccggggcgtcctgaggcctgccctgcggacatgccccttgttctaggtggtgtggctgcccggcctgcgtgtgagaccagctgtctgtgcttcaggccatggaggctgagtgtttccagcctgtccccttgctcggctctccctctggggaagcccctgcagcccattctctgcctccgcttctgccatctgtgcctttgtctgcttcctgtttggaggtggtcatccctggggccacccctcatgatctggacacgagtctccatcctgaagccaccacccaaacccctgtgcctcaaacccctcccacccaccacatggggttccactgtgaccaactcagcagctgatgaagcttcccttggggctctcctagcaacggggagctggctttcccggaggcctggcctctccctaagtggaagtggggcgtgagggtgtcagcctttttctgctgcctggtgctctaggttggcttgtcacccctggaagcacttgccatccttatacagcaccccacacccacctccccgcctcctaccccttcttccaaggggtcatctctgcttccctccccacccaacctcacccacgtggtccgcccagcaacctttgacccccaacatgacaaaataaacctcccttgccggtcactcattcattcattcagcattgggtgctccctgtggacttggcgctggggtcccgtggaggacaaagccagacacagtccttgccctcatgggactgcacaagtgcaagaccacatcagtaaacgtgaaacacaggaagtgacaggtgtgacaaaggggaccagtggcaggacagaacctggggttcgtaggaccaggtcaggagggctgcctcggggggacaccttcgggctgagcgcagaaggatgaggggagtaaaccaggctcaaacccagcaggcagaggcgatcgctgcaggcaaccggcaatgtgttcaaaggccctggggcgcggggggctgaggccggcagcacggcaggaagtaagactggggttgaaagagactgactgtcatgttgtgaaatatacacttggttttcatctccatttcctggcacacaactcctaaaatccttggaatctccaaagtgatgtctttttggatgctcatgattgacagaccagctggcagcttcaggatggttcccagggaagaccaggtagaatcacaaggttcagcaccaccccgcaacctccaggtaggggagaggggctgaaggttaagcagatcatcagcggccaatgattgaatcaatcatgccttcgtaatgaggcctccgtgaacactcagaaggatggggttccgggagcttctggatggatgagcatgtggaggctcctggagggtggagcgcctggggagcacatggaagctctgcgtccctcccccataccttgccctacacatctcttcccctgtatcctttgtaatatcctttataataaactagtaaattccatgagccccaggaacatgtgt

SEQ ID NO: 568 - DNA, 2349 bp, Homo sapiens
ttaagatctttgcatttgtgttcatgtgtaaaattggccaaatccttgtcacatttgtgtatcaagattatgctgatttctggccgggcgtggtggatcgcgcctgtaattccagcactttgggaggccgagggggtcggattatggggtcgggagatggagaccatcctggccaacatggtgaaaccccgtctctactgaatatgcaaaagttagctgggcgtggtggcgcgctcctgtcatcccagctgcccgggaggttgaggcaggagaatcgtttgagcttgggaggtggaggttgcagtgaggtgagatcgtaccactgcactccagcctggcaacagagtgaggctctgtctcaaaaaaaaaaaaaaaaaaaaaagattatgctgatttctgtgaattgcttgagcccaggaggcagaggttgtagtaagctgagtgcaccactgcagtccagcctgagcgacagagcacaactctgtctcaaaaaaaaaaaaaattatgctgccctctttagcttgggaattattccctctttttctagtctgtggagacggagggtttaagatcaatatctggctgggtgcgggtggctcactcctgtaatctcagcactttgggtggccaaggtgggcagatcacctgaggtcaggagttcaagaccagcctggccaacatggcaaaaccctgtctctactgaaaatacacaaaaattcgccaagcatggtagcaggtacctgtaatcccagctactcgggaggctgaggcaggagaattgcttgaacccaggaggcagaggttgcagtgagccaagattgtgccactgcactccagcctgggcaacagcatgggactctgtctcaaaaaaaaaaaaaaaaaaaggaaggaaagatcaatatctcttcctcagccaggtccggtggctcatgactgttgggaggccgaggcaggcggatcacttgaggtcgggagttcgagaccagcctggccaacatgatgaaactccatctctcctaaaaatacataacttagctaagcgtggtggcgtgagcctgtaatcccaggtacttgggaagctgaggctggagaattgtttgggcccaggaggcggaggttgcagtgacctgagatggcaccattgcactccagcctgggctacagagtgagactccatctcaaaaaaaaaaaaaaaaaagaaatatctatctatctatctatctatctatctatctatcttcctctttcttcatcttctttttcccttcctgaacagttcaaaccaaaagtcattaggtaggatcaagcaagatagatgtttacgtagtgggaaggctacagtgctggaagtgccagatgctggggcccctgaagctgaggtgaatgtcattacaggtggcaggtggcagctcagtacatagagactgggcccaaacaagatcagaagggcatccatgtaggcaggggtgaagagtagaggaggccgggcatggaatagtgaagtctgaagcggggttgaggatgctgaaccacagggaggcctagagtggggtggcggagtcaagtggggtgagcagggcttttgcatggagaggggcggccgtggcgcctgatgtgggcaaggaagttgtgtctgcatggttgagggagtggagagagggaagagggtgattgtgccctcgggagggtaaaagagtccaagcatcctaaggaagacgtgcatttggggagtgtgtggcagcaatagtggaagactggttacatacaaggagattaatcaaatatgtaagtatattgagtaaaatgggaaccacatttttcactgtcaaagaagggaattataaacatggaaagagagaaactcgaatcaactctgtggtgttgactttgaattgaagacattgatacaaatttaaggttttcagtatacaaagtaagacagttgtgaagcaatctgattgcagattccttttacatttttattaccttaatcttttataagtatctcaccctatgcttaatttgatggctcttctttttttttttttttttcttcttcctaatagagacagggtcttgctctgccgcccaggctggaatgcggtggcaggatcatagctaactacagccttgaactcctgggctcgggtcaccatcccacctcagcctctcgaatagctatgagcacaggtgtgcaccatcactcccagctaatttttaataattttttatagaggctggacccagtgggtcatgcctgtaacagcactttgggacgttgaggtggaaggattgcttgagcccaggaatttgagactggcctgagttacatagtgagaccctgtctct

SEQ ID NO: 569 - DNA, 2222 bp, Homo sapiens
attaagtaaactccagacttttatttagattttaccagtttttccggtaacactcttggttgcaggattcaatcgggtatatcacacattgcacttagcctgggtccaggtgtgttttatgtatatgtatgtatgtgcataccacagggatagaagaagccaaaatattttcttttgtcattgttatctttaaggagtggacttctgggttatttttcatgaaattacactccttttgttttccaaatatcccagtgggagacgaggagtcccttttttttttttcagccagaagcatatacaggaatttaaatagtattgcaatccagggtagggcaaacactgtctcctttctcgatcctgagggcatcactgggttgccacagtggcctaccctaccctatcttcctaaggagaatgctggacaattgtatttaaatgttcttcagcatgttctgtttcttttagaatgctttctactaggctttgatgctttaaatgaatgagtcccccagctcttgagaaatgcctgatcagaaaacatgttcagggggcgctagggaactgaagttaagactaattgaatgaaattttctttgacagatttttccaccatgagattagtacagaatctgtgtgagaagagaggcagaagcaattttgttactgtagaagagattacaaagaacttttgtaaattgcaggtaggagagacttgttttgcttttttgacagtcttgctcctctctgtatcccacagctggccctgaaggaccctgttcatacagtgtcactgcagcagttcatctacgagaagctcaaggcacagcaggagatgctaggagaacaaggtttccagtccctcatggaaacagtggatacggagattgtcacccagctacaggagtttttgcaaggattctaagagcacatgacatgtggctgcctcccctttcagaaacaagctgagtaacccagcctgccgtttgtatgtgagagcctgctgagatgaagaaatcacttcatgaaaataagcaaagaccacacattttttactacaaaatgtaaaggataaatgtaaatcctgcataactaaaatcacaaacctattcctcaaaagaatttaattttatatttatgagggggcccttcactaaaaagtacatgtaaaagtacatttgatgacaatagctgcttagtttcctgttaagagaagaaactttatcttttaattatgtgctcttaatatttgaagatgagagttaatacctgagatgtttttctgcaaccaaaattcattaaatttggctgccttatcctttttttaagctaatgaaactacaggtttgaaaaatgacaaagctgttcagatgatgctattaaagaaatgtgtgtactaagcaaaaatatataaatagtgacaaatacacattaccaagcttatcttgcaagggagttattttcatctaacatagaaagtgtgttttatcagacaaatgcttttattttcattctaataatttgatacagaaattagtaaaggcatttttttctttttttttccagtaaatacattgggtctataaatgtgcatttgtaagggccacaaaagtgaacgtgtggtactgtagtaccacgtgggagacctctggttatggtttagtcctagttcctttgttactcctgtgagcaccgagaagaactgggcgactcccagtcccacctgtgctgtgacagtcccacgtggctatgacagactgtttagtacttacccttctcaggttcctcagtgcaggggtgcatcagggcctcaataataggggtatacctgggaggatccagcagtaatccccagggtactaggattactagtactctgatggaactagtcttccttccttattcctcgaacatgcagtacataaaaaggggaaaaggagaaaaaaaaagccttactttgttttacttgccatttattgtaaggaaactttaaagcattttttaggaaatactcaaaagcaaggttggaaaatgttttatctttctatagaaagttgggtacagtatgtaactgcgggaaacccactgcccctttgtaagctgtggaacccaaactgtatggggatatttgatgttttcagaaagaggaagaaaatatggtccaaattaaattttccaaagataaaaaaaaaaaaaaaaaaaaaaaaaaaaaaaaaaaaaag

SEQ ID NO: 570 - DNA, 2663 bp, Homo sapiens
aagcacaggtgggttccgcggcggcccggccccagcacttgccggcacctgcagcccgcctagacccggcgctcgggcgtcccgcgctgcacttgctcgccgcgtgactggaggaccgagcccccacattttctttatgtggttgtggtgggggcacagtaatgccctgtgcgccgtagcgttcctgtggggatgtggccggggggcgtcgggaagcgtcactgctgccaggtgcagtggctcacgcctatatttccaggactttgagaggctgaggcgggcggatcacctgagtgatgtccgagctcagcgatgaagccagcgagccggaactcctgaaccgcagcttgtccatgtggcacgggctcgggacacaggtcagcggggaggagctggatgtccccctggatcttcacacagctgcttccattggccagtatgaagtggtgaaggagtgtgtgcagcggagagagttagatttgaataagaagaatggtggtggctggaccccgctgatgtatgcctcctacattggccacgacacaatcgtgcacctgctgcttgaggcgggggtgagtgtgaatgtgccgaccccagaagggcagactccactgatgctggcctccagctgtggcaacgagagcatcgcctactttcttctccagcaaggtgcagagctagaaatgaaagacatccagggctggacagccctcttccactgtaccagcgccgggcaccagcacatggtcaggttcctcttggacagtggagccaatgccaacgtgagggagccgatatgtggatttactcccttgatggaagcagctgctgctggccatgagataatcgtgcagtattttctgaatcacggagtcaaggtggacgcgagagaccacagtggagccacagcccggatgctggccaagcagtacggacacatgaagatcgtggccttgatggacacttactcgccctctctgcccaagagcctctatcggagcccagaaaagtacgaagatctgagctcttctgacgagtcctgccctgctcctcagagacagaggccttgccggaagaagggtgtcagcatccacgagggaccgcgagccctggccaggatcacaggcattggcctgggcggcagagccccacggcctcgctatgagcaggctcctccccgtggctatgtcaccttcaacagcagtggcgagaaccccctggaagaagagggcctctgctgccgggatgtcacctcccccatcaatgagcgggatgtggagagcagcagcagcagcagcagtcgggaggaacatgctttctgtgccaacctggggcccgtccagagcagcagcagcagcgagggcctggccagagcccaggggctcagcagcgaagcttctgtggagagcaacgaggactcggatcatgcctgtaaaagctcagctcgcaaacaagctaaaagttacatgaagaccaagaatcctgacagccagtggcctccccgcgctgcaactgacagggaaggctttctcgctgagtccagcccccagactcagagggccccctactcaggaccccaggaccttgccgcactgctggagcagatcgggtgtctgaagtacctgcaggtgtttgaggagcaggacgtggacctccgcatctttctgaccctcactgagagcgacctgaaggaaattggcatcacgctgtttgggcccaagaggaagatgacgtccgccattgcccgctggcacagcagtgcccgcccacccggggatgccctggagctggcctacgccgaccggctggaggctgagatgcaggagctcgccatccagctgcacaagcgctgcgaggaggtagaggccacgcggggccaggtgtgtcaggagcaggagctgcgcgccgtggtggagagctgcctgctggagcaggaccgcgcccgcgaggacctccaggcccggctgcgggagacgtgggccctggcccgggatgctgccctcgtcctggaccagctgcgagcctgtcaagctgagctgtcatctcgagtgaggcaggaccagccccctggtgcagccactctgggcctagccgtccccccagctgactccaagggctggcaagcgtccctgcaggccatgagcctccccgagctctcgggagccctggaggaccgtgtccgtgagatggggcaagcactgtgcttagtgacccagagcctggagaagctgcaggtgctgaacgggaagaagtggcgggagacctagcctgcgggccgaatctgacgttgggtgattggtccaccctgaagctgtgtgccagggagtgaggaggacagtgagcaggtagctgccatgtgcagcccaggcccagtgggggccagaggatcaggccccgggagcagccggcagacagaggcaagacgggggctgcggccctggctcggcagctcgggccagcactgaggcgggacgagggcctcacccagaacctcgtggtgaggcccagagttcatgggctgccctggcccataccaggcagggccctggggggaaagtgtatccatatacacgcacaggtgccaactgaggtgggaccttaggaatgaggactggggcacctggaaaatgccattttttggaaaataaaatttaagaacagct

SEQ ID NO: 571 - DNA, 2156 bp, Homo sapiens
accctccgccccgcagctgccccggcccacagcccccagtctctgcagtcgctgaatgcgcccccctcccctccccgccatccgtggacgccagaagccatgggcactggaggatgtcagggaaaggtcaagttcttccttgggatccgagagcgaggacggagctcccggaagcaccaggggccacgagagttgggccgccctccacacccgccccgcgcaaggtccgccaccctctacccccatcccaagctgggatcctccctgcccttcacccccttccgtgcgatgtccaccttccccggagtcggcgctggagatgccctacctcggctgccgcgggcggggaccgaaggtgcagctcggcctggcgatgcggggccatgagtaaaggtctggaggacacggagctggccagggtccgggttgcacgccccgcggccacaccggagtccacgctgcagcgggggtccgagcccgttttcagggtccagggacgtggcggcctggccctcagccccgcctcagggctgtgcccccgactgcgcccggctctgtccccacctccccaaccccaggtaagggcgcgcgagaagggacgcggagagcgccggtcaggaagcccggactgagcgcgggggctgggatctgggatccaaacgccgtggccgcgggcccgcgcccgggcagacccgggctccgctctcacgtcacgcggtacatgggctacagttccttgtccgagggcttccgggagctggagccgcacagaatgaaggggttcactggtagtggttcccaacttcgttgcatattaaacccccctggagaacttaaactccagtgcccagtcctatgcaatcagatcctgggtctccactgtgcagcgcccgtggagagccagcgatgtggagggtcgagatcacccagttctttggggacagggtctcactgccaccaaggctggagtccagtggtgcagtcacggctcacagcagtctcgacctccagggctcaagcgatcctccaacctctgcctcccgggctcaaaagatcttcccaccttggccctccctgcacagtagttgggactgcaggcctgcatcaccgtgcctggctcatttttatattttttgccgagatgggatttcaccgtgttggccaggctggtcctgaactccagatctgcccatctcggcctcccggggtgctgagattgcaggcatgagccaccacatccagccataatttttaaaaatggcttcctgaggttttacaagaaaatatgcacctcaaaatacacaaataggcatgggaatagagtacagtgaagtgaaagataaaatgtactgagagctgggagtaggagagacaaggccctggctgagggggtgtcagtgggcctcccaacacctcaagccaatccacttggaggtctcccaaagttcatcaggagaaccacctacagccaagaacagaaaaggattcaagaaagccgcacagatatcatgccctgacctgcaatgaggctgctcacttcccatgacttctgcttgataccattcaaccctggttagctcatgctgaagaaatatttactagaagcctcagatatgggtgcctagaaggaaaaagatccaagttctctgtggtggtgcaacctgtgggaactattgcctcatgctcagaaggccaagcactaggctcccatacaatacctacaagacagacactctgggagggagatttctcttttggagggagaccccaggtgctctcctctgggtgcccgagtgttggaatgggcggatgccaagacttcattctagctcttggtcagcagcagcactaagggtctctgagaagcatcagagatttcaccactgatgaactgccaggaggctagtgggggcggactgaggagacactgaaacaccgaagctgccgccaccaccggctgatgcaagttttattgagacaatatacaaacaggccatggaaacaagggttttgatgctgggaccagtaacgtaaaacggaatacaaaaataaaaaggcactaatctgttaagaaaagacactcgatgtattctaagaatataagtcatttaatactgttaattttatagcacaaaataaaacaagctatgatcccc

SEQ ID NO: 572 - DNA, 1904 bp, Homo sapiens
tattaacaagacttcacttctttaagtgtatgcccttaggttcctttttcgttagtcttaaccattttccatactttttcctatctagcttagaactaatctgtgagccaccgtgcctggcctcggcctggtaactcttaagttttgcaccttgatggtgactttaagccttcaggcagaactcccaggtgctaatccgtcagtccggcagccgaagcctgagctcaccaccttcagacaccaccagcctccttcagatgcccaaggatgcctgacaaatgtcattttctacacatcttatgatgtgagaaggattgagaagtactgaccagagacacagctacatccctcccttccacaagctgcaatcagtggataataaagaagagtttaataagcatatcctgaccttcctaaagtgtaatgttgcataaacataaagattctggctgcctctggtgcttagaatctatgtcgtgtaggccgggcacaatgattattatactcagttgtatccttggctgcctaaagtgatgccaggcccttggctctgtccagagttcctcttgaggaaaatgaccacgctcagctgctgcctttgttctgtttggttttcagacgaaaacagcaaccagagttccgtgtctgacgtctatcagcttaaggtggacagcagcaccaactcaagccccagcccccagcagagtgagtccctgagcccagcacacacctccgacttccgcacggatgactcccagcccccaacgctgggccaggagatcctggaggagccctccctgccctcctcggaagttgctgatgaacctcctaccctcaccaaggaagaaccagttccactagagacacaggtcgttgaggaagaggaagactcaggtgccccgcccctgaagcgcttctgtgtggaccaacccacagtgccgcagacggcgtcagaaagctagcaccatcccggccctccgcctcctggccctgcctctatttattgcattctggttctggccgcgccgcgttgctggggtaagggcaagcactggggtcaagagcctgcacacatgagccttccgggctggaaggctggcgtaggacttggggctgtagcatcatcttcctgaccctggcacctgtgtctacttgctcccgagaagaggagcgctcatgtcttttttgcaccccaagttggctggagcatcggccaccccaagattcatctgtgacctccaggcagcagtctctgctccagaatctctggacggagctgctggcagcttctgcgagaagagagagatgtggaaggcaccttctagaagagagcgtgcctcaggttacttgaacttgaacggagactgtagactcccggactttcccctaggactgggggccctgtaggctgctgttggaggactgggtagagacattggagggaagggaaaggcttttctccacacaagggcagagagtccgtctagatttcttgctgtcctgccagctctgcccatgcctgaggtggtcctacctctcacgggcaccctagctgctgacagccctttgtggccgccgtccccatcccctgccctcagcacacacatctgcacacacgcagctttgttctcacctctacctgtcattccagcatccctgcctcttgtcacaaactgccccagcaagaatttgaggttctgacaacagtacccatcccccacagtaccccttcagctcagtttctagaaagctcccttttctttgaaatctgcatgttgaattgaactttgtgattttattttttgtttcaaaaaagtttaagaaaatggaaatgggcaacagtgagtgaagacatattttagcactgaatagaatatttttaaaattaaactatttgaaatatg

SEQ ID NO: 573 - DNA, 1829 bp, Homo sapiens
gcgcgacagcttccacccgcctcaggcagtatcagccgcgccgcagtcggaggaaatagacgcggggcctgaggctcctggacttgagaggctgcagaaaaggcccaggaggctgttgatgacatgaacgaccaccaggagaagctggagcaggctgatgcacagaagggcggagaagagggacacgtgccagacaacagctgcagagggctccaggcagacggagttccagagcgaacggtcatacagataattcctatcccaaaaaataaggagaccaggggtcaggcgataagtaaggaaagccaaacaggcaaccccagtagaaaactggggtctcccctgaccgggtcatgggactgggctcatgagggtgaccgttactgctccatttgcaattttctgagtatcagaggagcaagatgctaggatgtgtgacccaaaggagcttgtagttcgtctgtgtgtctttttgtctctctctctctctctgtctgaaaagaccaagcccaagcctccacccatttacctactatgcaggtctttggatgggtaaccatatttccaagcttgtgtctgattgaaggatgaaacatcaaacatgcaaaaaggaccatctttcagagcaactccagaagtgacaaagcaaatcagggctccaagtaaagccaggccacctgacaacagagcagtaagcacctgcggagggaggagaaacactgagctaagacggggtcgcagctggggagcctgcggagggaggagaaacgctgagctaagacggggtcgcggctggggagtctgtggggcggtctgcacaggtctgacttctctggtctcagtgttcttccgtcctgtcatgggggagaattctgtccatggcaccccctttgaagcataacccatggtggggaggccgtgaggggtttctaggagagaaaggaccaagaagcagaatcgcaggccccggatctccctgaccgtgagttcgcctgagctgctcagcagcttggcatcacaaaccttttgcacattacagccattcagcctctgagctaaagaagaagctaccacaggcccaccactgactcttctaaggaaaagctgcattttcaaaagttccaggttcccaactctgattcttctctatttcaaatcaaggataaaaaaaaggaagggagggaaggaaggaaagaaagaagcaggaaagaagggaaggagagaagtgggagggagggaaagaagggagagaaacagcgagagagaagctgcagccaagctctgaaatgactccacttctgtcgctgtgtttctccagctgagagctttcttggccatcagtctgtgctcccactgccctcccagaaaataactgggtttccttccttgacaggtttctagcctgcttctacattggcttctttctcgttccttccttccttcccttccttccttctttctctctctctctttctttttgagacagagtctcactctgtcgcccaggctggagtgcagtggcacgatctcagctcactgcaacctctgcctctgagttcaagcgattctcctgcctcagcctcccaagtagctgggactacaagcatgcgccaccacacccagctaatttttgtatttttagtagaaatggggtttcactgtgttggtcatgccggtctcaatctcctgaccttgtgatccacctgcttcagcctcccaaagtgctgggattacaggcatgagccaccgtgcccggcccatattggattctttcttagggttctagatttttttctccctcccccaaaaatgcctattttaaaaatgtg

SEQ ID NO: 574 - DNA, 2523 bp, Homo sapiens
ttctttaaaaatgatgcaaaaccctttgtccccacttgctgccgggatgagaggtaagcacggacccgcccaccctctgacatcgttagccagtgaagaccccggagctggccatggagcgagcacctccgcatccaggctcggcagtgaggaggatgggccccagcagatgagcttctcccacaggcagcacgcagggtagacagagccctcgcgtagggcatggagggcccaggtggacatccttttgtcagtgaagatggcccctcctcaggttcccctcacgacaaaagcgtttgtgatcagacagcccactagggtgaatggctcgtctcttaccttcccacgggtaagcagagacatggacggcttccacaagaatttattatcgcaatgaatgtgtagcatgaggggggtcttatcttttaagaggggcttactctgttgcccaggctgcagtgcagtggtacagtcattacttattgtagcctctagctgctgggctcaagcgatcctcctgcctcagcctcctgagtacctgggactataggcgtgcaccatgcctggctaattttttaaattttgtagagacagaatttcgctgtgttgcccaggctggtctggaattcctgggctcaagtgatctgccggtgagccaccgcgcccagcctgtctttaaaaattttaaaaagaacatcccactcagaccagcgttaacaataacatactttaggtggtcaaaaataataaattttgttgggtatatttcatcacaatttttaaaaagacaaatggagcatgccccgccctcccccccaaaaaagatgaatagcaacacaaacaggatacgggaaaataacattttggggtctatactcaaggtttttggagacttctattacagagacctagcaggggtcatcagttaggccctagacgtcctcacacccttgcaaaggggatgtgtggtcagctgccacgtcttgtccgtggccaaaggctgtagctcctccctgaagcctgagcacccctcccccgacacctcccagaggaagctccgtgatgcccctggggccctgagtgtctgcttataaccaaccctgtttaattttcctgtgaagaatggagacttttgctgtcggctccagagctgtgcgtctgtgtgagtagggggtggccgtccccccagggagggtgcagcttcatgtgtctggtggcctttccttccagacccccagaggagcccaccacctggaccgggtacttcgggaaagtgctcatggcctccaccagctacctgccttcccaagtgacagaaatgttcaaccagggcagagccttcgccacggtccgcctgccattctgcggccacaaaaacatctgctcgctagccacaattcagaagatcccgcggttgttggtgggtgccgccgacgggtacctgtacatgtacaacctggacccccaggagggcggcgagtgtgccctgatgaagcagcaccggctggacggcagtctggaaacgaccaatgagatcttggactctgcctctcacgactgccccttagtcactcagacatacggcgcagctgcaggaaaaggtacttacgtgccttcatccccaacgagacttgcctacacagacgacctgggtgctgtgggtggcgcctgcctggaggacgaggccagcgccctgcgcctggatgaggacagcgagcacccgcccatgattcttcggactgactgaacttgacctgtgaccactgacccggggagcagagaacactggcttcacagaggactttgtgcattgctgctatgaactttgacctgagtcgggggagaggatggcagagactttattaaaaaaaaaaaaagattgtagtggtagtctaactccataacgctgaggaaatacatcattttcacttcagtggcttttaaatcctgcttatgaattttagctttttgtttgtttgttttctctttttgccaaaattaactgtttggtgaagcccgcaaaacctcctcgctttgcatgcatgaacgtgccaagccagcataggggagctagaagccactttccagccacctgccgttgggttttttcatatctgtacataatgccgagtgcgtaaggaaaccgtggcgtcgcgcacagtgggtctgcttgtcaaggccagttctgcagtgacaggcccaggggctgcccaccaggtgtgctgggcagacttcagctgggacagaagtccgatctccctagggccccacctggaccattttccctccgttttattttgttaattaaattctttccaaattggatcgctctgggatttcttccatggtggacttttgtttctgatcttgttttccctgtggatattggaggacagcgaggttctttctgatactaaaaacctttctttcaggcagcaaatgaacttgaaaggttgcctggactcgctggagcaaaggaaagcgattttgtttgtataattaaatgatctgttcttctacttc

SEQ ID NO: 575 - DNA, 2440 bp, Homo sapiens
actcagaggccgtccaagacactggcaagccgcagaagcccagttcgccggccatgaagcagcggttctcggcgctgcagctgctgaagctgctgctgctgctgcagccgccgctgccacgagcgctgcgcgaggcgctctgccctgagccctgcaactgcgtgcccgacggcgccctgcgctgccccggccccacggccggtctcactcgactatcacttgcctacctccctgtcaaagtgatcccatctcaagctttcagaggacttaatgaggtcataaaaatactgatccagaacaccaaaaatctgagatacattgagcccggagcatttataaatcttccccgattaaaatacttgagcatctgtaacacaggcatcagaaagtttccagatgttacgaaggtcttctcctctgaatcaaatttcattctggaaatttgtgataacttacacataaccaccataccaggaaatgcttttcaagggatgaataatgaatctgtaacactcaaactatatggaaatggatttgaagaagtacaaagtcatgcattcaatgggacgacactgacttcactggagctaaaggaaaacgtacatctggagaagatgcacaatggagccttccgtggggccacagggccgaaaaccttgccctgccgagctatggcctagagtccattcagaggctaattgccacgtcatcctattctctaaaaaaattgccatcaagagaaacatttgtcaatctcctggaggccacgttgacttaccccagccactgctgtgcttttagaaacttgccaacaaaagaacagaatttttcacattccatttctgaaaacttttccaaacaatgtgaaagcacagtggggaaagtgagtaacaaaacacttgggggcggggttccaccgtgttggccaggatgatgtagatctgctgacctcgtgatccgcccgcctcggcctcccggggtgctgagattacaggccttgaaaatattcaggatatccagttactggccactatctgtcccctgataccaagaagttggacacagaactataccttctctgatacagtagttgcttgaagagaccatggattcaattgtggaacactagtttgtattactgaaggctggccaagctgttgaaatacttgctgaattggatgctgaagaatacctgctcttccagaagtctctgtcaccataattggtacattgactttataaaggtgaccttaaaaaggagaaagcaaaattgaaacaaacttcaaaaagaagcctacaagaagtacatcaaagattacataaaatcaatcaaaggccaacatgaagaacagagacctaaacagtaaaaccttttatgacagaagctgtagaacaaaccaagcacaccttactaatttcaacaactaccagttttttaccagtaaaaacatgaatccagatggcatagttgctctaccatgaggatggtgtgaccctgtatatgattttctttaaagatggtttagaaatggaaaaatgttaaccaattggcaattactttggctctatcacctgtcatcacaactgcttgctgcctatcacccacatgacacaatgacttaagataaattggactgatgtcaacttgagctcttcatttatttcgaccattatatctttggagtggaagcattgtttttaagaaaaacaggtcggctggcgtggtggctcgcgcctgtggtcccggcgctttggggggccggggctggtggatcacggggttgggagttggagactagcctggccgatatggtgaaacaccgtctctactgaaaatggaaaagttggctgggcatggtggtgcatgcctgtggtcccggctgctcgggaggctgaggcaggagaatcgcttgagccagggggtcggaggttgcggtgggccgagatcgcgccactgcactctggcctggtgacagagtaagactctgtcaaaaaaaaaaaacaaaaaacttgtcaagtaggttgtctaaaaataaaatgcacttaaactcatttgaaagaatcctttttagtttaatatatgtttatgctaaatccatcctaaaaaaggttataaagttggaatcttaaattgtaaaattaaccattgagtgtcaaagttctaaaagcagaactcattttgtgcaatgaacataaggaaagactactgtataggtttttttttttttttctccttttaaatgaagaaaagctttgcttaagggttgcatacttttattggagtaaatctgaatgatcctactcctttggagtaaaactagtgcttaccagtttccaattgtatttagcttctggttggaatttgaaaaaaaaagaaaaaaagaaaaagaaaacctaaataaaataggtgaaagttccctgactattcaggtgaatacac

SEQ ID NO: 576 - DNA, 2784 bp, Homo sapiens
attaaatggagtggcctggttgaggaacaagcagaggcaggtgggagaggtccctgcctctcagttcacctccacacagatgcgctgagaggcactgggttggtcgacaacttctgcatttgcgaagagtgcagcgtccctcgctgtctcatgtatgagatttacgtggagacctgtgggcaaaacactgagaaccaagtcaacccggccacctttgggaagatggccttccttgctgacgaatactgcaactattgtcgagacattttacgaaatgtgaggaactgagaacttgagagggtggaggacttgcttacttccttctggaagtctctgcagcaagacacagtcatgctgatgtcattgcctgacgtgtgccagctctttaaatgctacgacgtccagctgtacaagggaattgaggatgttctccttcatgacttcttggaagatgtttctattcagtacctgaaatctgtgcagttatttagtaagaaatttaagctgtggctccttaatgctttggaaggtgttccagccctcttgcagatctccaaactcaaaggtaggtttcgatgaaaaaaataaattctgggctggcacagtggctcatgcctgtaatcccagcactttggaaggccgaggcaggaggatcgcttgaggccaggagtttgagaccagcccgggcaacatggtgagatcctgtctctacaaaaaagttttaaaaattagctgagtgtggtggcacacacctgtggtcttagctactcagaaggctgaggcgggaagatcacttgagcccaggaggtcaaggctacagtgagccatgatcatgtcactgcactccagcctgggtgatggagcaagaccctgtttttaaagtaaagaaatacataaataaataaattctgtaagcgtagatgaagcatctgactttcaccctgggtggtagctttcagctgctgccccatgcactcagctacagtccggaaggcccagcctgctcagggtttctggcttttagtgctggtgatggatttttgtgctgatccagccacacccttttaagctatttctcttttgaataataacatggacttttggcaggtcaaggtgttctaggtgtggatattcaccagggtattctcacacctgaattgcaccatctctctgctgagtttctagaatgctttccccttctgtctggctgccaggcagcagtctctgaatgctgcttccaccaggctatttatctgttcaaggcctgcagtggcttccaagcgcgagcctgaactgctctgtcagctggtccagttccctataaatctatcctctttgtgtccctgcagctccatgctccttcaaaggccagcctgcacctgccatgccctgtcggatcatcctggaaatacccattttctccctcttgcctttgtgaagttttgctatcattgcctgcagctctcgaactccctacggggtcccaccctccttgccaggtcagggtcattttgtcaccaagctggcaccagttatttccccacatttctatgagtcttgcttcctttgcaattatttcctaggtagtgcagataggggacttctcaaagtgcctacagcataggaccatgtctaatcgccactcctcccgaccccacgcccccagctgtgttcactactaacactgggtaccctgatccagtttgtcccacttggaaattttagggacgttgcagaaggtgagactgggacttgctgcaaaagcggtccgaggagtggggagcagagcctccctccagttttcctgtgctcctttaacatctgcccgaattcaagcctctgtctcttcattctgtaggctacttcagcggtttcctagttggtcatccttcttccacccccctccccagccacactccctccacccccagtgatcattctaaagcagcagttaatcaattaccaaccttccctggcctccactgcccagatggcccactctcctccactgctgtgcagtcattcacagtttggcctctggccccatccctgtctccatctcccaagggactcccatgaccctctgccacagagatagttttggctcctggcatctgtttcacttgttgcttttggaatatatgattcatatacttcagtcatgcctagaggaggaagaggaggaggaggacatggggactgtcaaggaaatgctaccagatgacccgactctcggccagccagaccaggcacttttccattctctgaattcctcactgtcgcaggcgtgtgccagccccagcatggagccactgggggtgatgcccacacacatgggccagggccgatatcccgtgggtgtgagcaacatggtcctcaggatcctgggcttcctggtggacactgccatgggcaataagctcatccaggtgctgttggaagatgaaaccactgaaagcgcagttaaactcagccttcctatgggacaagaagccctcataaccctaaaagatggacaacaatttgtgattcagatatcagatgtaccccaaaactctgaagatatttatttcagagaaaacaatgctaatgtgtgagattatttatttgaatagagaataagaaaactgatagacttgcattcttaaaaatattaaatactaaagtttttctattgacgaaagatgatgttatgtatataatagatgtagcattgtctattttatgtttatatgtatttcaaggaggtggtttcgataaaatatgtaaactgatttggagaat

SEQ ID NO: 577 - DNA, 1820 bp, Homo sapiens
ccggtgagccgcctgccagctcctgctccagctgctgagaggcctgaagagaccaagacagagacacagccccgcagcaccacagggaggccccagttaccccatgcggatgagtttcatggccatctctaactaaggacaggacatcgatgtcatctgtaacttcctgtgcactggggcacacagctgcatctccccatgctcacctcctgcctcttgctctgcccagtgtgaggactcagcctggatcacctcctccaggacaagaacaacctaccatcatctgtccgtccaatctacccacccatccatctctgcctctgggcatgcatccgtccgtccatccatccccgcctctgtgcatgcatctgtccatccatccccgcctctgtgcatgcatctgtccatccatccccgcctctgtgcatgcatctgtccatccatccatccctgcctctgtgcatgcatctgtccatccatccccgcctctgtgcatgcatctgtccatccatccccgcctctgtgcacgcgtctgtccgtccatccatccctgcctctgtgcatgcatctgtccattcatccctgcctctgtgcatgcatctgtccatccatccatccccgcctctgtgcatgcatctgtccatccatccctgcctctgtgcatgcatctgtccattcatccctgcctctgtgcatgcatctgtccatccatccatccctgcctctgtgcatgcatctgtccattcatccctgcctctgtgcatgcatctgtccatccatccatccccgcctctgtgcatgcatctgtccattcatccctgcctctgtgtatgcatctgtccatccatccatccccgcctctgtgcatgcatccgtccatccatccccgcctctgtgcatgcatctgtccgtccatccatccctgcctctgtgcatgcatctgtccgtccattcatccctgcctctgtgcatgcatctgtccattcatccatccctgactctgtgcatgcatctgtccatccatccatccttgcctctatgcttgcatttgtccgtccatccatccctgcctctgtgcatgcatccatacctgcctctgtgcatgcatctgtcagtctatcaatccccgatcccttctttgtaatggtgttgagcgctcacaactccctcatcctaagacgctcgttggatccattccctcccctcaccccatgctgctctctgccctcccttcccggtcaagttctccagccagtggtctcaactcaatcttcacttcccccgctcctctcacacctatccccactgcattctaaattcttccccaacgcgctgggcctacaggcactaaaaaggtcactttgtccctggatgaccaaacacaggccaatgtaacttactgggcttgttttgccccagccacagctgaccacttcctccttcactcttgttgttgatcacctttgggcttagtctttctccatctctgctgagtccttctcccctgccacctactccttcatgctggggttctctgtagctctgtacctgacagtcacgttccaccctttcctcccagaagctcgccaacccccgtggactgctggctctcaaggcggccgctagcccagctccgacagcagctgacaatgcacagtatgcggcccagggcaggccctgtgctgagaggcatgggtgaatggctcatttcatcggcaagcccacgccaccagcaggcgccgttctcctcgcatttctcaggcgaggaacctgagacaatgaggttaaggaagttgtttattacaagtggaagaaccctg

SEQ ID NO: 578 - DNA, 2562 bp, Homo sapiens
agaagaccagatactattctgaagaactacacagagggagacaacaatgtcatcactaaaagtaccacacacacggcctgtgtccttgtctactggttcttgtgtgataatcacagggacaccgatcatccctttcgtcatggacccacagctgcaggtggatttccataccgagatgaaggaagactcagacatcgccttccatttccgagtgtactttggtcattgggtggtcatgaacagccgcgtgaatggggcttggcagtatgaggtgacatgccacaatatgccctttcaggatggtaaaccatttaacctgtgcatctccgtgctggccgatgagtaccagccgttcagaataatatcctacgttttgcaacacctgttttgttcctcctctctgaaaacatttgaatttccttctttgccaccaccattacatctctgggcaactccaaagagaaactgggccatcagcagtcatagtgaatgggagttatagttcatggaactgaaatgtatgcattcaatgaacactgtccagcactaaccccatggcaggccctgtgcaagacgcaaggattgaagttcatgagagacagtcccaggccatagggatcttccaggtgagaggagaggctgagcaaacaggttctgtgatacacagggtggtaaaacctccttggaggaatgagaggaagcattggaaataaatgagcaactgtctgaagtaggcacaagggtaatctgcagagagaagtgtgtctactgggttctgatgtataattaggggatttctggttggatgctgtaggcactagggctgagtgagatgatgctgaaaacttgtttgatggcatattgtatttctgatgcatttttttcttttgtaggtaatggtaaatggccagaatgcttacagctttccccactgactcccaccatcttatgtgaagatggtgcaagtgtggagagatgtctccctgacctcagtgtctgtctgtaattgatgaaatgatcacattcctcatggttaaagaatccctgtttctgtgcgaccatggcatttccagagcctgctaacagaacgatcactcctcaccccttcctctacacttggtcattaaaacttcaccaaattttccagaatctggttcttactttcatggagaaaaagacaaagtggcacaaggacacaagtgacacaaggccactgtgatgtctgagattacataacgaagacatccttttatgtcagcccgtactttacgtcagacactctgaaccaaaattcctccttcattgtagatgactcactccagtgaaatgttgggtagctgtttacaacctcacaggcataattgattttggggagaagctttgtaatttgaggaaagtcatatgaaatgtcttcattcttgcactcattctaaggatgtttcctgtgtcttaatactgtgtctggcgttgtgcaggaagcactgaaaaagccgaggaaatgctgaccaagtttgcacctgaaattttgttttgttgttgttctttgagacaagttcttgctctgtcattcaggctggactgcagtggcaccattaaggctcactgcagcctcgacaccctgggctcaaaaattcctcctgcctcagccccccaagtaggtgagaccacaggtgagcaccaccatggccagctaatttctgcatgttttttttgtagagatggggttttgccatgttgcccaggctggtgtcgaactcctgaagtcaagcaatccagcaacctcggcccaccaaattgctggcattacaagtgtgagcccctgtgcttggcctatacctgaaaatttcaatccaagccatagttagagaaccacaagagttcaataatttccctcaaaaaatccctttgtcatgttcaaaagaactgccagatttttctattttatgtgggcagaatcctggatctcctctttggaaataaatggtcatagttttagatcggaaaatatgtcatttattggtggaatgaacacaattcattcacatggacacggtgagccaaccctgctttgctgctgctaccgttggcattgcagaaccggaaacctccccaacacatattcacataaagcaaccatttattctgatgtctccctgctttgcaggtttactggactcatgcgggtggtagacacgcatgtgtgtgggagtcacgttttctgaaggacctacaggctgggatcccagaggattcttcacttatgtttgactcaacactaagggactttcaagaaaccaaagaagaagctgccaggcatcatagaacttagctttgaaaattggagagtgtcacttttctatgacattatattgattaaggactggttctcggcaacaatcggcttcaccctccactcttcccttcttggagtttctaccaagatggcagaatgacagtccttttccctctacaagagctgagatcacctgcttcatagcaaacctggagaaccacttagcagaaacaacatgttacctacaaactaatgaaggcagattgagt

SEQ ID NO: 579 - DNA, 2083 bp, Homo sapiens
ctgactttctgaagcctacttctgtcagcttgtcaaagtcatttccatccatctttgttctgttgctggggaggagctgcaatcctttggaggaaaagaggtgctctggtttttagaattttcagcttttctgctctggtgtctccccatctttgtggttttatctatctttggtctttgatgctggtgacctacagatggggttttggtgtggatgtcattttatttgttgatgttgctattcctttctgtttgtagctttccttctaacagtcaggtccctcagctgcaggtctgtgggagtttgctggaggtccactccagaccctgtttgcctgggtatcaccagcagaggctgcagaacagcaaatattgcagaacagcaaatattgctgcctgatccttcctctggaagcatcgtcccagaggggcacccgcctgtatgaggtgtcagtcggccctttctgggaggtgtctcccagttaggctacatggaggtcagggtcccacttgaggaggcaggctgttctcagagctcaaacaccatgctgggagaaccactgctgagagctgtcagacagggatgtttaagtctgcagaagtttctgctgccttttgttcagctatgccctgcccccagaggtagggtctatagaggcagcagcccttgcagagctgtggtgggctctgcccagttcgagcttcaccggcactttgtttacctactcaagcctcagcaatggcagacacccctccccctgccaggctgctgcctcacaggtcaatctcagactgctgagccagcagtgagcaaggctccgtgggcgtgggacctgctgagccaggcacaggatataatctcctggtgtgccatttgctaagaccattggagaagtgcagtatttgggcaggagtgtcccgattttccaggtacagtctgtcatggcttcccttggctaggaatggaaaatcctctgaccccttacgcttcccgggtaaagcgatgccccgccctgcttcagctcaccctacgtgggctgcacccactgtccaaccagtcccagtgagatgaaccaggtacctcagttggaaatgcagaaatcaccgtcttctgcgtcgatcacactgggagctgcagaccggagctgttcctatttggccatcttgggacggaatcttacttgttttatttatgtatatatttttctgaaccattttgaaagtaattggtagccatcatgagaccttaactgaatctctttgaaaaataaaggacattctcccatataaccacagcaccatcatcacaatcattggcaaatctttatgtttctttccagtcttttacacacatcaacacatacacaatcatatattccaacttgtaaatgattagttaacttagtaagttcaacttaagagttgaaattacagtactcacttattaactgacatgtttgatcttctcatttctactgccgccactccacctccctctagtgtattctgcccacagcagctaaagtaatctttttaaaacataaatcaagtcttatcactctcctgcctaaatcattccaggtttcctgttctgcaccatggcctgacccagcccctggcctcccttgctgatctcatctcctgccaattcccctgagtcacacaatgtattttcagtcccttgaacaccttcagctctttttaccatggtgccttgtgcttgaaattctcttggcttttttccatccctcagacttggtaaaacatctcttactcaaagaggccttcagcaactgcactatctaaacaggtcccaagttaagttctgcccttgcccctatttgtatctttcatgacgcttgccagtttgtgcttactcatggatatcaccctccagctcaggcctggtaaataataagttgagtctatacattggttagctttgccttcctttagcaggaaataaaaaatgggctgggcatggtggctcatgcccgttatcccagcacgttgggaggctaaggtgggaggatcacttggagttccagaccagcctggtcaacacagtgagaccctgtctctt

SEQ ID NO: 580 - DNA, 1971 bp, Homo sapiens
gagattatgatcaggtggcacagaaacctgggatggtgaaaaaaccaggttgcccctgcagattcggtgtctgaagtagaacatatgccaggggtcttgtaggcacgtgtgtgggtttttggtgggaaagtctatgaggaaaggtagcatgggcaacaatcttgatgccgaagccctgtgctgggaggggcttgaccacgtcaacatgcggtgcatatgttcagtgggtgaaaaacatgtggtggcctcaggttggcaggagggtagaaggcatctgttctcagaacttcttccctcagagtcgtcggtccttcttaccatgggaggatgcctggaaccacagggcagtgcatggtgtagcagcctgtgtgcagagcagagcctaccttccccgagacacctggagtctctctccagcagaggcccccacattgtctttctttttacaatgtttttgatcctaagtgtggaaagttccctgaaaacccactgattctccaacacccatttgttgccccaaaatttaattctgacacaacttagagttcgcacagaccccacaaattcagggctcagtcccacatcacctctctcactgtagaggagagttacacatccctgaagcccatctacacttctgagctacctcctataaatctgagactagcataaaccccttttcaagttaaataatttgatagaattactaaaaagataacctcaacaaataactgtaattatatttactactttattataaaaatataactcggaaacagccaaatggaagagatgtctagggcaaggaacagttgtgggtgaaggtaatcctggaaatagctatatttaaagaaattcccccattctttgcattctcaaagaacagcttagtgaagagaaacgtgcttcccctgatgactttgaggatgctccctgctgtttttttaacctatcacaaaaatggacacagattgcaaattcccatttttaaaaatgaacaaccattcagtaatttagtcttcagtggtcaaaataacatactctttacagaaactttgtttgtttctcttcttccaaccagcccctgaactttgactcacccacagcttcagcaaacctacaacccttatttatacataaccctcctaagaacaggctgagttcaaggtgaaacattatcttatctgggatctcattttgctaccctccatcgtgtgcttcctttccaaccttctttgtaaacttgttttctcctccctatgaaataaggcccttttccacctaaccttagagatactcaaagatctaatcatttgtactttttctttgttgcaatacttcttaggtaacttcttagaccaagtctagaaacaatctgaggacaataacaattccattctaaaaagaatctcccaacatttcttctgtctcaacctcaactgcatctgcctgtgaacttccagcttaccaaggctctatatcttctggcagtgacaaaggctccttccatggttggtgtgagtaggcttggacacctgcagggtagacacccaggaataatcaactgggccttcagtggtcctcttttgcagggtcaaggtgggccttagcttttagtcaatggtctaagacttctacttaccagttagtcattcagttagttttcaattcaaaaaatacttcatgtttgaagaatccagcaaaaattattcaaatctaaggtataaaagagaggaaattacagccgggcatggtgactcatgcctgtaatccctgcattttgggaggcttaggtgatccacctgcttcggcttcccaaattgctgggattacaggcataagccaatatactcagcctgagaattcatatttgtaacaaagtacaaatccatagggcacatgagaactacaatgtctatctacagtaaatacagtttgatgaataaaatggaaggcaattgacctaaggtg

SEQ ID NO: 581 - DNA, 2466 bp, Homo sapiens
gttgtgtgtatttattgtaaatggcattggagacttatgggacagattcaggtcccctgtccccccaatttgaaaaaaaaaaaaaaaaaacaaccaaaacaccatgttgaccaggctgatgtcgaacttctgacctcgggtgatccgcctgccttggcctcccaaagtgctgggattacaggcatgagccaccgcatcatttaaatgtactgaaagtccaggcatggtggttcagagctataaccctagtactttgagaggatgaggcaggcagatcacctgaggtcaggagttcaagaccagcctggccaacatggcaaaatcttgtctctacaaaaaaaaaaaaaaaaaaaaaattagccctgcgtggcggcgcacggctctagtcccagttacttgggaggttggggcatgagaatcctttgaaccccggaggcagaggctgcatgcagtgagttgagatggcaccactgcactccagcctgggcgacagagcaagaccctgtctctaaataagtaaatgttgccggtaatcctagcactttgggaggctgaggcgggtggatcacctgaagtcaggagttcgagaccagcctgactactatggtgaaaccccgtctctactaaaaatacaaaaattagctgggcattatggcatgtgtctgtagtcccagctactcaggaggctgagacaggagaatcgcttgaacccaggacgtggagggtgcagtgagccgagattgagccactgcacttcagcctgggtgacagagtgagactccatctcaaaaaaaattaaataaaataaaaaataaaaataacagctccctaacagctccggaaagataaacagaaaacagaaaatgacatgctcagcccttgaggccaaaatgcccttccccagagcagctgccagaagacagggagcaggatcgggttggaggtcacttctgggtgagggggagaatggtcagacccgtggcaggggtgttggagcctggtcggcctcactggaacagaagagagctgcttcatgatgctcaactgacaggcagagcctcgcatgacccaagttctcatggttcagagaggccagccagtgcggggacaaagacaggcacgcactgaaatggtttcctggaagacggcccggttgcatctctcaaacgggaccagattggaagggagaccagctgctttgggcaaccgaggctgcttctgggtgaactcccaaactagatggtgccgagagccctggacctggcagctgggctggacatcacatggctctgtattccaggaaacggcatctcagtgcttgtctggccagttctccaaaagaaccatccacgggccatttttccattcccttcctatgcacagactgggctgggcctgatcagaaaactctcccttagggttttcagtcactggcgaaacttgagcccggcactgaggataggatgttaaaatgtgactctgggccaggcggcggctcatgcttgtcaacccagtgcttttgggaggctgagctgggagggtcacttgaggtcagcagttcaagaccaacctgaggaaaatagatctctacaaaaaaataaaaataaaaattagccagctctggtgacatgcacctgtagtcccagctacttgaaaggctgaggtggcttgagcccatgagttcaaagctacagctatgatggtgtcactgcactccagcatgaaaaacagagtgagaccatgtcttgaaaaaaggaacaaactaggcatagaagaaacatacccgaaaatggccaggcccagtggctcatgcgtgtaatcccagcactttgggaggctgaggtgagtggatcacctgaggtcaggagttcgagaccggcctggccaacatggtgaaaccccatctctaccaaaagtacaaaaattagccgggcgtggtggcgggcgcctcccagctactccggaggctgaggcaggagaatcacttgaacctgggaggcagagtttgctgtgagctgagattgcaccattgcactacagcctgggtgacaagagccagaatccatctcaaaaaaaaaaacctagaaataataaaagctgtatacgacaaagccatagctaacctactacagaatggggaaaagtgaaaagcgtttcctctgtaaacaggaacgagacgaggatgcccgttctcaccacttttattagacatcacacaaatatgcaagagaaaaaaataaaagccacccacactggaaaagaggacatcaaattatccttgtctgatgaagatgtgatcttggatttacaaacatgtaaagcctccaccagaaaactctagacttgataaataaattaatacagtcatttgcaggatacaaaatcaacatacaaaaatcagcagcattttatacaccaataatggtctaggaaagaaattaaggaggcaatcccatttacaatagc

SEQ ID NO: 582 - DNA, 2545 bp, Homo sapiens
gtgtgcgaggacccatggtacagcgacagtggcaggcaccttccctgggggagctgcgggtgcccctgaggaagctggtgccaaaccgagccaggagctttgacatctgtctggagaagcggaggctggtgagtggggctggagcacaggtgggactgcagaggccaggaacctgtgatggggggagctggaggggaggaacagggagggggatctgggcagcatctggccaggatgaccgggctctctgccctttcaggccaagaggcccaagagcctggacacagcctgtggcatgtccctctatgaggtgggtaggacaactgggctgagcagagatgagggggcaggcctggtggcaggggcgtaggggacttggaggaacctgaggccagctctcataggccctgtgagccctcattgtcacaggggacagccaggtgacaaagtgagggtgactcccttgccagggcagcccagaggagctgtggggcactgggacaagcagagtccctgggggcgcagctgggcagagacctgccttgaggcagaggctgaaactggcggcatttgtccacggcccgagatgggaggctgggcgaggtggaagagaggacagatgggtggggctccctggctggggtctggcctgaggggagtgtgggggccactcctggggcaggctgtcctagacaggcccttgtccggaggcagtgagggtgactggcaggggtttgacgccactagagaccaaagacctagttagaacccctgtggtcggtgggggaggcagctgggaggctgagagcggggccctctaccagctcctccccaaagtgccgggtgccccgccccctggtggagccacaagttgctgcagctgtcgattagctaagcccaagtggctgaagcccaccaaggtggcatggacaggccacttcacccagcgccagccccgtgtaccctccgccccagatcccaagcacaacagcgcccggagcatggtgggtgcccacagagcacttccgcattcctgagaaccgcctgtgagcaaggtggtggggctttccgcaaatggaaacctaccctgcgggtgagagcagtgcatcctccccgggcttcctccctgagcctgttcagaagcaccagggcccagagtgtgacaaacgacactcagcatctggtccccagggaaatagggggtgaagagggtggggttttgaagagatctgcttctccttgggaagtgaacatcctctcagagccgcttgcctacaggggtggctacacacactggatgggaggccacttagggagctactggcatgtcagccagttcgcttcccctccatgacagacgtatctgactggtcatgtggtcagcaagcctcgcctttggtcaggccctggagggtacagctgacccatagggccacttccatggcactgggcaagtggctgtattggaaatgaagtcgttgcccccgatttctttggggccaggttgagctttcctgcccagagcacggaggctaaagggggtgggctttggactgggttggggctgacctcagcctacacctgcaggaggaggtggagacagaggtggcctgggaggaatgtgggcacgtcctactgtcactgtgctacagctctcagcagggtggcttgctggtaggtgtgctgcgctgcgcccacctggcccccatggatgccaatggttactcggaccccttcgtgcgcctgtgagtgaactggggtaggcaggcgggaggtgaggataaggcggtgactcctcacctctccagggccacacctaacccgccaatcttccccgatcagtttcctgcatccaaatgcagggaagaaatctaaattcaaaaccagtgttcacaggaccctgaaccccgagttcaatgaggtgagccagggccaggcaggtcccagccaaccctggccttgacatgctgagccactaccctaccgtggcctgcttcttaagctgtgggagagccgaggctgcctccttcccgcctctctgcccttctccctgcaggaattcttttactcgggcccacgggaggagctggcccagaagacgctgctggtgtctgtgtgggactatgacctaggcacggctgatgacttcattggtgagtgggaacatgaggagctggggtgggggcccagtaggctcctggcggttcctgacccatcccccatggcaggcggggtgcagctgggcagccatgccagtggggagcgcctgcggcactggcttgagtgcctgggccacagtgaccaccgcctggagctgtggcacccgctggacagcaagcctgtccagctcagcgactagcccatgggccctgcctgccgcccctccactacagctgcctgaaacgtccccacaaaaatgatggcggctggggctgccttaccctcatgcccagccccaagtcagagaggtgtttcctctctccccgctttcacattcaccccaccccaaatcatggagccgaaataaacatctccttcaagccag

SEQ ID NO: 583 - DNA, 1510 bp, Homo sapiens
cagtgccaggggctgcctcgcccggaaccccaggaggcctgcagcctggagccctgcccacctaggtggaaagtcatgtcccttggcccatgttcggccagctgtggccttggcactgctagacgctcggtggcctgtgtgcagctcgaccaaggccaggacgtggaggtggacgaggcggcctgtgcggcgctggtgcggcccgaggccagtgtcccctgtctcattgccgactgcacctaccgctggcatgttggcacctggatggagtgctctgtttcctgtggggatggcatccagcgccggcgtgacacctgcctcggaccccaggcccaggcgcctgtgccagctgatttctgccagcacttgcccaagccggtgactgtgcgtggctgctgggctgggccctgtgtgggacagggtacgcccagcctggtgccccacgaagaagccgctgctccaggacggaccacagccacccctgctggtgcctccctggagtggtcccaggcccggggcctgctcttctccccggctccccagcctcggcggctcctgcccgggccccaggaaaactcagtgcagtccagtgcctgtggcaggcagcaccttgagccaacaggaaccattgacatgcgaggcccggggcaggcagactgtgcagtggccattgggcggcccctcggggaggtggtgaccctccgcgtccttgagagttctctcaactgcagtgcgggggacatgttgctgctttggggccggctcacctggaggaagatgtgcaggaagctgttggacatgactttcagctccaagaccaacacgctggtggtgaggcagcgctgcgggcggccaggaggtggggtgctgctgcggtatgggagccagcttgctcctgaaaccttctacagagaatgtgacatgcagctctttgggccctggggtgaaatcgtgagcccctcgctgagtccagccacgagtaatgcagggggctgccggctcttcattaatgtggctccgcacgcacggattgccatccatgccctggccaccaacatgggcgctgggaccgagggagccaatgccagctacatcttgatccgggacacccacagcttgaggaccacagcgttccatgggcagcaggtgctctactgggagtcagagagcagccaggctgagatggagttcagcgagggcttcctgaaggctcaggccagcctgcggggccagtactggacactccaatcatgggtaccggagatgcaggaccctcagtcctggaagggaaaggaaggaacctgagggtcattgaacatttgttccgtgtctggccagccctggagggttgacccctggtctcagtgctttccaattcgaactttttccaatcttaggtatctactttagagtcttctccaatgtccaaaaggctagggggttggaggtggggactctggaaaagcagcccccatttcctcgggtaccaataaataaaacatgcaggctg

SEQ ID NO: 584 - DNA, 1840 bp, Homo sapiens
acgtggaccccagcgccaaccccgccgagcccgacggcgccgccgagccgcccgtggtcaagcggccgcgcaagaagatgaagtggatccccaccagcaacccgcttccgcagcccttcaaggagccgctggccatcatgcgcgtggagaacagcaaggcggagaagccgaagcccgcgcgcaggaagacggccacggacacgctgatcgcgccgctgctggaccgctccgcccaccactacaagggcggagggggcgacccgggccccggccccgcccctgcccccgccccgccgcccgcccctgacaagaagcacgcgcgccacttctccctggacgtgcacccctacatcctcggcaccaagaaggccaaggccgaggcggtgcccgccgccctgcccgcctcccggagccaggaggggggcttcctgtcccaggcggaggactgtgggctaggcctggccccggcgcccatcaaagatgctccgctccccgagaaggaaatcccgtaccccacagagccagcccgggcagggcttccctcggggggcccgttccacgtccgctcacctcccgccgcccctgctgtggcccctctgacaccagccagcctgggcaaggcggagcccctcaccatcctgagccaaacgccacacacccgctgctgcacatcaacacgctgtacgaggcccgggaggaggaggacgggggcccccgcctgccgcaggacgtgggggacctcatcgccatccctgccccacagcagatcctcatcgccaccttcgacgagccgagaacggtcgtgagtactgtggagttttgagggatggcaccgtccaggccgccgagagcccctctgcctgtgtcgtgtggcctggccagcctcccggtggacaccagccctgcgtggacgtggcctgtgcttcgcccgcactgcgcgcatccccaacctctgtccgcatgcctggggccttcgcccccacgtgctcgacaggggaactcgcccggacggcatcgccaggcactggctggggtggggaaaggtggcccagtggagccggtggccaggaaggctgaagcccgcctcccatgctcctgcatcaggtgcccagccgtgggtgggggccctgaggtgaagagtttatttttttagtccgtttcgtcctggccccgggctgtggcgagacagcccaactcccccagcccagctcccccagcccagagccagggaagaggaaggtggggccagtcccaccagtggggtggccacgcccatggggtcacatgctcaggggtcaccccctgcagggacctgatgccctcgggtgggagggaccgaggtccaccctcgggtcaaaggtcaacgtgcactttctccttgtcgcctgacagacattttattttactaagactgctgtaccgaacaagcatatttatcatcaggagacaggatgggtttaaagcaggatggtgtgtgtgtgaacgggcatgagcagaggtgagcgtgagcgagcgggtgtgtatgtacgagtgtgcacgtgtgtgcgtgtgcacagagggtgtggtgccagcttgagtgggagtgtgtgagtgtgagcaggcgggcgagtgcgtgagtgcacgccagcgcgtggcccatgtatgaggagtgaaggggcccaacgcaataaccacgtcccccacccgggccccccgccgcggctgaggccacatggcttcctgtgggagccccggccggcacccggctggtcccaccccaaatacctcagccatggagaccatgtcatgcagaattaacaaggtagcaccgagcatatcaataaatattattctgataatc

SEQ ID NO: 585 - DNA, 3744 bp, Homo sapiens
gtgtaaattcagtcctcagggaaccaaaggccgagtctctgccccatgtgtcagagccggctccagtgtctgtgtgtgatggggagttcccagcttgcattacccagtactcctggtcggccatttattaacacagaggaccagcactgtgctagaaattccttgttacatctgtttgtcttgggtaggcagcagcagggcctgggagctgcgctcctggctggaaacagttgcacttggatatcacttctcagggtgggattaaacacagacaaaagctgaggatttatgctgcagcacagggctcggcagccacagaggccactctgtgagcgtcaagagggccaggagcaggagagtctggcctggagatagggccgctccactaccacccagtggctcccaccctcctggactccagccaggagtgcacaatcctcgtcttaaataggattgagcaaaggatgggacaaccggcgtctgttgtataagcctagggggctggggactgggggcctcgactgtcatggccgctgcactaatttgtggagttaactaacattattattctaactctgggaggaaaggacatttcagccaccgggctcccatgtgttccaggaggctgctgaatgatgtttctctagcggcactgcttggtaccaccccgcctggccctccttctcggggagcagccagcctcttcgtttgaaggcatctgtcctagaggtgcactgcttctccttctgaatggtgtgattggaagtgatccccaagcactctgccactcttccgcttattttggcccaggcaaatccagccaacattcgagctgtgggtcccgtcagaaagaggctggctcactggccagcctgctcagggtctgccgtgtgcttcccaccgcagcagctaccacaggcgctgagaaatcgctccctggtctgtgtctgcagacgcagacccaggaggggccccgcctacttccaggcacaggctgctcgtccgcctggttttcctggagggaactgctgcgtagatttttcacgagcaagtccttacaggtggtttctgttttgagccaggttttcagctaggagcttttttgggagtctgtgcagatgaacaaaatcaacactggtcaaagtctagatatctacgaggaggggataaattatgataaatacatctgatggatactagctacatctttttattaagaaagtacttctgtgctaaatgaaagaaagcaggacacaaactgaatatacgttatgatcccaagtatgttacaaaacagaaagaaaaagatgggaagaaaaaacaccaaaatattaacattggttttcttgagaaaatgggaattccggtgatctcttttgatctctcctgtatttccttatattttctgcagtgaatgtgtattaacttttattattagaaaatgatttttaaaatttaagtcctagttcaaaaaataaacgtgtcagagaaagggggcagatggactcctccgacttacagggcagctccatggaacgccatccaggtccccagtgcttctgctggcagcactccactgataagcatgttgagagtgaggaagtttcttcccgcttctgtgccccctttctcccaatggtttcctcattgtcaggccacgtacatacctgctgaattgagttggaggcacgtgcattctgtatttttctaagagtagggccaggcttttcctgagcagtcgggcagcggcagaggggtgccctgtagggagcttacccaggacctgccaagcacacctccttggccacagtcacagcgcacgttctgaggcaccaggctgaaggcgcagtgcctgtcccagcagtgataagtatttgtggtttgtttttgaatcagactggggaagactttgagccctgctgagactcagagcatctcccttttatttgctttgctgttcgtgctaattatggaagagctctgtttttccaggaggaatggctcctggttggcccgttctcggccaccaaggtaacagggaaagttgggtgttcagtcatgactgtggactggacggaggtggcaccggtgggagaccaacagaggaagccctcctcccggctcccaattctggctttcgctagaagacaagagaaatgaggaaaacagctaccctaggaaatagccttccttgaaaatggtttcctttttctcaggtttgatgagtttggggatttgttgttgtcattttttaagtaaaaaaaaaatgccccaaacattagcgttcattatcctagtctgatttgggtccggctctacctgtaggagatgaatgtggtaggccagggggcccctgtggattctaatttatgttttcagttgtttgccattttgtatcttcattacggggctactttcctgcctccctaaagtcatctttcccagcatgctgtttctggactttatttagtaccgtggttacctcctgcaggctgtgtggccccatccttcaccaaaatgtcacctcaattaattcggcggccatgagacagatccatcagtggcccgccgactcccgtcagcaggcgcccatgagtgatgggcacctccacgcctcccgcggccccccccccccatgtggagtcagccgggcaggactcaccatccctctgggcacgagggcatctggctggcccgagtcctctcacaccttatgctgagggagacttcagcctcaggaggagaccccaggtgcattcactccacctagctggccttgttccccagccctgcactcagggatgcctcaggagagccaacgctctggcagggcagccaggtgccctttccctttgggccaggcccaggcagtggggacttaattgaatctgctcattcccaccccagctccacacagcacagcactgcaaatggagctggcagaagagctgacttctcatttctctttcctctcccttctctggtccataggtgtttgaggaactgtggaagagggaaggcaagactccagggcagattgtttcagaaaagcagcttgaactgatgcaggaccagggggcactggagcagctctgccactctgtgatggaggcccatcctcaagtggtgactatctcgggcaggggagagggccagagccagccccaggacatgcccaagagcctcgccatcgctccctgtggcagcccagaggctcttcctaagaatggctgacccagtttcatcaataattccctcactgtcatctttttagttaaggtaatggatgtgaagaacagaaaccccagagctataaataaactgattgggttggtccggaaagcgactcaaagccgagcagatccagtcatgataaaggagatcctggagaagaagctgtcattgtgagatgtttgggatccccttgcccaagggacaacaacaaacagtgcagcctgactgggaacaggatcctgtgaaagctgatgcccatgtgccctgagagctgcctctcaatccctgtcccaagccacagctatggcgttaatgtcaccagtgttctcaccctctaggccctgtgcctggaggtgcctccacagccgaccagcagccaccccgcctgcttcatccacatcaggagggtccggtgaggctgcagcagtggttaaggagtaacaccttcttgtattaaggaattttaaactaaataaaatgtatgttggagatactgttacccattctaag

SEQ ID NO: 586 - DNA, 1860 bp, Homo sapiens
aggctggtctcaaactcatgacctcaggtgatccaccctctttggcctcccaaagtgctaggatcacagacgcgagccaccatgcccggcctttatttttatttttgagacaaggtcttagttcttttgctgaggctggagtgcagtggcacaattatggctcactgcagcctcagccacctggggtcaagagggcctcccacctcaacctccccagtagcatgcaccacacctggctaatttttgtattttttgtagggacggagtttcaatgtgttgcacaggctggtgtcggactcccgggctcaagcaatccacccacttcagcttcccaacgtgctgggactacaggcatgagccactccacccagcatttctttaacagtgtgacaccccagcttctcctccttccccttccagggaagccagcgaggctcacatgccatcccaggctctctacccagactctccttgcaatgcgaggtcttgggcagcaaagcagagccccattccccgggccaccccaacttcctctaggacagagggtctgggggctcatattcaaccctctccctgctcccgaagccctggaaaagagcaggacacaggacagctctgactcagctccactgccagccagacgcttcctccttacccgccctgcccagcctgacctcgggggctcgcccgcaccctcctccttacccagctggctgagggtggccaccaggtccatttggtgtttcagatacagcttaggcagccggaccttggtgggcctctcccacaccagaggtgggtgcagggtgtcccaactcaggctggccagtacctgggacacgttccattcaaagtgggtgggtacaaggaccacaaagctcatgttgttcttaaaggggaaatgagccacctacagaaaagggaagggaagagcatgaggacagaaagccccgaagctaagtgggggtggggccagcaggtgctcctaaggcagacaatggggctcctggccatcctgccaggcgtgtgactgaccccactgctcctccacttcctcacagtggggtggagtcatactacctgtcccactgcaggcggacacgtaagcgaatgagatgcttttaaagtttctagcagtgtggccgggcatgggggctcacgcctgtaatcccagcactttgggattctgcagcaaaagcagtgtggacaccacagggctcgagggcctcctgcagctgtgactccttgggttccaggcagagtacccgtgtggagaacccctgcccgtgggaggataagccccgggttctggctgtttgggcctgtctgcagagggcctgaggacaagaaaggctgacggggcctaaggaaaggagacgaaggatgaaggaagagtacgcaggacacagcctggaggaaaggggaagcaggaaaggggagcctcggggaggtggatcagactggcctttcagaatgagctgcagggaagccaggacgcgttcccgggccagcctcacccacagccccctcccacgagggctgcccaagtggcttctggctcctccctgcagaagtggctgtgctctgtgtcacacctgccttgggaagctaacaaatacagccatctcagccacagctgtctggcccggggatcaatacccaggccaaggggaccacatttaggctagaagcaagagaggccacacctgagacagcctggcacggaattttatccaatcagagctgggcgcagtggctcctgcctataatcccagcactttgggaggccaaggcgggcggatcacttgaggtcaggagtttgagatcagcctggccaacatggtgaaacctgtctctact

SEQ ID NO: 587 - DNA, 2250 bp, Homo sapiens
atctgcctagcaggcggctctcccctgctcccccaccgagcacagaccgtgggaggggaccctgcgggaggaggctgcttcagtctccagagaccatctcccatctctacagcgactcccctatgaccgtcccccacccggtgctctcgggccacggggaagggacactcgggaaagacaccagagaccgggagggtgcagctgggctcttcgcggggagcgggcgggaggccttcctgttacatgtcgcagctgggacacagacggcagcgctccagggtccacttgccggcttcggttccctcaggcccaggaccaggctccacaccgctgtcgcgtcccttagccgtgtgggctgtagcacagagggggcaaacacctccaggggcttgtgccaagtaattaccaagcaaattcccggcgatttcctctcctccccccgcccccccgggcagtgcccgctgcgtgttccctgattcggcccccggctgtgcaatcagctccaggtaacctgcggggacccgtaattgctctggagttgcctgcgagtttgcaaggtaagcacgcgcggcgcttctccctggccctggggcgcgcggtggagcgccttgcgcccgcccccgatgggccggatgccggggacatgcggaagcagaggctgcgggggtagagatccaactccacggagtgagagagcagctttgcgctaatggggccgggtgcaggaagctggtgcagagaggaaagaaggaagggagtctgggcgacttgcgggaggagaggggccacctcgccatgtccccaaggaaggggaccttgggggacatgggatccttctgtcccttccctccagtgaagaggcgcttcattgatgagccttgtcatcatccttcaagtgtaatttttttaaattgcaaaaatcttacagagctattaacctcaaaagagtttaacatatggcagaccgagtctccctcttaccctaattataaggcttgcagtaatggggctgtcttttaagttacagctgctgcgcttttggctttcgctaacattacatcctattaaagagctacattaaatgcatgcaaattgccggagcgacggcgctctcccgaccagtgagggggacggattgcagccgaggcggcgatatcggggtcagactcaccctgctgcgagcgccatatgatctatcaatcaaactcctctcattaattaactaattcattaaatatctttatatatgaaggcccggccaggcagaacattgtgttgacagggacgtcccgtcagcacttagccctgctctccccacccctcccctcctgcacaaatctcccggtgactaagagaggtcagcttcccagtgttggcgggcacggaagcaacggctgtgtccactcctgggggcgccctccttgggcctccttccgcatgaaccccatctgtccggcttcctcctggcgcgcctgccctcactcacctattgctcgaatgagctgtgtgtgtatctgatacctccgctcgcctggcaacccttaggttgctcatcttgtgccccagggcccagcactggcagatgctttgaatgttgggctgaattggagtgcattcctctccagtacttccaagtcatcaaggccttcctctgcaatatgcttctggaagactggtcactctagggaggagaggaggtcagccatgtgttcaggcggcatcccgggagaggaggaggagggcttattggtggtcctagaaaaggtatgggggcaggcgggaggaacttttaaagttcagagctggccagtgatgtagccacaacacccagaatccgaagcaaacccttgtgccaaggagaatgaatctatgtcttctatgaacaacagagacacattttagaatggatgctagggttgagcatggtggctcctgcctgtaatcccagtactttcggaggctgaggctgggggatcacttgagcttgggagtttgacaccagctgggcaacatagggagacctcatctctacaaaacaaacaaacacacaaacaaacaaacaaataaataagcacggtgtggtgatgtgtgcctgtggttccaactacttgactgaggtcggaggatcacttgagcctgggaggttaaggctgcagtgagctgtgatcacaccactgcactccagtctgggcaacagagggagaccctgtctcaaaaaaataacaataaaataataaaaattaaaaaaat

SEQ ID NO: 588 - DNA, 2142 bp, Homo sapiens
tagcgtgaagaggattgtagaagcctgaacacactggagagggggaatgaggggttccgcctggggactcgaggaagtgtccctgaggaagctccacctgagcaccaggctaagggctctcgacatggagggggtggtaagagcaaaggttcacgtagaagagaccagcgctggagagggtagaggcagagggtctcagaacaaagaggcagtgtattcagaggctttccagagagccttccttattccatttcaggcctcttttacgggtgcatttaaagaggatgcgttaaattattgggtgtcaagtcagggtctgctgtactgcatgctccatttgtattatttccttgagaacctttcttttaaagcagttttacatctcatgtggcagcccctgagaaacatacactgtttatctttgggactacagaagaagaaacagggacccagtatctgcctggcccccatcctcttggtagtgccttctgagctagacagtgatgtggacagacgtgccgtgctcacccaggcttgggcatttagtcctcacacagcctgagaagtagggactgatagtatctccgtcttatagatgaggagattgagtcgcagagagattaagtaacccactcaaagtcacacagccagtaagtggtagagctaggcagtgtggttgtgcagaccttccatttggatagtaacaaagccgctccttattgttaactagcttttatggattgtctgccatagtccacacagatgtggagaaggtagagatactttcagcctggattgtatgcagctctcgaggtgtgggcacagatcgccagcttaggcaagccctgggaaccaccgtcgcccactgagcatggttgcaggctttggaggggttgggctttgctatagaacatctctgacagaagttcagttgttggtacattctaaaaattctgtacctactacggcaggatagtcatgcatcgaagtcgccttagtgcctgtgagaagccttctccgctgacttactgcacccccatctgagcatcacatgccctcctgccacatcttgtttagtgtgccctcttcattctaagggccattttgtgccataagcaggttccactcaagccattttggggaggaggaggcagaggctggtgagctcagcccactgagggcaggtttcatggtgtggacattgggtggggtggcacgaggaaggagggagaggctggggatacccaaccagtgtttttcttggctttaaaacttcttttaaagacgtgatgttgtgtattcatggtttttccagtcaccaaccattgatgggcatcaacaactttcatgctttttctttatttcttgtatgcagaataagtcaggacacatacagggccaactctgctttttcacacattcatcttacttaaaatgcttcctctgccaagcttttgtctagtccatgggcttttccaggcctcttcagctcatctgtgttcttcgtgggcttttccattttgttataagacatcttcatttaatagtatgaaatgacgtagaggcatgaggtagtaacagtgcatttaaatgacgtgagcataagacactgtcctataggaatagttgaaacacagccacacggtgcatgccgcatccttttacccagagccctgtgcagtgtgcaccatcggatcattagagcagctttctatttgggtacagagttttgggcaaaaatatctgcaggtggttacatcgagcagggctctctgcactcagtttatgtgcatccagtcttcgcatggggagcagtggactatgtcggggaggcttgctcagagcgcatttaagcaagcatgttactgacctggctacccttcacttgccagggctttgccttgggggtgtctgaggcagcccgttgtatgttacaagtctgctcttccattatgccctgaccctcagtccaagccctggagcaaaaaaggggttcagaagcacgtgagaggctggagatgagggacatgtgttacggtcctaaagacatagtgtagggagattcaagtgttttttttctgtcaagagccctggctttattctgccttcagatttctttgagaaaccccatcaattactggc

SEQ ID NO: 589 - DNA, 2336 bp, Homo sapiens
agtcgctatgcgtgtgcttgtgggtggcgggacaggcttcattgggacagccctaacccagctgctgaatgccagaggccacgaagtgacgttggtctcccgaaagcccgggcccggccggatcacgtgggtaagtccatcctctggaagcgggtgggagggcagagttgggcggcgcagggcggggcaggggcactgtgtgctttctccgacaggatgagctcgctgcgtcggggctgccgagctgcgatgccgccgtcaacctggccggagagaacatcctcaaccctctccgaaggtcagcccgggccctaaagctgatacccactagagcacagggaggacagtgccccactgatgagaacctgtgagctatgggtaatggagctcccagattccgaactaaaccgatatcccagactactcattctgctccactcctccacccccacctgctcctccacccagtcagccaattggcttaagtcctcacgtataactcaggatgcccaggaaatgaatgccctttccctctacaggagacgttgactgtttctcttaagccgaaattcagggctttacaagaaattggtatgaaatagctcccaggaaaagacagagagagggatatgtgcacttatgtatttagtggctttttatttcccatgtttctcctgcagatggaatgaaaccttccaaaaagaggtaatcggcagccgcctagagaccacccaattgctggctaaagccatcaccaaagccccacaaccccccaaggcctgggtcttagtcacaggtgtaggtacgccccccaaatcaccagccccttatattcgccaggggaacggggtaactcagacctctgtagctatgcacacaccagagcactggtcttttccaggcaaaatgacttcctaggcccttgatccatgcatgtttctcctaacctttgtgtactttcactaagaaattgagaccctgaaaaaacagtggggagtggcatcactcaatgccagggaaaagtccacctatcccaaagtcccttacttctcacaccatagttctttaggaacagagttcctggtcacctttgggaccaagtaattgcaaacaattatacacaccagccactatttgaagtgttttatgcttattatcatttattccttacaacaaccctatgaggtaggtactattattcccattttaaagatgtgaaaattctatacagagaggttaagtaacttgcatcaagtcagagagttaataaatgagggagctgattaaaattcaggcgcctggtacccaagttcctgttcttaaccactacactctagcagcctctaagtttagccctgcaaccagagttcctccagggaaggaacgcttcaggtcatggagaagttcaaggggaaaatatccaaatggctctgtctccaaatggggagatcctaagggccagagaagcttactaccagcccagtctgactgcggagtatgatgaagacagcccaggaggggactttgactttttctccaacctcgtaaccaaatgggaagctgcagccaggcttcctggagattctacacgccaggtggtggtgcgctcaggggttgtgctgggccgtgggggtggtgccatgggccacatgctgctgccctttcgcctgggcctgggggtccccatcggctcaggccaccaattcttcccctggatacacatcggggacctggcaggaatcctgacccatgcccttgaagcaaaccacgtgcacggggtcctgaatggagtggctccatcctccgccactaatgctgagtttgcccagaccttgggtgctgccctgggccgccgagccttcatccctctccccagcgctgtggtgcaagctgtctttgggcgacagcgtgccatcatgctgctggagggccagaaggtgatcccacagcgaacactggccactggctaccagtattccttcccagagctaggggctgccttaaaggaaattgtagcctaagtaggtcgtggcaagggcctgaggcctgttcctcacaggcttccaggttaggcactgtgaataggctcagctcctctagagagctgaagccatctggttcttagattcctctcccagtcctctttcccattgttctgttgctccaccttattgtctcaaggccgtaatctcatcaggttgggacattaatcttttcaactccttgtaagatttcccagtttggtttctctacatgtcctgcagctgccccacttctcctttacgctgtgtagagaatgctctgcagtttaggcaataaaaataaattgtctcact

SEQ ID NO: 590 - DNA, 2939 bp, Homo sapiens
tctttgccctgtggggcttctctccttgatgcttctttctttttttaaagacaacctgccattaccacatgactcaataaaccattgctcttcatctcaggctttggggttggctggggaaggaggcatcccggggctgggctttctcccaagaacatcagagctgagtagccgacaaactcactttggggccgtgggctggaagggaccatctgatgccccagagctctggcttggccttctccctctgcctttaattcacgttgaacgctgggtacctcactcatcccaagttcttcaacactgagcaaatgcaaggatagcacagtactgagccaaccatagactccccacaaggagttgctgttgttattaacaggaagccagagaatcagcagggtgggttagtgagggatccgggaatagctgtgactggagcctgcataaacagctctgaagggagagagaagactgggctctcttgtgtgccaggcacagtatggaaggcttcatataagttaagctgaaattagccctgttttacatacagcttcattttacatatgaggaaactgaggctttgaaaaaaatgagatgtcttgtccaagatgaaaagtagtagattcaaccaagtcctcttactctaagcccaacgcttttacccaaaaccccagagtcctcatcagggatgccaaatggttctagacccagtggaggttctggagctgccactggggatttaatttcttttgatttgctaaagatttgacctgactgaatggagaggtagagtgtagtgtggccaggacaaggtgagggaggctgtagagacttagcactttaggccaaccacctccaggaaatctgggaaatgcaatgtgacagctcgggctctgcactccagggggctgtctggtgtccacatggaccttctccatgtgggacacagctggaacaagggggcaggggcctgcagctgggatgcccaggtgaatatgggcagctggacaaacaacactgggattgagtcagatagaaggggcccaaggactccagggctgggaggacggaggctgggagagagggctcttacctccttaggcctcccaaagagcggttagggatgctgccatggatggcatggcagggggaaccctcctggaagaaaatccatctcttctgaagggatctgagatgcggctggtttttcaatggcagaacttccctctgcggcgcgactccgaatccatgacatctgagagtcttcctgaccacaaacctctgggatcccgagggctccctacccaagaatcactttgagcacagcatcccaaggagcccatagagcgatcccttgcattcacagccacagcccctctggggacactctgtacccccggtagaccctttccaactcacaaccaataaaggggcttgggctgtgctttgactaaggtgaccatggtttaaaactcgcctttctttcccggaggtgagctgggcttgccaggagcctctgctcagagcgggtgtttgttgactgtgggatgtgttccccatgtaacaggccttggctagtacccatccaatattctgcccatggtcaaaccatgggtccccttttcgggctcagaaaataaggccatttatgtatcgggcgaaagaaagacaattcgacgtgccccggcatttggggtggtgttgggaggagtcaggctggcacatggggggacgcaatgaagaaaggtgggatggcaaggacagggaggacacgcagggggctttgagggttggccgaggggccactttcacctggggtagggagggcggcttctgtgagtggtcgcaggtgaaggggggttgctttatggtgcaggggagccaggggttctctgggggtggtatgtgtgtttgtaggagaattggggatgaggatgggcccaaaacattgctgaggcattgagagcactgagggcctatcccttccccctggaataatccctttcactgctcatgtagagagaccacctgagcttcccaggcagtttactcttaacttctccctggtccattaccctcactcctcttcatcctcaggttctagcacaggccaggccagcccagggtgctaggagcttgcaggaaattcatgtggaccaaccaactctggcaggtcagtgggtttcttgctgggaaagggggcagctggaaccctgcctggggcccaccagatgaacagaattgctgtgaccccgtaacctctaccacaaagttccaggactagagacagcggaactgggagtcctcacctacaaagccagcccccaggctagttccaacccctccccttgtcacatcatctcttacttctccaatatccttgccatgagttgtgagactaagaaacatgtatcttctgccctctgtgtgccaaacacacactcaaaaacacacactcaaccctggtgacaacttcaggcaagaggagttagtgaaacctactggaagtggaagcaggagcctccaaatagaaacagaaagacagacaggttgaggctgttgctaagatctcccctctcccacctgccctcaccatcctcccacttccaccacccaaaatacacacacctttcccatccataccaacatgaggcttcctggccaggcactgtggctcacgcctgtaatcctagcactttgggaggctgaggcgggtggatcatgaggtcaggagtttgagaccagcctggccaacatggtgaaaccccgtctctactaaaaacacaaaaattagccaggcatgttggcgcatgcctgtaatcccagctactcaagaggctgaggcaggagaatcacttgaaccctggagacggaggttgcagtgagctgagatcgcaccactgcactctagcctgggtgacagagcaaaactctatctc

SEQ ID NO: 591 - DNA, 1797 bp, Homo sapiens
gtatttaaaactagttaagatcttctgatttacctgagcgggtggggaaacccaccccatgagcatcccctgggctcacccagtgcacagagggaggcctcccgtggctgggcccctctcagtcagcccatgtggctgccatgacctggagcaccacagccgggggcgcccaccagctcaacaccaccacattcacgtggcagcacctccctgcctggcaaccgctgctgttggccagcattaggctgcagctcttcttctacgtgggcctggccttcatcagcctggacctctattactcctccaccagcatcaaggagctggagtacaactacaccggcgacccgggcaccagcaactgctcggtgtgtgctgtggctggccagggctgtgtgccactgcccatctgctcatgcgcctggtacttctcactgcctgagctcttccagggccctgtgtacccctactacgtgctgaccaacttctaccaaaacaaccggcgatatggagtgtccgcgacaacgcgcagctgagcgggctgcccagcacgctgcaccatccagtcaatgagtgcacccactgcgccgcctgcccatcgtgcaccctgcaatgtcatcaccaacagcctcttcaacgactcctcgctgtggcaccagtgctggcccggcgagccctacgtggaggtgccgcgctaccgcactgcgcctgcatcacccggtagaccaactaccccatcaagttctgcaacccaccactggtcaacggcagcctggcactggccttccatggcacagcacccctgcccaactggcgctggctggtctacgacaagctcagccccatccccaacaacaacggcttcatcaaccaggacttcgtggtgtggatgcgcatggcagcgctgcccacgttccgcaagctgttccgcaagctgtacgggcacatccgccagggcaactactcagctgggctgccgcggtgtgtctactgtgtcaacatcacctacaactacctggtaagaagcgcaattccacactctacataaccatgttactcattgttccagtcatcgtcgcaggtgcaatcatagtactcctgctttacctaaaaaggctcaagattattatattccctccaattcctgatcctggcaagatttttaaagaaatgtttggagaccagaatgatgatactctgcactggaagaagtacgacatctatgagaagcaaaccaaggaggaaaccgactctgtagtgctgatagaaaacctgaagaaagcctctcagtgatggagataatttatttttaccttcactgtgaccttgagaagattcttcccattctccatttgttatctgggaacttattaaatggaaactgaaactactgcaccatttaaaaacaggcagctcataagagccacaggtctttatgttgagtcgcgcaccgaaaaactaaaaataatgggcgctttggagaagagtgtggagtcattctcattgaattataaaagccagcaggcttcaaactaggggacaaagcaaaaagtgatgatagtggtggagttaatcttatcaagagttgtgacaacttcctgagggatctatacttgctttgtgttctttgtgtcaacatgaacaaattttatttgtaggggaactcatttggggtgcaaatgctaatgtcaaacttgagtcacaaagaacatgtagaaaacaaaatggataaaatctgatatgtattgtttgggatcctattgaaccatgtttgtggctattaaaactcttttaacagtc

SEQ ID NO: 592 - DNA, 2428 bp, Homo sapiens
agctgacggctggatgacccctctgaacggtcccggctgtggatgcccatagagaaacggggatttcagctttggggctctgattcttcccagatgagaggacgcatcggggctgccgctcgctctacgaggccagcatgggggctctggatgggtcacttgttcttgcccaaggggtgaatgatgacacagactccatgccccaccccctcagctgcccagccagtctgaccaagacggagtggcccttccacttctattctccgcgggtctccgaggatgtgggatgcgggagagggaggaggggcaggaggaagaccaggaacggaggacgggagctctgtgcgagagacacgggttcagaaacccagcagcacagcagcaagcgccctcccgccccccgaccagtgactcccacggcaggtgcaatccacaaaaccacaggccacccaaggtgtacccgcctctcccaggagcctttctgccagagaccccaagccgggtgccctccacactgggccgcaagggtaggtggggccgctgtggcactggtacccagtgggtgcctgtcaaacaggtgtcaaccgactaattgcagcccagctggtcccagagaccagccagacacccttcctactgaggatgaggtcctacactgcgagggcccccactgtccggctgtcccggacacagccccactaagcatgcgggaggcaccccacttggcaccccgcagcccggcccataccagccagcagcctggccctggctggctgccctccagcaagccatgactgtcggcccggcttggaggacgtctggtcaccttgcatttgcagtctgaggaagctgtgtcattccgctacatccagaggtgactcaggcagctgcagcagcagagagcagactgcagaacacaccacaccccctccagtccccgccctggctcccaccacaccatcctcctgtcctcggcctccagctccccatcagcatcctgttctcccccggccgccctggggcttcaatccgctcccagcctctaagtccagtcaggggcattccggggggcccagatgccccccagcccccaaccgcatcattcaccggagttgcccctgcccctctctcttttcctcatccacgcgccaaccaggcttgatcccagccctcaagcatcacccgcctgaacccacagcacctgcccaggctccggcctccagcgtctcctgtctggaccacagctttgccaaatgggatgccctcaccctgatcctggtgccccccacacagccccacaggcagtcaaaagtcttgggggttcctcccaaaccccgactcccccaccccaatgccgtttcaggtttctgatcaccatctgcagagagcacgtggttccctgccctgcttcttccagaaacactccccactgctctcctcctcgcgtaggcaagcaccctctaccaaggcctggttctagatccttctggggacagggggcctccccaaggcatggtgagctccttgcaagcagggagaaggtcttccctacaccccacactagcccccgctgtacgagatgagccggccccgcatgggagggcagggagagggcagtctccaccccaataccttccccaggacacccgacgcacagtgcggagaagcaggaaggctctacaccagaccccaccggcctgtgggacaggccagcagacctcatggcctgggcttcctcatctacagcagctggtcggggggtggggcatgtggccactcaagttcgcttgtacctgctctaaaactctatgattttaagacgacactcccagtttcctgaaactgtaggaaagcggaaacatgacgagtctgtgacttataaaaagcaaaaataaatagcggggaaaggcatcttccattcgcggagagcagggagggtggggacggagcggtgagtcactgtttactgttgaaaggcggccacacggagccctctctcagctggccagatttccatttcccgtgtggactggacccgaaacccagaaagtccactccagaaacctttagactcagaaacagctgggacaagaacaggcacaacttcttctccgtctgggtggcaaacagctttgccagagactgtaaacaaacgcagccatcgctgagccccgtgggtgaaagcacacgccttgtagacagcgaagtggcccggaagacggtctcccttaacagcagcctcccgggtgcacacaaaggctggcgccccgacaaccctgaccctcggtaaacgctggctcccgggtttaccagcacctggggagtcgacgctgcgggcaaccagcccctcaaagccctggctcggttcaaggataaaaggcaggagaagcctggtttttctgctttaataaatgtcttattttggaat

SEQ ID NO: 593 - DNA, 2617 bp, Homo sapiens
ttttttcctcttggctttctatcaagtatgagacagagctctgcaaagaattatataagcctctgggaagcagccgaaggctcgtaaattttctgggcaatgagactgcttcatcctgaatcacgttgctgtgggaggagggcaccctgagtgaccctgaggtataaaccccaagtgctcttgagtggagtctgcctctgtcctctcctgatcagcacccttggcctctttgtgggggttacataggagctcgtgctgatccctgaggggctgacccgagaggggtcaggatgctgaaactgtcttcttagtggcttcttcactgcataccacagggccaggcacattgtgaatgtttggcaaatatttgtggaaggaatgaattgtgggctgaccgtgtgctctcggcctctatcagcatttcattctgtcacagccattttcccctgcaagattggtggaggggaaagggtaggcctcctgggagaggttctggatctttctgccatctgctttgttccatgggtcagccctgaaattagggcatttggatgggtttgcagcctcaaagtggagaatggattctgcctgcgaggatgtgtaagcatcacttcatcgatggtttgctgttactcaacttccagattaccttttgagcacccttttaggaaagagaggaaagttaataaattacattttacccactgtgtgtctgggacttcttgcacatgaactcattcaaacctggaaacagtcttctgaggcatcattaccctcattgtttagaaatataatgaggcccagagagttccacccatgtgtccaaggccacaaaagctaatccatgatggagctggaattggacccagggctctctgacccatatgtgtcctagacagacagaaagaatgagtccccattaggtagtgacttgttgatacccatatgtggagaaccgagacctcaaaccagaagtcctagagctctcagaggaaacacacccgctcagaggaaacccaccttcctcagaggaaacccactcccctcagaagaaacccacccccgcagaggaaacccaccccctcagaggaaacccacccccctcagaggaaactgactctctgcagaggaaacccaccccccgcagaggaaacccacccaccgcagaggaaacccaccaccagcagaggaaatccacccccagcaggagctgcagagtttcttgggtgggctattggccgcttttaagtttttctcatctgtatctcttctgagggaggcatcctcatggtgagaacagaatgatgacttctgcattggttaagggtttatacagagaggaggttggtgttggagccacgttggactatttctgcccgtttgctggtcagcactcatttctatacttaatctacaaatagctttgtggaagtcagagcaagatagagggatagaggttcgaagccttggtgctgcctggggtaggtggggtctatggttcaaggctctgatcttcatttttgcaggcggagaaactccatctatccatccatcaaagatttattgagtttcttcatgaccaggccctgctcacggtgttagggattcagcagaaagaaacacaaacaaaacttcctacgcacacagagagtgtttccttgttgacgccctcaataatgtgtgtgcctcagaggttatcaggcacctgggagactgactcacgttaacttcctagaagctgacatactcacctgatgctacatggttccttgactgggtgtgaatcgacctctacactggttggaattcttgtgcctggaatcctcggggcctgagaggctgagttcatttgactgctgacatcagatcccagggatgtgggtggttccagatgcattcccttttgccctggagaaggccctgcacctgaatgcatcttggaggggagattatatttgaattgataaaatttggtgactgcttagctcagtgttagaagtttttaaaatttgtggtaaaatatacttaacatctttaccttgttaaccattttaagtgtacagtttagtggcatcaaatatattcacaatgttgtataaccattactatcatctacactcagaactctttcatcatccccaacataaacccattacacaataactcccgattcctccctcctatcaacctctgacaaccacctttctttctgtctctaccaatttgcctattctaagtgcctcacttgagtggaatcatacaatatttctctttctgtgtctgtcttattttacttagcataatgttttcaaggtctatttgtattttagcatttatcaaaatttcaagctgggcgcggtggctcacgcctgtaatcccagcactttgggaggctgaagcaggcggataacctgaggtcaggagttcaagatcagcctggccaacatggtgaaaccctgtctctactaaaaacacaaaaattagccaggtgtggtggtacgcgtctgtaatctcagctgaggcagggaaatcgcttgaacccgggggacggaggttgcagtgagctgagaacatgccaatgcactccagcctggatgacagagcaagactccatctc

SEQ ID NO: 594 - DNA, 2540 bp, Homo sapiens
agacctcgcaaatctcggcgactgggacgagccctgcgttcctgtcaaacaaatgtcggtgggagtctggctgagtgttcaggacgtttgcgaaaagaagcctcgcgcctgtggggaagcagcctttacgcatgactgggactggagtagcgtggagttttaagatgctgaaagcctcttctccgagaaaactcccctaagaaactctctgaatctccctatctctcagtttattccccttccatgtccctttgggtgccatctggtctccatgagaacttaacagatgcaacaacagagggcacaggatttcggagatcgtggcaatatgtgtcaagtgcagagggcacaggatttcggagatcgtggcaatatgtgtcaagtgcaaacttacgaggagaaaccaatgcacattctccagaagaaatgagaacgcatttctgcatgcctccttcccccacccctctgcctttggcccagccttatgttttattttttgcttttgattttccaaggttacatctctttcttctttttttttttttttccccaacagagtctcgctttgtcgcccagactgtagtgcagtggtgcgatcacggctcactgcagtctccacctcctgggctcaacgatactcccgcctcagcctcctgagtgagtagctgagactacagacgcaagccaccacgcccggctatttttgcgttttttgtagagacggggtctcgccatgttgcccaggctggtctccgactccagggctcaaatgatgctcccatctcggcctcccaaagtgctgggattacaggtgtgaaccaccacgcccagcctagattgaataatttgacaacaaattggaattagcaacgcagacgtcaagtggagtctcagcagaaattgctgctggaatgcacctccatagctctggacagctctagggtcccttgtggaggaggtggctggccccagaacaagcgtctttattgccaagtgagaaatgagcaaaaacaaaacaacacttctcaggcctctccagcttagctagatcaaatggttttgatgtgggagagtggtttccactatcgtcaccaagaattttcctcctacactaccccagctagaaagttatgttgtctcctcaacactccccaaggtgatctatgaagctagtcaagtcccagcactttgggaggccgaggtgggtggattacctgaggtcaggagttcgagaccagcctggccaacgtggtgaaaccccgtctctgctgaaagtgcagaaattagctgggtgtggtggtgcatgcctgtggtcccagctactcgggaggctgaggcgggagaaacacttgaacctgggaggcagaggtgacagtgagccgagatcacaccactgcactctggagtggagacttggatggagaccacgactctctctcaaaaaacaaaaacaaaaacaaacaaaaaatactcaagtgtggagaacactgactctgaacagaggactctgacatttcctaatgcagcctgaaattaaggccaaagacattaccagtctggatggatataggaatcacacaccactctccagctgcttttaatgcagcctggttcacaagattctccaactctgctccggaaaagccaacagtacctcgagctataatttctggatcaacggctaatgtaaaaagagaacacaacgctaataagtctaaaacaggtaaaagaaagctcttcacaaagaactcacattccaactgggtgcgttggctcatgcctgtaatcccagcactttgggaggctggggcaggcagatcacctaaggacaggagttggagaccatcctggccaacatggtgaaaccccatctctactaaaaatacaaaaattagctgggcatggtggcatgcacctgtaatcccagctattcagaaggctgaggcagaagaatcacttgaacccgggaggtggaggttgcagtaagccaagattgtgccactccactccatcctaggcaaaaagggcaaaactcttgtctcaaaaaaaaaccaaaaaaaaaaacacctcacattccaagggaaaaaagaaaatagctagctattctgagccatagtttagtcactttttctctgaatttcatctggaaatactttagacataaaagctgcccttataggaaacatgtatagtttaatgaattgatacagctatctctgaaactactgcagctttaataatttcatttattactcaagtgagtaataaatttccatgtgttttgttttataatttgctttcttctcttttggccccacactgactatatcatgagttactgtttctgcagctttttaaaattattttgcattttacattcatcttaaaaaaatgtgtgtgtgtgtatgtatatgtatgtatcctcaaatattatctgtctgaatactctaaaaaaacctttctttagactcagggttcaaaacaatagaatctcctggatatacactaaggaatggacttttaaacgaacatactaatgg

SEQ ID NO: 595 - DNA, 1800 bp, Homo sapiens
gtcccgcgggtccaacggaccaactccaccgccatcttcggcgtcattgtaactgtacttcaccagcaccactaaccggaaatctggcccttgccagaaaatttatccgccagtgctggcggaggtcttctctttccacttggaaccgctaactgcattcgaagtttgttgatcattacgcatttttgcagtacaggttacaatacaaccatttgctctgatggatcctcatactgaagagttgcctcagtacatacatataaatcagaatgagttttgcatacgaaggcataagaagcagaaggaggaggatattgctatatgtgaatgcaaatatgatgctgatgaccctgacaatgcatgtggggatagctgcctgaatgtattaaccagcactgaatgcacccctggttattgtcattgtgatatattatgcaaaaatcagaaatttcagaagtgtgaatatgcaaaaacaaagttgtttaaaactgaaggccgtggatggggtcttttggctgatgaggatattaaggcaggacaatttgtcattgaatactgtggagaagtaatatcatggaaagaagccaaacgtagatcccaggcttatgaaaatcaaggtcttaaagatgcatttatcattttccttaatgtgtctgaatctattgatgcaaccaggaaaggaagccttgctagatttataaatcattcctgtcaaccgaactgtgagacgagaaaatggaatgtgttgggggaaataagagttggaatatttgcaaaacatgatattcctattggaactgagttagcttatgattataattttgaatggtttggtggtgccaaggttcgttgcctctgtggtgcactaaaatgttctggattccttggagcaaaatctcgaggttttcaggaggatacttatctatgggaagatgatgatggcaggtactcagttgagaaaattcctgtatatgattctgcagaggatgaaccggtgtcaaattttaatggacgaaccgaaccctctttggatgttatagttaaagctgagcaattatcggagtccactgctttccatgttcagccccttgattcagttcagatgaaagatttagatgttaagaagattaaaactgatgtagcagacgaggatatgaacttttattcacaggatagtgaacataccctttctcaaaagaatgcaatatcacatatccgaagtaatactgcaggcagaaactattgccttggacctaggtccatgtctaccaaaagatcaagggcatataatggtggaaggttcaaaaatctcatagagaagaagatcgatgttaagtttgctgctgccctcctagcatccaaggaagcacaagaggagatttttaattgtgagaaaatgaaggatgatgctacatctgctcttgattccttatatgatgaaatacggcctgccattgaagaacacgagagggatagccaagacagtgtatccacgactgtagcagagaagtggatacaggcctgctgcctgaaattaaaggcggagtttgacctttactcatccattgtcaaaaatgttgcttgcactgcgcaaagggcatctggccaagtaaaacctactgaagttgataacgaaaacgaaattaagctcctgacaggttgaaattcttatcacatttcccccacccctccccatatataatctgtaatttacagtgtcacaaaatatgtgggcaactttgaggaaacttcttttttgaaattcataaataaaatagagaatctaagactcgatgaaat

SEQ ID NO: 596 - DNA, 2341 bp, Homo sapiens
ttaaaaagcaaaaacaaaaaacaaaaccaaagtatacaggcacaaagagcatgatgaaagcatcagtagctcacatttcaatactaacattgaatgtaaatggcctaaatgctccacttaaaagatacaaaaccacagaatggataagaactcaccaaccaactatctgctgccttcaggaaactcacctaacacgtaaggactcacataaacttaaagtaaaagggtggaaaaaggcaattcatacaaagggacaccaaaagcgagcagggttaaccattcttgtatcagacaaaacaaatgttaaagcaacagcaattaaaagagacaaagagggacagtatataatggtaaaaggccttgtccaacatgaaaatatcacaatcctaaacatatatgcacttaacactggagttcccaaattcataaaacgattactaatagacctaagaaatgagatagcaacacaataacagtgggggacttcaatattccactgacagcactagacaggtcattaagacagaaagtcaacaaagaaacaatggatttaaactacaccttggaacaaatggacttaacagatatatatgaacatttcatccaacaactgcagaatatacattcaattcaacagcacatggaactttctccaagacagaccatatgataggccataaaacgagcctcaataaatttaagaaaattgaaattatatcaagcactctctcagaccacagtggaataaaactggaaatcaactccaaaaggaactttcaaaaccatgcaaatacatggaaattaaataacctgctcctgaaagagcactgggtcaaaaacgaaatcaagatggaaattaaaaagttcttcaaactgaatgacaataatgacacaacctatcaaaagctctgggattcagcaaaggcagtgctaagaggaaagttcatagccctgaacgcctacattgaaacgtctgaaagagcacaaacagacaatctaaggtcacatctcaaggaactagagaaacaaaaacaaaccaaacccaaacccagcagaagaaaggaaataaccaagatcagagcagaactacatgaaattgaaacaagcaaacaaacaaaaaatacaaaagataaatggaacaaaaagctgtttctttgaaaacataaatgaaattgatagaccattagcaagattaaccaagaaaagaagagagaaaatccaaataacctcactaagaaatgaaacaggagatattacaactgacaccactgaaatacaaaagatgatttcaggctactatgaacacctttacgcacataactagaaaacctagaggagatggataaattcctggaaaaatacaaccctcctagcttaaatcaggaggaattggataccctgaacagaccaataacaagcagcaagattgaaatggtaattttaaaattaccaacaaaaaaaagtccaggaccagaaggattcacagcagaattctaccagacattcaaagaagaattggtaccaatccttttgacactattccacaagatagagaaagaaggaaccctccctaattcattctatgaagctcccatcatcctaataccaaaaccaggaaatgacataaccaaaaaagaaaactgcagaccgatatccttgatgaacatagatgctaaaatccttaacaaaataccagctaactgaatctaacaacatatcaaaaagataatccaccatgatcaagtgggtttcacaccagggatgcagggatggtttaacgtatgcaagtcaataaatgtgatacaccacataaacagaattaaaaacaaaaatcacatgatcatgtcaatagatgcaggaaaaacattcgacaaaatccagcatcgctttatcattaaaaccctcaggaaaaccggcatacaaggaacataccttaacataataaaagccatctatgacaaacccatagccaacataatactgaatggggaaaagttcaaagcattccctctgagaacgggaacaagactaggatgcctactctcaccacttgtcttcaatatagtactgaaagtcctagtcaaagcaatcagacaagagaaagaaataaagggtgtccaactcggtaaagaggaagtcaaactgtcactgtttgctgacgatatgatcatttaccttgaaaaccctaacaactcctccagaaagttcctagaactgataaaataattcagcaactttctcaatacaagattaatgtatacaaatcagtaactcttctatacatcaacagcaaccaagcagagaatcaaatcaagaactcaaccctttttacagtagttgc

SEQ ID NO: 597 - DNA, 1902 bp, Homo sapiens
agtctttcattgcgcgcctacatgtgcctacgacctcacttctgcttctctacgactcaccaccctcacagctggagcaaattcagaaacatccttggtacctaggcgggaaacacgagccagacccgtgcctggagccagcccctggccgccgggtagccatgcggagcctgccatccaacggagagctggaccccgacgtcctagagagcatggcatcactgggctgcttcagggaccgcgagaggctgcatcgcgagctgcgcagtgaggaggagaaccaagaaaagatgatatattatctgcttttggatcggaaggagcggtatcccagctgtgaggaccaggacctgcctccccggaatgatgttgaccccccccggaagcgtgtggattctcccatgctgagccgtcacgggaagcggcgaccagagcggaagtccatggaagtcctgagcatcaccgatgccgggggtggtggctcccctgtacccacccgacgggccttggagatggcccagcacagccagagatcccgtagcgtcagtggagcctccacgggtctgtcctccagccctctaagcagcccaaggagtccggtcttttccttttcaccggagccgggggctggagatgaggctcgaggcgggggctccccgacttccaaaacgcagacgctgccttctcggggccccaggggtgggggcgccggggagcagcccccgccccccagtgcccgctccacacccctgcccggccccccaggctccccgcgctcctctggcgggacccccttgcactcgcctctgcacacgccccgggccagtcccaccgggaccccggggacaacaccaccccccagccccggcggtggcgtcgggggagccgcctggaggagtcgtctcaactccatccgcaacagcttcctgggctcccctcgctttcaccggcgcaagatgcaggtccctaccgctgaggagatgtccagcttgacgccagagtcctccccggagctggcaaaacgctcctggttcgggaacttcatctccttggacaaagaagaacaaatattcctcgtgctaaaggacaaacctctcagcagcatcaaagcagacatcgtccatgcctttctgtcgatccccagcctgagtcacagtgtgctgtcacagaccagcttcagggccgagtacaaggccagtggcggcccctccgtcttccaaaagcccgtccgcttccaggtggacatcagctcctctgagggtccagagccctccccgcgacgggacggcagcggaggtggtggcatctactccgtcaccttcactctcatctcgggtcccagccgtcggttcaagcgagtggtggagaccatccaggcacagctcctgagcactcatgaccagccctccgtgcatgccctggcagacgagaagaacggggcccagacccggcctgctggtgccccaccccgaagcctgcagcccccacccggccgcccagacccagagctgagcagctctccccgccgaggcccccccaaggacaagaagctcctggccaccaacgggacccctctgccctgaccccacggggccggggagggaggggacccccctccaccccccttccgtgccccccaactgtgaatctgtaaataaggcccaaggaacatgtcgggaggggggtggacacaaaaaccggccttgccctgcagggatggggctccacaggccgtgcccaactgggggtggttctaggggaacagggggcgggggagctgtttctattttatttattgattaatttattattttatttattgatcaatccctcctcccctggtcctccccccacgaccttctgtacggatttgctctccggaaggaattctggtttcgcgtg

SEQ ID NO: 598 - DNA, 2124 bp, Homo sapiens
gggccccagagccgggcccaagccagcaggatcccaggaggactgggagtggggcctggtggggactggaggcttctgggaggtcggagggagcttaagggaccccaagcatgttgcagacagaggctgtacggacccattcctcactgcccccaccctacgccctccacatcttcacagtgtgcagcctgggctggcctctccggcagggacgcccaggcttctcgggggcaggcctctgtggctgtagtactccaccacctgcttcgggacctcggccagcacgcacttggccagcgccgcaggggatgcctggaggatgggacaaggcagttacctctgggaccttcgagatggagatcatccgtccctgcaactggattatggcccaggcctcatcctccagagccgagtggtgactacccacccccaccagaggctcacctgggtgccgggcaagacttgctgaggatgtcggccacatgaggctgcacgtgggtctttccagccccccaagcacggagatgaaaagtgctgacacgggaggcgaggccacctccatggtccaggccccacccacacttccccggcaaagcctgagcgtgtctgtgtgatgtgactcactgcagagcttcatgtgtctgtaatatgcatgtttcactgcgtagaatgtcacgtgtccgtgtcttcatgcatgtctgtggtgtcttgctgtgtagaacttcacatctatgtggcatgcacgtcttgctgtagggcctcatgtgtgacatgtgtgtctcgcctggtagaacctcacgtgtgtgctgtgcgtctcaccgggtagaacctcacgtgtgtgctgtgtgtgtctcggcgggtagaacctcacgtgtgtgctgtgcgtgtctcgccgggtcgcagaggttggcagcaacgggggaagccgcgtggtggatcccaggagccccttgtgctgttctctgcttttgtgtagattcgacaagtttcaaaacggtggagggtgtttcaggtgctcaaagtcctggcttcagatactgctcttgactggggggaacagcccaggatcccccagacacaagaagggacctgccacatccactggcgtgagcctggcctgggaaggtcttgggcagtgacgtgaacagggacccccaagccggccttgacggagcccctccaggacactcacgttcttgagctcccggaagggcacgaactgtacgatgtcccggagcgcgggctcaccccgtggggagcgcaggacgccgtcgtcgccgtccaggacctgcatgtcggtgaagtcggcgttgcccacgcccacgatgatgatggacatgggcaggcgtgaggcacgcacaatggcctcccgtgtgtcggccatgtcggtcaccacgccgtccgtcaggatcagcaggatgtagtattgctgggggcacaggaaaggcatcagcaacaccacacctgccatggcccacatgcgccctgcaacccacgggcccccagacagcccagagtgcctccgtgcgtcagagcttcctagaaccgccttcagagtgtgatgcctacatcacaaacatcacgaacaacagtgggtcaggagccccctccgtggcgggcactctgggcctcctgtgcccaactcaggaaatctccacgagtctcacggagggctgtggagggggtgctacgaagtccacattttactgatgagctcacagtgcctggatgggaggtctgaggccagaggagaaatctgcgatcccaggagccagacctgcagcccacacaccctgctccagtctctccagggtgcccgctgtgctgccacaagactgagtgttggccggacgcggtggttcacgcctgtaatctcagcactttgggaggccgaggcgggcggatcacctgaggtcaggagttcgagaccagcctggccaaaatggtgaaaccccatctctactagaaatacaaaaactagctgggcgtggtggtgggcgcctgtaatcccagctattcgggaggctgaggcatgagaatcgcttgaacttgggaggcagagggtgcagtgagctgagattgcgccattgcacttcagcctggcgatagagtgagactgtctcc

SEQ ID NO: 599 - DNA, 2561 bp, Homo sapiens
acttctgcagtgggtccttcatatgacattcgctcagtcctccagacttcagaggggccgagttttatgtgccttgcagcctggctcacatcctccagcacctgtgactgggcaaagcctgtggggctgctgacctccacagtggccgacactgggccctggggagtgcgctgtcccgagctgtgagaggccccaccagcaacctcgctctcgcctgaagggatgtacagctcccgggtggcccaacgcctaaagcgaatgccagcagccggggcctccgctccaccttcctcatctgggctgccaggcgctgggctgcgttgcctgctcaggctctcccgaaccaccgactccacagccttctccatctcactggcctcatctttgctcagctcctccaggtctaaccgatcggcatccacagtttgtgagacgttgacttcagcaaccagggtcacggaactgccaccagcaccctggaccttcttgacatccacggaaacgctccccggcccaccctgcccctctctggtgagggcggacagctcctccctcatgcgctcgggaagggtttcctccagctgcccgatgacctccaccagctgctgccggggctccttggaggagatgcccttcatggaggtgtggaattcgtggggtattttaatttctttttcaatgactgtgggttcggcatgaaattcaccgcttctagcttgttctttccagtgagtggaacccaggtccccctccagagagggcgctgggacatccaagggcttcacaaccttctcgcccactgcaccgtccttctgtgtcctccttcgagtcccctgcacgatttcatcctgccaagagtacctgatggtggattcctcctcgatgtggatctgcccgtacaccgagccgtcatctctgtcgtgccccccggggtgttcatctggagtggacacaaaataactctgctcgccctctgaatcacctgcctctgtcacttcttccacgaagctctttcctgtccacgtaagtgacttttgtgtctggaaaagaatcagcagatgcttctgtctctggagactgagtgaactgcttcaggatactggtaacgatgttttctgctacggtttctgtcatggaatcgccttgcagagaaccagtggcatcactggtgcccaacctgaaccgtagctctcttgcttctgcttctctaccggtcccaccaccagcatccttcacaggcgtctgcaaacctttcggggacacctctgctcttctgtcctgggatacttctagactaatcggcacctctctctctcgcacgctcttctccttcggtgagtccttctccttagccttctccttcatctgctggctttctctctgtctcgcttccttatctaactttgtcaattcttcccatcttaggtttctctcctcggaagccttctctttagaatcgaacattttctcttctggctttgttcggatggtttctggtctgtttctttcttgctccctcgtggctttcacttctgttttctttcccagaatgacggtcctctcatttgaccgtgtgctttccgaagcacctgctgccaccttgtctcggcgatcccggtacgactcgcgggcaattgtggaatcttcacctatgtaaacggggacctcccttgtatctccggcttttggtctgtcagggaatgttttcacttgagcctcagtatttcttaaaaggccataggttggagagaaagttctgacgttggtttgactgctgacggcttttccgtatgagttttcctgctgggtagtggccgaggggaatatcccgagcccaagaagcctcttctggcatcacctccaatagatgtgcccgtctgagatccacggtgccctgacaggttagaatacagtgccgagctgtgattgaaacttgccaaaggtgctttctgccttgaaaatagattcctttcattttccctctgtagtagtgagtcggtatagtgataggatttgtttctgaattctgtagaaattgaacaaagcattcattaaaatgacagtcatcattacccttttccatctacaagcattgttgcaggccaaatcccattccatcataataaatatacactgttaccacagaaagctcattataaagataagttatatttggtgcccaaattattttttggcagtttacaaaatcctgttacaataaaatgtagcactacaaatacttcagcctaacacgtttctccagttactgatattaaaatactcactcatcttaacattaatcataaagcacaatgcatatcccagagaggtcagaggtgctcgtttttgtggctgaaatttcacaatcttatattttgaaatcattaatttctgctttttgaggtaagtttaatttactgtagcagagaagagctctgtaattacaaagtgtgtcattattaaacaccaaatagcattatcctccactatttaatatactcttctgtttcactgatttccatattgggccaacaagtattaaagaatttaacttctttaag

SEQ ID NO: 600 - DNA, 2070 bp, Homo sapiens
tttcttttctctttatccccaacttccttccaggtcgcaaggtcacgtcctgtccccacctttcgcccctcaccccagctcccccaacgccaaagacaaggttaagaaagtgatatcgcgaaatagttttttaaagcattttattgcattttatgacttggagtttatgtgaaacctcaacggtattagccgaacagcctgccgcaccttccgggagttccagagtgggcctacaactcccacagggctccgcgagcgccggacggacagactacaattcccgacaggcagcgcggctggcggggcggttcgcggcggtgcccacaggacctcagggcgagtgcgggctgccccgcgcggcgcccgcaggaccccggcggctacccatgccgaggcacacggaatgcagtgctgaacacggaggcgcgcacgatggcggcggaggtgctgagccgccgctgcgtgctcatgcggctactggacttctcctacgagcagtaccagaaggccctgcggcagtcggcgggcgccgtggtcatcatcctgcccagggccatggccgccgtgccccaggacgtcgtccggcaattcatggagatcgagccggagatgctggccatggagaccgccgtccccgtgtactttgccgtggaggacgaggccctgctgtctatctacaagcagacccaggctgcctccgcctcccagggctccgcctctgctgctgaagtactgctgcgcacggccactgccaacggcttccagatggtcaccagcggggtacagagcaaggccgtgagtgactggctgattgccagcgtggaggggcggctgacggggctgggcggagaggaccttcccaccatcgtcatcgtggcccactacgacgcctttggagtggccccctggctgtcgctgggcgcggactccaacgggagcggcgtctctgtgctgctggagctggcacgcctcttctcccggctctacacctacaagcgcacgcacgccgcctacaacctcctgttctttgcgtctggaggaggcaagtttaactaccagggaaccaagcgctggctggaagacaacctggaccacacagactccagcctgcttcaggacaatgtggccttcgtgctgtgcctggacaccgtgggccggggcagcagcctgcacctgcacgtgtccaagccgcctcgggagggcaccctgcagcacgccttcctgcgggagctggagacggtggccgcgcaccagttccctgaggtacggttctccatggtgcacaagcggatcaacctggcggaggacgtgctggcctgggagcacgagcgcttcgccatccgccgactgcccgccttcacgctgtcccacctggagagccaccgtgacggccagcgcagcagcatcatggacgtgcggtcccgggtggattctaagaccctgacccgtaacacgaggatcattgcagaggccctgactcgagtcatctacaacctgacagagaaggggacacccccagacatgccggtgttcacagagcagatgcagatccagcaggagcagctggactcggtgatggactggctcaccaaccagccgcgggccgcgcagctggtggacaaggacagcaccttcctcagcacgctggagcaccacctgagccgctacctgaaggacgtgaagcagcaccacgtcaaggctgacaagcgggacccagagtttgtcttctacgaccagctgaagcaagtgatgaatgcgtacagagtcaagccggccgtctttgacctgctcctggctgttggcattgctgcctacctcggcatggcctacgtggctgtccagcacttcagcctcctctacaagaccgtccagaggctgctcgtgaaggccaagacacagtgacacagccacccccacagccggagcccccgccgctccacagtccctggggccgagcacgagtgagtggacactgccccgccgcgggcggccctgcagggacaggggccctctccctccccggcggtggttggaacactgaattacagagcttttttctgttgctctccg

SEQ ID NO: 601 - DNA, 2648 bp, Homo sapiens
ggtgggcccctctgcatctgcccgttgtgcagcaagctgtttcccagctcccacgtgctgcagctgcacctcagtgcccacttccgtgagcgagacagcacccgggcccggctctcacccgacggcgtggcacccacctgcccgctctgtgggaagaccttctcgtgcacatacacactgaagaggcacgagcggacacactcgggtgagaagccctatacgtgtgtgcagtgtggcaaaagttttcagtactcccacaacctgagccggcacaccgtagtgcacactcgagagaagccgcatgcctgccggtggtgtgagcgccgtttcacgcagtccggggacctctaccgccacgtccgcaagtttcactgtggcctcgtcaagtcccttctggtgtgatgcatccctgtgggtcctgagggtggggtggaagggaagggatgggccctcccaggtgggacacagcatggggtgtgaagcctgaccaggtggaggtccctgcttgggccagatggctccaccctcctggcagagagaatgctgcctcttcctggaacttggcctcagactcggtaacttgggcagccttcctcccaccttgcctctcctttcccctcactctccaactcattccggcccccaggctgtgccctgcctaggctgtgacactatcttcctctcccgtcccctccagccaagttctgaggggtgtccaaccagcacctggctctgcccccgtttctccgtgtgagatggcacatccatctcccggcccgggactttcctgaccacctctctggcaggcttggggaggtcttcatgagcctggccccacgctaggtgaattattcacatgtcagaaaagttgttggtgtgcgtcccaatggggcgctgggagggaacaggacactcctggggagcggcagcaggaacccctgccaggaaggcctggggcacagtgagtgccagcaggggccatctgggcacagctggtgtctcggggtggggggggggggtgcagccccagcagggatcctaaggcagcaggagtagagccagctagaagctgagtggctgtggcatcattgtcactcgggtgggacgtgggtccatgagagcgtgcaattatgaccacactgtaactttgagcagagaaagtgggaatttggaactggattctctttagagccaggaagagcctcctgaggcggccagatgtctgctggtggccgcccagccacatgcttgtctgcctgagtgcaggtctaggaagcctctgggcatcccccagggtggggtctgggccgctgagctgtgtgctgctgctgggccaccgtgggccttaccttgacggtcactctgcctgctagggggtctccctggagctgtgggcatttccgtgcactgactgagcagaggcaagggctgccctgtccgccaggggcagggtttgcgggccttcctttccccacggcgaggcatgggtgaaagtggccatggcggcagggttaggggcaggtgaggagtgggagtcgcagcaccctaggggcctccatccgcagccttgggagactgacgcccctcgaacatgaatagaatgtggagaccacaacccccacacatgtcgttggttcaggtcgccctgctttgcctgcctaatggagcacatcttgctgccagaacctcactggcctctgggggtcggcaggtgcagagccacctggacgcctggagaccacctgggatgtttcctctgtgactgggaatggccttgacaacagagtccagccaagtctacgttattttctcatctcctgacaacactggatgtcatatttattagtcagcctggtctggagtgaaagaccgtccctggcgcatctcccacgcgccctgggctcctggtgtgctgggtgccagcctgggagcccagcgcttctgggtgatgccccagggctcagaggccctggatggctttggtctcgagacagctgggggaggggccctgcttctgattgtcctgggccccagcccccacctctgcaagggatcggtgtgatgtgctccataatcgggtggggtgtgtgtgtgtgtgtgtgtgtgtgtgtgtatgtatgcatgcgtctggcacatggcaaggcccaagccaacccggcaccccgtagatgggcagctacactgccacccaagcacggagatgtggccgcggcactgggtcccccagtgggtcccatgggggaagaacttccctttgctggggtgggcagcctgccctgagctatcaacactggatttgttgtcttctgcacagctactgtgaagatagcgtaaggagaagtggtcagttttcattttataactgacacagttgggacaaaatatatacgtgtacatatatttaagacactaattgtgtgggagagtttagtagaggcctgtgcagacacaaggcaaacagcgtcagcagcgtgggggtctcctgggccagctcggcacctgtgggtgctctgaccctgggggtggggacagctccgtgctaaccccagcagacagttgttggtgcacagtgtctaggaggcgtgggaatgggtgctgtcttcctcttttcacatcatggcgacagtaataaagcccacctccagtgg

SEQ ID NO: 602 - DNA, 1794 bp, Homo sapiens
ctgttggcctactggatactctcactcgttcattccaacctacccttattcttcttcttcaattccacacccatcatggaccgttttccgatcctctttctcctcgccaccctcatcaccctcgcctccggtgcccgccacgatattctccggttaccctccgaagcatccacttttttcaaagcacccggtggcgatcaaaacgatgagggcacgaggtgggccgttttaattgccggttccaatggctactggaattacaggcaccagtctgatgtttgccatgcgtatcaactactgaggaaaggtggtctcaaagaagaaaatattgttgtatttatgtatgatgacattgctttcaacgaagagaacccgcgacctggagtcattattaacagtccacatggaaatgatgtttacaagggagtccctaaggattacattggtgaagatgtaactgttggcaacttttttgctgctatacttggaaataagtcagctcttactggtggcagtgggaaggttgtggatagtggtcccaatgatcatatatttatatattactctgatcatggcggtcctggagtgctagggatgcctactaatccatacgtgtatgcatctgatctgattgaagtcttgaagaagaagcatgcttctggaagttataaaagcctagtattttatctagaggcatgtgaatctgggagtatctttgaaggtcttcttcctgaaggtctgaatatctatgcaacaacagcttcaaatgcagaagaaagcagttggggaacatattgtcctggggagtatcctagtcctccctctgaatatgaaacctgcctgggtgacctgtacagtgttgcttggatggaagacagtgacatacacaatttgcaaacagaaactttacatcaacaatacgaattggtcaaacaaaggactatgaatggaaattcaatttatggttcccacgtgatgcagtatggtgacatagggcttagcgagaacaatctcgtcttatatttgggtacaaatcctgctaatgataattttacttttgtgcttaaaaactcattggtgccaccttcaaaagcagtcaaccaacgtgatgcagatctcatccatttttgggataagttccgcaaagctcctgtgggttcttctaggaaagctgcagctgagaaacaaattcttgaagcaatgtctcacagaatgcatatagatgacagcatgaaacgtattggaaagctcttctttggcattgaaaagggtccagaactgcttagcagtgttagacctgctgggcaaccacttgttgatgactgggactgccttaaaacattggttaggacttttgagacacattgtggatccctgtctcagtatgggatgaaacatatgaggtcctttgcaaacttctgcaacgctggaatacgaaaagagcaaatggctgaggcctcagcacaagcatgtgtcaatatccctgctagttcctggagttctatgcacaggggtttcagtgcataattcctagaatgcgctccattgaagaccgagtatagtcgttgtaacattattctttacgagtgttatggactgtactctctgctcatgatttcttataccaaccctgtaaatacaaatgggacgctggggaaacctctttacattatagtttcctgcaaaatagatgctgtaacaaagacattttacttttacttggggagaggcagtggaaccataaggacccttggaacttctaattaatacgacagggcacaataccgtgtttgt

SEQ ID NO: 603 - DNA, 2329 bp, Homo sapiens
gtctaggaattttgaaagggatctgcttatataatgccactcagtataatgtgtgtagcccagggaatgaccaacctcatgtgtcttacaacctgtctgagcctcctatgaccacagtttttgaaataagattaagaactgaggactggtggggactcatgaaagatacaagtaaagtaataccagaacagaagaaaaaggagctcccaaacaagtcaccttaagatttgatgcctgtgcagtcattaatagtaacaagctagggatgggatgtggttctctcagtcggggtgaaaaaaaaagctatatatggcagaaaataagtacatttgtcatgaattaggactatatggtattattgaatgtagttattggtcctatgtcatttgggccacctggaaaaaggatgaaaaagaccctgtttgcctacaaaaaggaaaaagtaattcatcttgcacctccggtaactgtaacccattagaattaataattactaacccccaggatccccactggaagacaggagaaaatgtaaacctaggaattgatggaactgggcttgacccccgagtcaaccttttaatccaaggggagatccacaagcgctcccccaaaccagtgttccagaccttttaggatgaactaaatgtgccaataccagaactgccagggaagacaaaagatttgttcctgcagttagcagaaaatatagcccattccctcaacattacttcctgttatgtatgcaggggaactactatgggagaccaatggccttgggaggcccgagaattagtgcccatggatccagttcctgatataattccagtccagaaggcccacactggtaacttttgggtcttaaaaacctcaattattgggcaatactgcttagctagagaaggaaaagacttcaccatccccgtaggaagctcaattgcctagggcaaaagctgtataacggcacaagaagaacagtcacctggtggggtctaaaccatattgagaagaacccatttagtaagtttactaagttgcaaactgtttgggcccatccagagtctcaccaggactggacggctccagctagactatactggatatgtggacatagagcctatgccaagctacctgatcaatgggcaggcagttgtgtcattggcaccattaagccatcctttttcctgctgcccataaaaacaggtgatgagctcctaggcttccctgtctatgcttcctgagaaaacagaagcatagccataggcaattggaaagatgatgagtggtcccgtgaaagaatcatatagtactatgggcctgccaactgggcacaagatggttcgtggggataccaaacccccatttacatgctcaactggattatatggttccaagctgtcttagaaataatcactaatgaaactggcagaactttgactgttagcccggcaagaaacccagataagaaatgctatttatcaaaatagattggccctagactacttgctcagtggaaagaggggtctgtggaaaattcaacctgaccaattgctgtctgcatatagatgaccaaggccaagtagtcgaaaacatcgtcagagacatgacaaagctagcacatatgcctgtgcaggtttggcatggatttgatcctgggtctgtatttggaaaatggttcccagcattaggatttaaaactcttataataggagtaataacagtattaggaacctgcttgttgctcccctgcttgctgcctttgctccttcaaataatgagaagctttgtcactactttaattcaccaaaatagttcagcacaagtgtattacatgaatcactatcggtctgtctcgcaaaaagacctagatagtgaggatgaaagtgaaaattcccactaataagtgagattctaaaaggggggaataaggaaggagaccacctctcccattgtctcctgtttcatgagaaagcagaaagttaaaaaaagaagcagaagtgagatcaatggccagatggtttagtgccaagaaccaggcctggtagttaaacatcaactcctgacctaaccgcttgtgctatccatagattccagatattgtatgaggaagacttgtgaaactttctgttctgttctgctagcccccatcactgatgcatgtagctctcagtcatgtagcccccacttgcacaatgtatcatgaccctttcacgtggacccctcagagttgtaagctcttaaaagggacaggaatctttactttggggagctcggatcttgagacgcgagtctaccaatgctcccagctgattaaagcctcttccttcat

SEQ ID NO: 604 - DNA, 1936 bp, Homo sapiens
acagttttcacaaaggtctcttgatatcaaaacttctttccttgcatgcttctctgatcctgtggagatgaaaattgacatccatagtcatattctaccaaaagaatggccagatctaaaaaagaggtttggctacggaggctgggtgcagctccaacaccacagcaagggagaagcaaagttgttgaaagatgggaaagtcttcagagtggtgcgagagaattgctgggatccagaagttcgtattagagaaatggaccaaaaaggagtaacagtgcaagccctttccacagttcctgtcatgtttagctactgggccaaacctgaggacactttaaacctgtgccagcttttaaacaacgaccttgccagcaccgttgtgagctaccccaggaggttcgtgggtctggggacgttgcccatgcaggcccctgagctggcggtcaaggagatggagcgctgtgtgaaagagctgggctttcccggggtccaaattggcacccacgtcaacgagtgggacctgaacgcgcaggagctctttcctgtctatgcggcagccgaaaggctgaagtgttccctgttcgtgcatccctgggacatgcagatggatggacgaatggccaaatactggctcccttggcttgtaggaatgccagcagagaccaccatagccatttgctccatgatcatgggtggagtatttgagaagtttcccaaactgaaagtgtgtttcgcacatggtggtggtgccttccccttcacagtgggaagaatctcccatggattcagcatgcgcccagatctgtgtgcccaggacaaccccatgaacccgaagaaataccttggttccttttacacagatgctttggttcatgatcctctgtccctcaagctgttaacagatgtcataggaaaggtaagcccagtctgccacttggatggcttatggggagcagaatgctgcatcagcaacccattctctctcctttggcttctctccaaaaaagggatggaagaaaggtattagatgaaaggagagagacagtgaggtttgggattaggtttgctcacacaggggattctctccagggtctccctccacacagagtacataacactaagaaactattatatatgccagagaaatcccagatcatctacatggctgggtattcccccagatcagctcctcttccttagcgacatccctatatgcacccaaaatgacacatggcaatgtagtaagcaggaaaggggcacaagtttcaaagtcaaattgacctgggttaaaatcctggctctacctttcactagttgggtaaattgtgaatacaactgtcctcatccactacatggagaaaactggaacattgaaagtgtggaaaatgcatagttgggaaattgcgctggacagggagtcaggggaagatgatgaagggtcttgtgtatcatgccctgagatttcttcctggaataatatggcttttgattctctcatttaattaaaacaccagcatagtggtactttaaagcgcacaagaaaaagtctttcctctgatgtagtctcctcgccaatctctctgttggtggcacacccaccctttaagtattctttaaaaatgctaactcagcaagttcaagaatttctagggaaaaggccatagtgaaaagtctaaaatattttgtatttcaattccatcttattaacagatatctatagaagatttccacattttcccaagggaaaaatctttggggttaaaagtatatagacatatttaaaaatttgcaatatggtacttgagtttagactctaaggtttaaaaaaatcatgtcgagcaaaaagaggcccatcatttgaaagttgcaagtagtggtttatctccagaatggacactttatctcatattaatgctgactgtttctctggcttgag

SEQ ID NO: 605 - DNA, 2809 bp, Homo sapiens
attgtgacttgtattttgtgatgagtctctagaatgattaaatgactatttttttatgaaaaattttttgttaataaaatatctgagggtattttgagtatgtggaaggaatgcctgaatagaagctgatctatcttaacatacctcaagaactccagttttaatatggtgagtgaggagttgactgggaaaaggagagatccaattcttgttctagtccttggcacatacactctctgggttttgagaaaaggatggtcctacaacgattctaagttgttttctcattggtcctacaacaattctaagttgttttctcaaaggcaaaagcatgatttcaaaatgacatcacttgtcagattttctggtgtatggaaagatttaataatcctgcctcttttgaagcctgaaacttacaatttaaagcctgaaatctaccataaggaacttggtaaattgtgtcagataccatgaaaatgcatcttttcatagttaaccacagattgtttatgtaaaggcaaattggtggtcaggttcaaggtaaaatggattattgggttgattagtagccaaaaactaaatgcatgttcaggtcaaaatgaatttgtttgttttagttggtgccattttccttttattattcagaactacagagtgtgcattttattaataggaatgaaagctcatgcttgaggatttgaatagggtggatgtatatattttataaactcaagttgcaaaatatgtaaagtcactactttttaaatagaatataaatgttaaaacagacaaatctatgttatatattttttaatacatgtatcagacttgttagttgaatgcagattactttgctttatggaatttcataacttttaataataaagcagttgttattggattttttctgtagacttgaatactaaatgggatagataccagacctctttttggtttatgacgtaaaagtatttgtacagtagtttctcttcacaaaagactgaattttaaaggattatagaaacaggaacatgtccatttccaaaatgagtgcaacagaatgaagatagtcacttaaaccatctatttaacacatcacctttatgtaatatgtagctagttttagtgttttaataagtcccaactaaagactgagtgttttcagtgaagatggaaatggagacccgggcacttgcttagagttatcgtgagtccgatgttcctgaacttcaagttgtacaattaagggcatactctaagaacttctggatgctttctggagtatacagacagatcaactaatgacttaaatgagtgactcttgaagctgcaagaagaggaaagaaataaccacaagaaggggctatctcagcatctgttattcctgacaggaggaattaaatatgctctgctggtaattctaagcttttctgcaggggatctgcttgccccaggagcaccttagtcctcattgaggcagccattctgccataaaaacgatcatgtctcaagctgttcctgccgtcctacacaactatgttagtagatggttagataaatatatgaaccatcttttgtactttgatgatgcccttttcctttattataatccttaatttctactttccatagtaggatttgacttttctccattagtttaagctaccctggataagtgactctgtttatgtcctccctatatttcttactcattttcacactaacataacacgtaacaaaattaaacataagctaaattgaagaagcaagtgagacagctaagagttttgtgtacttggacaacaaagctcaaagccactgtggttatctgtcctgttgggagcccctttcaaccatttttttagttgcctgtaagatttatttttaatgtttgcctgcataatgcaaaatacataagtgggaatccctacgccctttacagttaagtggattatggaaataataaggaaagtttatcaactaagctaggaaatatcttctcatgtctgtatctggccttcagggacttaatgtgggtgaatatatgtcattagacaagatcctaatatagatggctgtatcctgcagatagccaattcaacattaaaattttatgtttccatacctcaatgaaaacatatttcttttatcctgttataatttaatgacattcccatccaacttaatcaagcaatgatactcagtagtcctctccttgcatttttcaagtcctgttgagtgtaactttaaaatgtctctgagatttctaccttctctccagtctccttaccattagggcctttcactacctggccttggtgtccctgggctgctcttcagctgtccacaaaccttgtttcataagcagtagcaatgcaagcttccactgccgtctgctaatgttcttccctcctagaatgttcatgatctgcgtttctacctgaaaggtctagttcaaaggtagctgaaaggttatcatccttgtcctttcttctctccctaccagtcatctatcctgaactttttaacagtagggacagtgttgcaattgtgtttgtgtccccagcacgtagcacacagtacctagtatacagtacctgtagcacataggcatttaataagtgtgtattgaattaacttggttatgcttgtatttttatcctagctttctcaaagaaacttaggtgctagctattttgaaacatatatccagaaccaccacctgagtaaaatgtataacaggaccctgctctttctatcccagagagtttgagaaaactacttttaaataaatcattaatcattcttc

SEQ ID NO: 606 - DNA, 2432 bp, Homo sapiens
gcggccccctgaatcccgagcctgcctcgcccaagctggtaggacagacggacagacagattcctctagcctagcgctccgccgctgctgccttacacggccccgcgtcgggagaactgggatcgccccaagagcaccgcgaggggtcatctcaggctggctgcatgcctcagctgaagatcccagctcctgtcaatgccacctctctgcttgactgtctccttccagattcgagcaggtatgagctgggaagaatgaaggcagggcatgcccgtgtgccagctctgcacagctggatagctgaggaaagatgtggaggagaagccggggattgtgtggaagtctaagggtgttgtttgccctttgggttccagaagatgcatgccaggaccctgggtggcactgccaggaagcaacagagaggagataaaactcacagcagacggacttgccttaacaacaactcccttgaattaaaacacgcttttcaagaaaacaaattatcagttcgatcagcaaacagcagagaagtttctctcataatggcaaagaagggccgggttgctgaccagtgaaagagcttcagaaaaggagaggggagatgagatggccagaaggagcaagagcaccgtacatccctggacaacctcattctaatgggtcaggggctgggacgtgcattttggagtgcaggagaagtggcaactcacaaatgctagattttcttctagagatgaccaagctgtagttcttaaagcagtggcactagggcagaaaactctcacactttgatgtgcacacacagcccctggggatcttgttgacatgtagattctgattccgtaagtcgggctgagattctgcatttccaacaaactcctagatgaggtccattttgctggtccatgaaacacacttagaataagtagcaaggtataggaggatactgactttgctcagtgatgcttgggcttccgtccaaactaaaataaaacaaaagcagacataaatggcccaattcaacagcctgagaagtttggtgataatgacccaagccctggcctggtgaccaagtggctgctcagagagctctatctccaaactcctgacctcaggtgatccacctgcctcggcctcccaaagtgctgcgattacagacatgagccaccacgcccggcctgctccacttctaaggcttcttgtgacaatgtaagagaaaggagatgacagagctttgcaacgggaggagggctatgtgttctggtgaccaattcactgtcttgtgtcgggacaggaagaagcccttcatacgggcagcaggctgggagccagggaggaggaaagatcacgatccactccctggtacatggcccttctgcaccccgcagtctccttccaggtgccacaacgagaaggcacacatccttggcacagcacttgaggcttttcaccactggctgcactcacccctccagactcactgccttgcaccaacccttttccgcccaccccactctatgctgtccacagcctccaccccagccacctgattctgcaggccaatgtcacattcttccagtccaggttctattctggcatttcttgtcattattttgctgagaatgtgtctctcttgactttgaacttattgagagcaggaatcatgactcagccatatatcccagcacttggcccagggcctgtcgtttccagggtaggtggtctaggctgattgaaggaatggcatttagtctttaaaatgaaagcatgttgcctagcttggttatttttgaactctataatcaaggactacgtttacctgaatagcctctgcagaacaccaattccgtaaggtgcttcacacacacacaccaattctatcatttaatacattttggaaaggctacatactactacagcctcttttacagattagcaatgtccatgagcgcactaaaggttgagacattctgcagtgaagaagcctatttcattttgtttaaccaagtatttctcaaatttatttgatcatatgtggcagaaaatgctgtgtctggcattcttcatttccctcttcctcctttaacatggaacccctgatgtctttagcttggcacatcgccacccagaataaaaactacctttcccagctcttcctgcagctaggggcagccctgggataaattctggacaatgaaatacaggcagaagtaaatcatatacgatttccatgaagggaccttaaacagaagtgtgcccttctcttccccacacattcctcctcctgtctgaaatgtagatgcaactgctggcatttgagcagccatcttgggccatgtggtagcttcttatggatgatctaggactaattcaagggtctagatttacctccaaactttgtttatctacaaaaaataaaactctatcttctt

SEQ ID NO: 607 - DNA, 1771 bp, Homo sapiens
ccacgtggccgccaaggggtgacatgggcactcgatggggtctgggcagaaagccgtgctcccctcacctccgtgcctctggtcttctggtgggtgcattgatgggagtagatgcgcttgtgtccttatgtcatggcgcggctctggagaagccgctgcggtccccagcagagagtagtgacacttacaggagttctggagggctgtgcggggctgcagcttggagggcagggcggggctgcagcttggagggcagggcggggctgcagcttggagggcagggcttgtcttctgcaggagggcgctcaaggaggggatggggagggttgaggactgctgggattggcatctgagcatcaggtggggactgagcagcagtggatctgagcctggctacttcaggtccctgagccagacactgtccccaggtacagcagggtcccggggagtccaggaggcggcggagtgcggcactgtctggagagttcactgtattgcagagaggttggagaaaatcaagtcttgcacgtggcgatggctcaagattccctgaggtcttcagcgctgactaaggagtctgaaatgatgattcatgttttacctttggggctgagccaagtgcatctctttgagcaatcgtcttaatttccttgtcgtcaccaattatcataaccaattatcatcgtaaaggatggtaattcctttaattatacccaccttaaaaacatgattctgttccacaaacgaaaggagcacatcagagatgccttcagttctgtgtgcttgaactttgaattccatgaattatagttgcactgaggggagaatcctgtttacatcctcctggttccttctccctttcctgtccccatgtttctctgaggcctggcaatgctctctggatacttggtgagtagcccaggaggactcaggagtgagaggcccctgcctcctgcgctgggagaaggctgtgggtgggccgtgaacccggccttgagtggcaggacagtgagtgtctgctggtgtgttcctacagcagacggactggactgagccctggctcatggggctggccaccttccacgcgctctgcgtgctcctcacctgcttgtcctcccgaagctacagactacagatcgggcactttctgtgtctagtcatcttagtctactgtgctgaatacatcaatgaggcggctgcgatgaactggagattattttcgaaataccagtatttcgactccagggggatgttcatttctatagtattttcagccccactgctggtgaatgccatgatcattgtggttatgtgggtatggaagactttgaatgtgatgactgacctgaagaatgcacaagagagaagaaaggaaaagaaaaggagaaggaaagaagactgaggggcagcagctgcttggagtttgcgtccttcccgtccacccagtgcagctcccagtgctgcagtgtgcgtggcgtgggcatccttccagctgactcatggtttgaaaaaccgttgttttatttaaatatccacagtggtagggcacacactgaagttggcttttcagccagcactgaatgtatccatcaggacatgcgtcttcaggtgcctgatctttgtagtcaggctgtgggaacggtctctgcagagcttcataactgggaatttgatttgaagaagtccatgtcatatgtgtaactagtactaattataaatataaaatacacaatataaaatatgaaactcaataataaacagtgccacctgt

SEQ ID NO: 608 - DNA, 2271 bp, Homo sapiens
aaggtcatgcctacggccgcggcgcctctgcttccctcccaccccggtttcggccgtcgcctgcttctcccggtcgtcctgggctggccccgcccctcctcccttgtctcccctccttccccgctctcacccgctcccggagccgccgggaccccttcccctgcgcagctgcgggagaggcccgttcccgcgagtgcccccgcggcgcagcctcggacccagggcctgcttgacctcctacctctggcccgccgcccctgtcctctgttcccagcaagttccttctgcccttttaatcccccgaagcctccgtttccacatgttcttgacaagatagacttttctgagtcttttggggactaaatgaaacagtggacctctggggccagcccagcccgtctaggtgttgtgatggccactcctgcgtcggctccgcgtgtactgggggccgagggggaagaagggcccgtgtgggtgactgaggctgtgtcctcggtcttcagggctgaagaagatgcagagcagcctgaagctggtggactgtatcatcgaggtccacgatgcccggatcccactttcaggccgcaaccctctgtttcaggaaacccttgggcttaagcctcacttgctggtcctcaacaagatggacttggcggatcttacagagcagcagaaaattatgcaacacttagaaggagaaggcctaaaaaatgtcatttttaccaactgtgtaaaggatgaaaatgtcaagcagatcatcccgatggtcactgaactgattgggagaagccaccgctaccaccgaaaagagaacctggagtactgtatcatggtcattggggtccccaacgtgggcaagtcctccctcatcaactccctccggaggcagcacctcaggaaagggaaagccaccagggtgggtggcgagcctgggatcaccagagctgtgatgtccaaaattcaggtggagtcctcaggggccaggcccagcactctgtcaagagctctgcaggcgtctggcacctgccgacctctgtgtggcttccggctgctgaccacgcttccctcccctccactcagtgtccccgctgagcacccccggggcaggcactgcccctgcccttattccacagtcgtcatagtctttgcgccaaacctttggggaaggcacgctgttttccccatttccagatgaggaggccactgtccagggccatgcagtggtcaggacagacctgagtgtggcgccccccgccccaccctccactcccttccttgtgttctccttgggagcagaagacaagctgttgggacctgacgcttttatttattctccaaattaagtgggaattagatcctctggggaaccctggagcttggtgagagtgacgctgccatggggttgggtccctgaggccttcctcggagcattgggtgccaggggctgcccaggcttcctgagtggcccacctgggtgggaggctgccaccgcggcctgatcatgccctctgtgcccacacaggtctctgagcggcccctgatgttcctgttggacactcctggcgtgctggctcctcggattgaaagtgtggagacaggcctgaagctggccctgtgtggaacggtgctggaccacctggtcggggaggagaccatggctgactacctgctgtacaccctcaacaaacaccagcgctttgggtacgtgcagcactacggcctgggcagtgcctgtgacaacgtagagcgcgtgctgaagagtgtggctgtgaagctggggaagacgcagaaggtgaaggtgctcacgggcacgggtaacgtgaacgttattcagcctaactatcctgcggcagcccgtgacttcctgcagactttccgccgtgggctgctgggttccgtgatgctggacctcgacgtcctgcggggccaccccccggctgagactttgccctgaacttgtccgggtagggagggccggaggcatgtggcctcccagacctcctgacctgggtggttgaggctcaagacagctcacccggtccagaagctccatgctggtcactagggtgctgtgctctctggcgccccacagcctggccagctccagggaccccagttgcagggcccaagcaggtgggagtggacaccaggcttcccagtggacgtccctgagcagctccgcatgcttggttctcccggagcttcctgctcaggcctcttgagaaatggatgctgtctcagaaggagttaaagctataacctgtaaccttt

SEQ ID NO: 609 - DNA, 2490 bp, Homo sapiens
tttcctggtttataaaggtgcttcaggactccttggctcctggccaatatcttagtgcttcctgaaggggaaagagccctccaaaccattcagtgggccatcccagaccgaggtttctgacccagacattgaaacaggaggagttcccttatccccccttgcagggcatgtgacaggggcatggctcgcttctcagtaccctgctgctcaaacccctagagggggcatgcagatggacaggtcgtggggagcgtttttgggctccgaccccacagcagcttgtagaattgggtgtttacagctcccgaagccccagtgggcacgtgttacagtggtctccttcagttttgccatctgcaggcagcttgtgttaatcagctcaattagaccctctgccttatcacaaagacagatggctttctgtatcccaggttcttgccctagtgtactcggaaaatcagatttcgcatggacttggagaaggagtgcaaggttttattgagtggaggaggtggccctcggatggggagccagaagggggatggagtgggaaggtggtcttcccctagagttgggctgcccagcagccagactctcctccgaccgcccccgactgatttccacatcgccccgctgtcgaaagcccgccagcatctgctggtgtctgtcagtgtgctcttctgcttctctgctcctctcgacgtccagccacttgtgtgtgtgcccactagggtcttgggttttttatgggcacaggatgggggtcatggcaggccagagtagtcttggaaaatgcaacatttggacatgaaaacaggagtgcctgttctcactaaggtccatgggcacaagcccatgggtggagccctcgccagggaccccacccttctctacccagcactcccctgccccccttccatgtcaacatgaaagctgacattggctcctgtgccccacctctgggcctggtttggtgacctctgcaccagagctgctagggaggccccatcccacatgttgttgattgaacagcccttccccaggggaaccaacgtcctcctgtccccaaacccatggaggagtggtgggttcctgggcctctagtaactcgactgaatattttccaggttacctaaccaaactcctgcaaaaccacaccacctatgcctgtgatggggactatttgaatctacagtgccctcggcattctacgataagtgtccaatcggcattttatgggcaagattaccaaatgtgtagttcccagaagcctgcctcccagagggaagacagcttaacctgtgtggcagccaccaccttccagaaggtgctggacgaatgccagaaccagcgggcctgccacctcctggtcaatagccgtgtttttggacctgacctttgtccaggaagcagtaaatacctcctggtctcctttaaatgccaacctaatgaattaaaaaacaaaaccgtgtgtgaagaccaggagctgaaactgcactgccatgaatccaagttcctcaacatctactctgcgacctacggcaggaggacccaggaaagggacatctgctcctccaaggcagagcggctcccccctttcgattgcttgtcttactcagctttgcaagtcctatcccgaaggtgctatgggaagcagagatgcaaaatcatcgtcaacaatcaccattttggaagcccctgtttgccaggcgtgaaaaaatacctcactgtgacctacgcatgtgttcccaagaacatactcacagcgattgatccagccattgctaatctaaaaccttctttgaagcagaaagatggtgaatatggtataaacttcgacccaagcggatcgaaggttctgaggaaagatggaattcttgttagcaactctctggcagcctttgcttacattagagcccacccagagagagctgccctgctgttcgtgtccagtgtctgcatcggcctggccctcacactgtgcgccctggtcatcagagagtcctgtgccaaggacttccgcgacttgcagctggggagggagcagctggtgccaggaagtgacaaggtcgaggaggacagcgaggatgaagaagaggaggaggacccctctgagtctgatttcccaggggaactgtcggggttctgtaggacttcatatcctatatacagttccatagaagctgcagagctcgcagaaaggattgagcgcagggagcaaatcattcaggaaatatggatgaacagtggtttggacacctcgctcccaagaaacatgggccagttctactgaaaaccacatgcatcttgatgcgatcgcactttctgaagaaggaagggtcccaaatgcccctccagttctggttcacctgtaccttctatgaaggagaattcgtcatgtcattcaacactcgtgaggccaggaagctattaaagggatgtttcaagctgtttctagcacattccaaaataaatgaggagggaagagtc

SEQ ID NO: 610 - DNA, 3624 bp, Homo sapiens
tattgatgcttaacttggggcctgtgtacttcttgtagtttggaggcccatgaatagtctttatcgaccctgggaaattgtacagaaaattgtgggtgagtcattcttgggagggaaccccagctcctcacaaaggctcctctctcaccctgccaaggataaggaccattgctctaaattacatattattctgaatgtaatgagagcattgatactagttgaactatttcatcttgtagaacaatttacagttgtctagctcatgtgctgccctgtactgcgacatattcacttctgttggaggcctgcaggtgaccatggcttgcctcttgatgaccatgctcatgtgaaagcttggtgcccaaaagaaaaataaaaagcatctctaaagaatgagaattgtcaaaaaggactacacagtgtctgtctgtttcttttttgcacagggcacggtggtccaggcgtcacctgacttgtcctgacccataggcagcccccagtgcaaactgccccacaggacagagccatcaggccttcaccatttaggctgcatcaagccagttccagtctgttccaaggggcccgctgccgtagctaattgattagaaaaatccagataaagccaaagatgtcctttgtctgcaagtcgcatacaattgagacttaagtttcgcatagcgttactgatttcatagtttgatgacccatcgctaggaagtgttttcaaagctgtgtttcagacttgccttgcttctgcattttttggctgtgcattgaagggggtgacccctgagagacgttccttcaggggagaggagacccctgtggtcttattaaagtcctcatcccacccaaaggtacaggtagggggcagatgcggaggcagctccccattattctgggggggtcattaggggagctgccttttgtgaccctataatcccaatagtagcaatcttaggtgcctcttctgggtaggaggcctgagcagagagccccagctttactttcctgcttctgggcctggaggaaaatggaggcccaaccctgcagcctccacagctcgtggcaaacgctccagagcccccgtgagtgctgacttcccttaagccaggggcgaggggcagagctacagactggtgacatcgtctgtgtgagatagtgggtgggacagtgggagtcccatgtccctggggctcagaccacttggcatccagtccacgtgtgcagcacagccagtagtcagaggtgtggatgcgtgtgtggcaggtgcccctgcgattctgtccctgaaagagctgcaactgctttgcttttcagatcagcctggagatgatggagaaaatccccatactgaggagcctccgcgcccgagagcagcaggctgggaaggatgtcaccctccagggtgagcaccagcaccttccggaaccaggctgccagcagacagtgcccctgagtgttggcaggaggcccccggacacacccggaccagaaaccaattccatggaggcagcccctggctccccaccaggggagggtgccccgcttgcagccgatgtttacgttgggaacctccccggggacgcccgtgtgagtgacctgaagagagccctgcgggaactcggctccgtgcccctgcggctcacctggcagggcccgcggcgcagagccttcctccattacccggactctgccgcagcccagcaggccgtctcctgcttgcagggcctgcgcctgggcaccgacaccctgagggtggcgctggccaggcagcagagggacaagtgacctcgtggacagccacggagctcactgcagactcgccatccccgtcccctgccgctccggttccgatggcactcgagaggcctgcgtggcaagacgtgtcggagccaccgcctgagctgctcgggtctcaattcttctcagaagtcaccgctcagtgaacgcccaggccctcctgtgagtggggaagccgccctgcggttcatctcacagcgcgcagagactgcagcctcccaatcgtgcaggctcgggccttgagtcggtttctgtttctctggagggacagagcagaggggccagggactgagtgagtggctaagcaggggagggtgatgtgaaggtgatctcgagtttgccaggggtgggctgaacaggagaagatgaacaaaggatccggctctcaaaaggccctggcagggactggatgctgggtacagaagcgcgcccttgggcttcaggctcctgagctggcagcacggcagggagagctccatccatgtcgcaggagcccaggaagctcagcccctgggtaaaaagtgctcactgcagctcagatcagtcctcaggtcacatttcggggagccagcctcccctcttcccctccccagccccgctcctccctctgtggacacactccgggccctcagccagctggctgcatgaggagcagctttgtgctgtgggagagaccggctctgggagaatgggtttcatcccagcctacgtcacatttgcccagtgccttatgttttctgggttttttttcctccagttctgtttctaaaaaccagcttgagtttggctgaactgtcctttctcaacagaagcgcttttgcaattgatcccgggcaacaagtcaaaataagcttttaagtggagattttgtttttttcaaatgtatatgctttggaaattttgattttttagccagagggttttaccaagtgttctttgaagcacattacgatgcctcgagagggcggcccgtgcacgcgctttcaagaaaatgttctcgggacactcggtcttctctttgaaaggacattttctcattggttttgccgtgaaaatcctgtggagacttcgcaaagaaaacgcagccttacatttgctcattaaagacagatttccttcccaagtcgccatgaataaaatgagagagtagaaacgtctggaagcgccacacctggccctgggccctcggccctctgtgtccttggccttgcccccgcccgcacggctggtcacgtttgtcattgggcattcagctcagcgtcagaggctgactcagtccccagttcagagtagtcacctggttacactgaactcctcaccttcttttctctctttttttaaaaaatacttctttttctgaaagattcttattttttttttttgtttacctttttcctgtggatttgctgccgttagaatagcaactccaggagaagagcaagtgagtcagccccccttctccactccctgccccaccggcagtgggcacagccctgcagacaggagcaaggacttcggggaatagacccactggggccgggagagggagaagctggattctgaccccaccactggcactcctgtgtccagccatgcctgacgcccaccccaccctcagacggcgggattaaaccaggcagtacagggttactcggggaagccagactgctgggatttcctgtcgctttagccagaataatccaggtatatggatatacagataatctgaaagagtttctcatttttatatttgtggaacatcgtgtaagaaaaactgaagagcaagtgcctgaaataaaatcccccacatgtatcagcctg

SEQ ID NO: 611 - DNA, 1769 bp, Homo sapiens
aaatttcctgcagtctgggcatgagagcaggactggagttggtgagaaccactcggtcacccctgcctcattcatttttttccccaggccccaccactggaagaactttgaggggtgaggtggagactccagaatgggacactcccgtgtgactttaaacttacaggacagacggaggccttcctctgggttgctgagtcacaaggggccaccgttcaaggcagaagagcctcccagaagtaaagagggtgcgtttggtgggagcatctcttgtttaagccaaattctagcaccaccccagggctgctcccaggggtgtgtgcaggaagccaaggatccccgaccgtcagcccagctccttcctacaagaaccacatgcctttctcgggggtcccacctcctacatcgttttaggaatagactgcatgtgcacggggcaggcccacggtgagtgcctgggtagcacagggggtgcgcaggggtgagggatgcgggagaggaggtgagtggggagaaaggcaccaggacgaccttgggtgacaattcctgagtccctgactactccattctctgataaaacctcaggcatttatccgacacctcctacgtgccccgggctgatcaccccacacacatgatctcaatcctaagctgtgagcttatcttcatctgagagttactgagacttagagcccatcaccccagggttacacccagagtagctcacggggagccaggatgggagcctgatgtgtctgagccaaagcccgggcctctggctgctgtggggtggggaggggtcctggggtccaggctctgcagaaccaggcaaaggggaggcatagctgcagaggagcctagtcctatatcagggagactggcagcgaggcaaccaggagcaccccggggggaggttctccctgcagccccgacatgccccttggtagcccctttccctggagcctccctcagcctctgagaagagctgtgctgacccagggttaggaagtgggggtggcagtcacatcgccaggctggggtcggggttgcttacaccactgtcaggatgcccgtggccgtgaacgtcaggcctttcagttggacgatgggatccaccaggctctgctggctcgggctggtccggaattgggtgaaggtgaagtggatcttcaggaggtttgagtactgcatcagtgcaaactgcaaaggccagtggggagggcccagggctcagtgcctgttactattgtttttattttaattttttgtagagacagggtctctcaaactcctggcctcaagtgatcctcctgcctcagcctccaagtagctggaactacaggcgcacgtcacatgcctggctttgtttttttgttttgttttgtttttggtagagacggggtctcactatgttgcccaggctggtctcgaactcttggcctcaagcaatactcccaccccagcactttgagaggccaaggtgggagggttgtttgagccaggagttggagaccaggttgggcaatatggcaagaccccatctctacaataaaaatttttaaaaattagccaggcatggtggcatgcacctgtggtcccatctactcaggaggctgaggaaagaggatcacttgagcctgggagatcggggctgcagtgagctgtgattgcacccccacactgcagcctggatgacagaacaagaccctgtttaaaaaacaaaacagtggggttttttgcacatacataggcactagttatgggaaaat

SEQ ID NO: 612 - DNA, 2347 bp, Homo sapiens
ttgtacatttttgtttatgtctttcactcttcctttaatcttttatcattcctgggggaggattcttgggataatgggggtggaaaaaagatatcctctccggggactcgaaccggtgatgaggggtggcccggaagggagtggtgtccgcccagctgtttcgattgtatttgaagcgctttgaagaaatgggaacgcggcgctcaaaggcagaagaaggagggggcgatatgcgacccctccagtctctctccggcattagggatttgcgagcttgcagccccggctactccaccctgtctgccgaggataacgtttccttaggtcaaccaccgctgggacttgggaacacgaccctccgcccacaatgccctttattcctttccccgtcgtgggtgggtgggggattgtttaaagatattccaaccggatttggggccaagccttttctgcaaagggaaaaacgggtgagtaggaggagcgtgaggcgttgaaggagcgcccaaacgggctgcggggagatcttcatgcctaaaacgtggtcagtcaaggtgagtagacaggacacgtcaattttttgacgcaattagaatttttagcctccaggaaacgtaatttagagccatggtattggttcgtttcagctggctccttaaaatctattttaagtgtctaatttatgaccagaaaggaaaaaaaaaatggcagtgctcaccggttaaacgtctgtctcccgagacgagaactgggggaagcgttacttaacctttcattctgcttaagtcggagctaaggtccatttgctgtttttgtactttaaagatagttccctgaattattctggacttttttgaaggatcatagctaaatccacacccccatcccaacagaccacacaacactcacagctgggaggcaggaaaatgttaaaagggtgagagggggtgggaggggtgacagcagaatgctggaaggctggagaggactctaggaattacagccactttttctaaagaagagagctggattcttcggataactggcaaatggtccttcccccttgatagtcagaagatgaaaatattctaatacaaataaatgaatcaaggaggacagggtgatttgtgtttgggcaaatctccttgtgcaaatcttgaaacgtccaattcttgctattctaaactcgaagacagaatgaccaccaggtggcaatagattacaatttctgagaagaaacaacaggcctcccaagggagcagttcttcaaggaagaatgcaggctcatactcatccctgccaaatttcacaaagcagggccttttcaaatggtcagaagtgctctggaagtgacctgaaacacctagggtagtgcgtctctttggtgaaagactagggggtgcatggcatctgtttttttcccacctagctgtgtctcaaatgtagtgaacctgtgaatattaggcaagaaactgattcactgcaaaactggaaaccaaggaaatacagttctggattgtaattctgatggggagctttaaaggtatatctgtgtcttctgatctcaacaaaaaccaaggcgaaatcagtccttccccaaaagggtgggatgcaaaaaggaggatttcccacctgagatgctttagtgaaatacagaattcatgggagactgaggagagtaatattttattcatttcttttagtataaaagctcttggactacttaaaataacagatatttagtccccattttcaaacataggtatctgggactgttgtttgtgaaaaggttctggaaagttctgacttagttgtggagaatctaataacttaaacttctattccaggccaggtttcttcccctaatcctgaccagttactcaggggaggaaactggaactttaacagaaggggtgcatgattgattgccgttcccattaggccccaccttcaacattgggggtcacatttcagcacgagattagagaggacaaacatccaaactatatcaaatattgtgacaatagctgacgaatacactctcctataccaagaagggcaacggggactgtgtgcggtggttcacgcctgtaatccctgcactttaggaggccgaggcaggcagatctcttgaggccaggagttcgagactagcctgggcaacatggagaaacccaatctctattaaacatacaaaaattagccagttatggtgctgcacgacctggaatcccagctacttgggagtctgaggcacgagaatcgtgtgaagtcgggaggcagaggttgcagggagccaagatcgtgccactgcactccagcctgagcaacagagtgagactcttgcctc

SEQ ID NO: 613 - DNA, 2366 bp, Homo sapiens
acctcctggctcccgcccgcgctcgccgcacgcacgcgcactgcgcccagcatgagggtcgcggctctgatcagtggtgggaaggacagctgctataatatgatgcagtgcattgctgctgggcatcagatcgttgctttagcaaatctaagaccagctgaaaaccaagtggggtctgatgaactggatagctacatgtatcagacagtggggcaccatgccattgacttgtatgcagaagcaatggctcttcccctctatcgccgaaccataagaggaaggagcttggatacaagacaagtgtacaccaaatgtgaaggtgatgaggttgaagatctctatgagcttttgaaacttgttaagggcatcactagaatgaccttgcttgctgaatatgatgctctgaatctccaagattttcacatgcatttgaaagtgggcagccaggcgattgtttacaggactccaaatgaactgtgcactcacagcaagtttgataaacacacatttcctccttttatcagtgagattgcaaaatgtgaagtatgagtttccagttttactgattcccctcaacccttttcctgtttaaaaacttagacatactaattggatgctgatctgtccctgtttttcattctgcttgctggtagttgacggcttagtttagtacttacctaggcaagatttggcaaaccttcaaaaatgaactttccatgtattcaacttaaaggagattcatcccaaggaatgtaatgtgaacactaattaacattaatgactgctaatcactttgctttttatactcctttaggagcactgctattatccaatgtagttaagtaaaatgcttgtatatgaatcaacaatgttgcatccttttagcagctattgctcacaatcaagctttgcataaattaaagttgactaaaattgattttaatatgctgctcttcttcaatagtaaactaaaatatctagttaaatatcctgcatattaaaaatacattgcctgattttttttgtagtcatcctgtggtagatgaaaagcaatattgcaaatacattttctcacagttcatgacactttctcttagatttcttcaaaattgaacacaactcttcatagtcctatcagcactttgattctgttgtaagcattaattttgttagatcaatgaaaagcaatcagcctatgtttaatttttctgaatttgttcatttacttcctagaggatcttacagattctttagatgatatattctatttatataaagttggttcataggattgtacattcaacattcattaagaaaggttgtttattatgtttagtgaattacaggaccattataaaagctttctgtttatttacatgcattcaatgtacctgtgactagaactgccttgccttaggaggaaactaagcaaaacccataaattaataatttaagggagcaatactcaagtagcatttcagttaaaaagtaaagcctcagagtcagtactagccactttagcattgctttactttttgacttttattggctgaaaataacttgttaaactggagcttttgtaataaaatgaaatctacataccatctaaagccccttcccctccttttgatttatgagtaggttgacatattactggagaatttgtaacactttcacagttctgcactttgatttcagagaaggtgctaatctctctggaattttgagagtgacaaaatgagttgtatactgtttttccagggaatttgggttcctttattagaggccttagttttattatggtacctgtattaatgtggatttatccaatatgtgatatggtggtatgattagatatacattaatggaggatttttttttcattgtacatattctacttggtttgatcatattataattctcacagctaatgtccatgtttctacagaggttcagcaattcaggatattattttcaaattaccaaaatgagataatttaactcccttttacttttgcattatttttagtggaaaaaaattaaatggtagtattataagaagctttatgctgtgtatgctagtcttattgtatatatgtactgaaagtacctttgacactgtacttaattggatttaatttcaaagaattgtaacaggaattatgtgagagaatagaaaatatatggaacttaattaagtgctgtccatatgtaaaggtaagattcatgactattgtttgatgtaacttatttattttacatcctgatactattgtataatagcacaaaatgcatgtctatgaggaaaaacttgctttttctattttactttgagtttttatgtgtaataaaattatgcttaaaat

SEQ ID NO: 614 - DNA, 4437 bp, Homo sapiens
tatatatatatatattcaacacactttgggaggatcacttgagcccaggagtttgagatcagcctgggcaacacagggataccccatctctgaaaaagaaagagaaaaaaacaaagttattccaaaaatgaggacatcctcctggcatctgagtcctcaccccatgtgccacggtggccgcttctgccgtcctccacctccaggcgctcctagagctgtccctgggccagtggcttccaaagggggctgtagttgggccctgctagcctggaccgccgccctggccgctcttggtgaagggccccttgtccagcccgccttcctcctcctgggtttccgtgtgacagatgccccgtcctgtggggtggtgtctcacatttgctttgctgttaaaaaatggggtacaccatccccaggcctccaatcaccggccctgcccctgagtggggatggttttcagcagctccttgctctgggggccaagctccttttccaggaggcctttggagaactggggtcagagctgtggggaggtacagccctcctgtgcaggctgcctcccagctctccacctggcagtcttgaccccaccctggcgcctctgctcactggcacaggtggatctggggttcgaggtctcctcccacttcaccctgactttcttgtatgtatggggtcatcgcctcctctctgaagcccacgggtcctctcccagccccaggctgcacccagtgcagaacctttgcctcctggccagagggacccttctgcaggctgattccagcagtgcccgatggtgggacccacaccagaccaagccttcgcctcccagaggcctcctggccctcctgtcatggcctgtgagagccacacccctaggccccgtctcctagtctgcaggccgcaggaccagctgcccacggccccagggggcaggggctgtagatgagggtctcagaggtggtgggagcaccccccccacccacagttcctgggcatttctttagagctttaaaatggcacctggagaccaccaggcgcggcgatcagatcgggtggtgtggtgcctcctgggactgaccacttcttgctctccgaccaggcaggggcgagtggcctgggaggttcccggaccctcagggggcctgtgtctctgggcaccgcagctccgccccactccttcctccagaacattccccactcgggctagagaattgcgtctgctccaggaatgcatcctagcgtgtgtacgatcgcgcctgggtgtcctgttctcatgagcaagcggttttaaccagcagcataatttatactcatagacaggactgggggaagggctgttcctgaggctggggtgcagtgccttggaaagcacccctgaaacagtggaccttgtatttttagtgtcccctgcaaccatcctctgacttagagcaagaatttccgctgctgctacccccgagatgggcttcaccagatgttaataacgtgcttattttctctaagtgctattttggcaccagcgttagttgcaatttatattctgcagcatttgatgctgggaaaagaacccaccctaatggtccccaattggcagagctcggctgttaagcagcagaccatatgctgcctgctggaggagcgtggtcagcacttgtccccgtgcctgcgtgcgtgtgcctgcgtgcacgtgtgcctgcgggtacctgtgccctgtgtgtgcacatgtgcctgcatgcgtgtgcctgcgtgcacgtgtgcctgtgtgtacatgtgcctgcgtgtacctgtgccctgtgtgtgcacgtgtgccttcgtgtacctgtgccctgtgtgtgcatgcgtgtgtgagtcacgtcttccgtgtgtgtatgtgagggagagactgtggggttggaaggagggtggaggggaaagggtatgtatccctttgttctttaaaagggagagccccaacctctctggctgccccctcctgcctgtgctcccagctcaccccacacctagctgctatttattctcctgacccccttcccggccctgcagccccgtgtcccgcagcctccgccccgcctcctgctccacgtcaccaggcaacactcggctccaccaggcttccgaaggtggcccagagcaggcacttgagcctgatgacccagagcaaagctgcctttctgggccttgagtactcctttctgctatggaaggcttttcttgttttcaacggcccgtccagcccaggggggctgggtgagggccgcttccttctgcagcagagggggcgggctctatccttgccatctgctgcccccagaggccctgccaggacatgggcctgagcggtttcttctccaagaggccctcctgggacctgtctgtgcacagggcgggaagacacttgctgcttcgacccaggacggcagccaggacgggctgagctcctcttgcgctgcaaacacacaagggttgcctgccagctcagcagcgccctccctcaaccacaccctgggtccggacccagagccacaggccgttggacccaggggaccggggctgggctcaggcgtgggcctggagggcttgtggaggggccagacctagagccgtagggctccaacagctgagggctgggctcctgccggccaatgaagctccagaccagtgctccggccttggcggtgccagcagtgctcctgcagggatggagggtgctggaggcctggatgcggggaccttgatcccccagcaggcagcgctgtggcagcctcccacctcctcttcccctgttatctgctccttttaggatctgaaaattacagggcctttttttttttttgagagggagtcttgctttgtcccccaggctggagtgcagtggcacgatctcggctcactcactacaacctccacctcacaggttcaagcgattctcccacatcagcctcctgagtggctgggattacaggcacctgccatcatgaccggctaatttttgtatttttgcagagatggggttgcaccatgttggtcaggctggccttgaactcctgacctcaagtgattctcacgcctgtaatcccagcactttaggaggctgaggcaggcggatcatgaggtcaggagatcgagaccgtcctggctaacacagtgaaaccccgtctctactaaaaatacaaaaaagtagtcgggtgtggtggcgggcgcctgtggtcccagccactcaggaggctgaggcaggagaatggcatgaacctgggaggcggagcttgcagtgagctgagatcgcgccactgcattccagcctgggcgacagagtgagactccgtctcaaaaaaaaaaaaaaacaaaagaagtttctagatctactgggcatgatgaacacaaaccccacagacactgaggaacccagtggtggcagtgactcgggctcctctgctctctaaagctcctttgagaaacatgggaggggccgggcgtggtggttcacgcctgtcatcccagcactttgggaggctggggcaggaggatcgcttgagcccaggagttcgagaccagcctgggcaacatagtgaggctgtatcgctacataaaataaaaaaaaagttggctgggcattgtacatgtgcctgtggtcccagctactcaggaggctgaggcaggaggattgcttgagcccaggagttggatgttgcagtgagccaagatcgcaccattgccctccactctgggccacggagcaataccctgtctcagaaaacaaacaacaaaaagcagaaacgctgaaggtgtcggtttacgggaaaaccgcctgtcagaacacttggctactcctaccccagatcagtggacctgggaatgagggttggtcccgggaggcttttctccaagctgttgccaccagacccgccatgggaaccctggccacagaagcctcccggggagtgagccagagcctggaccgctgtgctgatgtgtctggggtggagggagggtggggagtgtgcaagggtgtgtgtgtgcccggggggtgttcatgggcaagcatgtgcgtgcctgtgtgtgtgcgtgcccctcccctgcagccgtcggtggtatctccctccagccccttcgccaccttctgagcattgtctgtccacgtgagactgcccagagacagcagagctccacgtggttttaaggggagacctttccctagacctgggggtctcgccgtatctcatgaccaggtgctaaatgacccgacatgcatcacctgcctttcgatgaccaacctccctgtccccgtcccgctgacctgcccccgtggcgtctcacggtgatgcctgctcctgacattggtgttcactgtagcaaactacattctggatgggaattttcatgtacatgtgtggcatgtggaaaatttcgaataaaatggacttgatttagaaagcc

SEQ ID NO: 615 - DNA, 4494 bp, Homo sapiens
aatatacatgaatttgcttctgcctttgccacccctgagacagcaagaccaacaaccccttctcttcctcttcagcctactcagtgtgaagatgataaaatgaaacagttggtgatgtttcagagaacccaactcaaactgacttgaacaagagaaatcagtgtttactgcagagaacacagaagccagcaagcagcagggaagggaggcgaaccaatgcagcagcccaccgggaccgaggaggacacacgcagagcaagtcacaggaagcgcagctgaaaacaaatggacgcttatcccaaatgcacaggacacttaccaagaactgatggtccgtcaaagtaaagctcaacagctttggctggcaggacagtcaaacttttggacgacagaaagtaacagtgggaaatgggacaacatctgccagcaacgcgagaggccaagaccatggctgctacaggaggggtcagcgtcacagtacacgcatggcggcggttgcacatgcatgcctggggaatgtgagtgttcagacatgccaggagtccagcctcaccaggaaacaggcacacggggacagaggcgcaaacactgaaaactctcgctgaatccactcggctgagcggtggtcacgagagcacggccctgcgctccccacaaaactgcacctgggccccagggcgagacaggcgtggaaggtgcaggggtgtgtgtgggggcaggggctcctggctcagagccgtatccaggaaccccccttcaggctggagccctgccctgagccccctgtggagagactgtggagagccccctgtggagagggtgactgtgggagagcagcatcaggcctagtctcggctgtgaagtaccccccacctccacgcaggatcccggggattctgtcaaggtgggggccgcctgctcagcccaggctccctgaacgtgtggctagctgagtttgcggaagaaaccaggagagtgccaacaccaggcttgcaagcaagaggctccctgactgcctgatcctggagcgcaccccatcctccctgtgttccctgggcctcagctgttccccagtgaccttggagacaccctgccccaccctggctccacaggagccctgcccatcaccgcctcagctctgagtctcccctggggacacaaccttcctcctggtgcagaggcgcaggatgctgcccctaaggcccatcttcctctgcagcatgttttgatgtcagctcattcacaggaaagaaacaatcacatctcagtgcccagaatggggaccaataggagaggtcactgggaataaagcccacacgcaccccagggtccatgggctccccagaaatgcaggtggcctccgccagagccaacaagcctaagttgctgatcagcccctccctgcttccctgtgtggaagaggaaacagaggcccagactagtagggctctgccgtggtggccggctgcgtccccagacctctggtcccagggctggctgggagtgcccctccctgtgctcacttcctgctctcctgggaaatggctcagggatggggcgtgtggggacagatgctggcatagctcacaaaatgcttgcacaagggacactccatggcaggtccctgcaggagagcaaagtcacaacattcagagattccctgcactctgaggcccgcagagcctggccgaccaagcgaggctgggaggatgttgcctgctggtcagggcagccctctgatcagggcggccgagtgaggctgggaggatggtgcccgctggtcagggcagctgagcgtggctgggaggatggtgcctgttggtcagggcagccctctggtcagggtggccaagcgaggcagggagggaggtacccaccggtcagggcagccgaacaaagctggaaagatggtgcctgctggtcagggcggctgaatgaggctgggaggatggtgtctgctggtcagggcagctcaggaggtgctgcccaggaggtgctgtccaggcagagcctagggctggtgtgggtgtgccatgctcctgagaagtttctgggttgtggctttaatgttctcctgcagtgagaacgctgacacttggccaaagggtcctcacctctcccctagtacacttctgagatgccaggaaggttctgaacatcagattgattcctgggactcccctccagggtggccttactggagtcaggagcccctgccccactaggatggctctgcagtggcctgaggacagtgagcactgactggtcactggtgcaaagttgcccactgtgatggttttgaccgttgatgggaaccaagtgaaagccctgcagctatttctaggcatttcagagggtgcttccctgcatgtactctgctgcagaccatcctccctgggccaggagcccgctacacagtaggagattctttttcttctcttttgagcacttttattctctttttcttaatctctgctcctcctttgaactgagaaatgtgcaaatcttttttgttagttttgaggttgcttcttatgcatatttcatctggaactttcccctttgggggtgatctgttctatcagcctgcccgctgctagagaggccgaggtggtccggccagccgtgcgctgctgctggtgtctctgtgggcatgacctggtgagatatcattctgcatctgggggtccatcctatcagccctgtgttctagattccccagtgactgacatttagccagtctcctctgtcactctccagtgacatgtacacactgttggcacgaactgcagatgtcacgttctgtggctgagagcctcagtgtgcatctgtagtaggaggatgtcagtgaggactgtcctgtcgctgctgagctggcaccgactgtgcctggtctacactccaggtctgccaaacgacccagcaaggtccttcacaactcttctgatccaggatcacacatcacttgtgctttgatgcctgcttctgaacaattttacctcctgagatgtccatttttgggagtgtgagccctcctctcctggtgacagctggctgaggccgtccagcctcaggacacacagggaacggctgcataaggagatctggggcagggggcccaccaggatgttctgccctgtggggggcaacaccggctgtggtctgccggcggcatccagggacagtctgtctaggtgaggctgaggccgcccccactcgctccctcacccccatgctgacagcagtgagctgaccacagactgggggagccccacagggagactggcctccccagcacatgccccgcagtgccagacgcggtcatcacagaggcaggtacacggcaccacggacgtgccacgtacccgccatcgggaccaaggaccactgagaaaccatgaaggccatgcagcgactgtggtggcaggaccgtcaggaggccataggtgccacggctcccctctggtggttcacctgcccacctgtagctggggtggcccctccagtgcgctccccagagcagaacaccccccaggcaacacgtctgatgaaggccaacagcgtcagtcctctggtgtttggtgacatcaaagctgtgccgaaaggccttccctcactgctaacacttgaagggcttctgtccggtgtggaccctctgatggcgaatgtggtctgtcttatgcttaaagatccacctccattaactgcactcttggggtttcttcctctgaaaaggaatgaacacgggaaccccctcaaaggcatttttaaatgaagcgtggaaggcatcaaagatgtgctcttcttcaggactcaggcttctccatcattctctgttccttggaagcgtgagggctaaggagctgctgacttctctctcttggccccacttcaagaaaggcttgcttcccacacacctctccacgctcccagtgcgggactgacactctgcaccgggaggccaagggccaccatcgtcttgctgggagaaggtgtgacgtttcttggtcataggagggagtgtgatctgacaccagaggacttaatataacattgcagtgttaacatcttcactggcagattcatggactttccccctcctgaatgcatttcaacaccttgaaatgaacgatgcctcatgtctctgcagggtggacatagctctaactctctgaagctgattatatgtcaagttctgtgtgaaatgagagaccatggggattcattattgctggagttgacggtattgcagttttataaccatctaataaattagcatttaatactgagagatttcatcttaaactcagaggattgctttgttttaaagaagatttttgcaaggagaagcaatggaaaccattcagaaaatgtgggagataaaaatcctattcaagaaaacggatcttggatctttgcattcacttgatttgtcagaatattattctgtgctaaaaaatagaagggattaaatgttaaaaatcactgaggcac

SEQ ID NO: 616 - DNA, 3555 bp, Homo sapiens
aaactgtgctcctccggggccctccgcctgctcccagccatggtggcctggcgctcggcgttccttgtctgcctcgctttctccttggccaccctggtccagcgaggatctggggactttgatgattttaacctggaggatgcagtgaaagaaacttcctcagtaaagcagccatgggaccacaccaccaccaccacaaccaataggccaggaaccaccagagctccggcaaaacctccagggcccactgaaggtagtggattggacttggctgatgctttggatgatcaagatgatggccgcaggaaaccgggtataggaggaagagagagatggaaccatgtaaccaccacgaccaagaggccagtaaccaccagagctccagcaaatactttaggaaatgattttgacttggctgatgccctggatgatcaaaatgatcgagatgatggccgcaggaaaccaattgctggaggaggaggtttttcagacaaggatcttgaagacatagtagggggtggagaatacaaacctgacaagggtaaaggtgatggccggtacggcagcaatgacgaccctggatctggcatggtggcagagcctggcaccattgccggggtggccagcgccctggccatggccctcatcggtgccgtctccagctacatctcctaccagcagaagaagttctgcttcagcattcagcatgcagcagcaggtcaagagggtctcaacgcagactacgtgaagggagagaacctggaagccgtggtatgtgaggaaccccaagtgaaatactccacgttgcacacgcagtctgcagagccgccgccgccgcccgaaccagcccggatctgagggccctgtccagctgcaggcatgcacaatggtgccaccgcttgtcacccggctccccccaccccttcatttggacccgcagctgctgtgctgctctgtgccatcggctccttgttggtctgagtttcccggatgagctctgggtgtttgtgagtttggtttctctgccctgccccaagcgtgctgagacttggtgccgaaattcaagagccagctctgatagaaagccagcaccagcctcgggagctgctgagccaccaactcccaaagccagcctgcctccagctttactgagcacaggatgcgggggccaagatgatgctgaggcctgatgacatttatgcttaggggacaagagtttgaactcaagggactgtgacccctgcacactggagtggctcattgtggcaggtttctgccaatagacagcccctgacagtggcctcaaggagctgcaggtggggggctcagcctgcacccacttggagcccctgcaaggagcgaaccggtcagcaccaagtaacaccacacacacgcagcacccaggatgatggtttcacttcagtcttccccatcccaggttttatgttgctgggcttccggagagccggtccaagcggaggctttcagtgatttaagtacaaacatgcatctcgtgatagtcctgccttgagagcttaggaatcttccggataagtatgaagcaattcgtaggcctgtttcccatctgattccatagggggctgggtgtggccttcgggttgacatgagaaaggtctttagcaatcatttctgcaccggagatgagttttatcctgtgttggggagaggtgctcaccctccaccctgtgtccctgttttggtagcaagagtgaccgatgtcaagaacgagcatcaaagccagaatcctgcttgtttgcttaaaaatgtaattgggggcggcgggggaggagaggggaaagagacattcgcttggtttagtgaaacgcaggtgactttgtagctctgtggtcagcctacttgtctgctctgagggagagtgcgtggggagccatgctcaccgtggcaaacacaggaaccccatgactcgcccctcacctggcgtggagctgcctggtttgggctggagcagagctggtttcctggaatgttcctttggcccacatatggttctgtcccggtgagctctgttgtcagaggctcacgggacagaaccacatgctagggtctagggcccctgtctactgatagtcagtttgctgtgtcagaaagcacttctgaaagcagatatgagtcaccagacaggcaggatcttacaaaactcacgggcctctttggtctgcatgatggccccatgcgtttcataggctgtccactgagcgggattgtctgctgagtgggatgagccaactccagtttcttaaggaaaccactggaatctgcagcccccacatgcatctgtctaacgcatgcctcgtgttcgttttgcaaacatgcctgtggtggagggtggtcagttgtagccctgtgcgtctcaaggctgccttgtgaggccattcccagtgcgtgcccttgagctccttaccaccccttttcctgctcggccctttaatccctgacagacctggactgtgtggctgaagggggacctgcagcactgcagaaatgcctctgcgtggtgccatgaaggaaagaaaccttggcctggtctcgagaagcttcccatgcttcaggaagttagtaagggtggggtggcttgcaggattggcctgtttccagggcctcccacactcattggccagattgtgaactttgtcaggcttgtccctccctgataccaagtatgtcgagaaccgatggccccaccctctggctggtgctgggccggaggtggctatggaggattttggcatgcgtggcctgtcgccacctggacagcgtgacctcaggggttgtccactttacctttatggtgaggcctgtcggatggctaagtccttgaaaccctagagctgtgacgtagaatatgtgctgtctgtgagaccgtgttcccaggagcactgactgcagttgagagagacccattttgctctcccttaccgccccccgccccgggtgctttctgcacaaagcctagagcctggcactcaagcccaccggtggcagctcctagtgactggacatgcctggaagacccctcagccttctgtttgcagaacgttcatttcaggagcttctccttcccacagacatcttacacttgctcgacactgccacctgcagaagcctggcgggctctggtcaccatgtgtctatctgaaggttgcactggccagcatgggcctgtcccaagcgagaggggagacacagtggactgaaaggactggttgaaagtggccaatctctgtcagcttaatttggcagagaaaatttgtaacaactctgagcacatgctgggtgaagtcacagctcaaggaaagataaagctgggcggaaggaggtgtgcgtggcttctggggtgggacccagaggggaggctctgggacaggggctggggttcagtgccagggccctgaggaagaaatggggactgatctcaaaattccagaattccctgtacatctgttcacgtgcttgtgtccaggtgtgacttgtaaactgtctagtgtttgcattaaataaaatggcaccgagcag

SEQ ID NO: 617 - DNA, 3173 bp, Homo sapiens
tatctcaatatacttgccctctgtcaggcaggaagtcgtcttccctgatttcatggccacgtggtgcctcagacccctccagcctggcccatctgtacctgagtgggaggctctcaccctcacttggcccctttgtggggacctgtggcctgcactctggctggccagggtcctggtgccggcagggcttgcaagctgccctagagggtctcacacatgtggcctgcgtggttggccttgggacaggccacagagcaacaggtccccaactcgccccgcgcgatgaggcctcagcccaggctccgcactaaatagaggctgccccgggttccccttcctctaacggtggaaatacttcccgctggccagcgcgaccttagcatgccccggtgtgcgaaggctaaaagccagccccacttccctgtgctcgcccagtacatcctgaatgagtcggaagcccgcgtgaaggccgagctgtggatgagggagaacgccgagtacctgcgggaacagagggaaaaagaagcaagaatagcgaaagagaaggagctcggtatctacaaggaacacaagcccaagaagtcttgcaagcgacgggagccaattcaggccagtaccgccagggaggccatcgagaagatgctggagcagaagaagatctccagcaagatcaattatagcgtgctccggggcctcagcagcgccggcgggggcagtccgcacagggaggatgcacagcccgagcatagcgccagtgccaggaagctgtcacgaaggaggacgccggccagcagaagtggggctgaccctgtgaccagtgtggggaaaaggttgaggcctctggtgtctacgcagccagcaaagaaggtggccacgggagaggtgtgttgtcccacgcagccagggcagggagaccttgggaggcagcccacttcttcctgggcccagatgcttggtctgtgaccacagggagagcaggcctgacagaggcgcctgcccctgctgccccatacttgcctggcatggccagagaatcgaggcccgagggtgggagctcccggttgctggagcaggagcgggcaggaagtggggaccgttgtgtgcctgctgctcagcgctcgggccaaggctgagcagccttgctgtgggcctggtgcctgcagggagcctgtatgtaggaagcaggcactgccaggtcacagggcccagccctccagggctcaggggtctttcacctggactgtcacttgttggggactggtctggcccaggaaacgagggtgaaggtgctggcaggtggcgggggctggggcaggggccggagcagagcctctgtctgtgttctgggggtcagggcaggccaagcccccgggggctgaggccacagtgtcctcggccgaggcctatggtctggaaaggtgttctgcatgctccccgagcactggggtggggcccagtaggatacaggagcaggggctggcagaggcctgagggtgggatcttgatgctgacacagctcatggcacagcccccaggaggccagaaggggccagtgggcctgggagccctggccaaccccgggagccactggtgtggcgggagtggctgagcatcctgggccagccctggtgggtctgaggggtctgttgagatacacagggctcccagctctgtgtgtgtcagagccccacttcgttccaggctttgctcccaagctctcccaccctcggatctgagcctgccaggccccaggcggtgctggtggagagcgggcccgtgtcataccacgccgacgaggaggctgacgaggaggagcctgacgaggaggacggggagccctgcgtcagtgccctgcagatgatgggcagcaacgactatggctgtgatggcgatgaggacgacggctactgaagtgtggcctccaggcaggtgatgtcctggcagggggcctcgcgggtctcctcagcatcagacgggcttccaggaccgcagcaggcaggccccagcgccgagactcctggtgacaggtggcacctgtcccacagccctcgtcccatgtggaacttaccattgggattgtgtttctattcagcaagggaaaccggaccaagcgtctgcatgtgtgtgatcagatgtgggccgggtgtgtgcagggctgggtcccgctgcctgccgtcgactcatccaaggaccctccaaggctggcagtgtggtgttgctactattaaggaaacaggcttggggcagccccactgctggtccaagtgtgtggagggctgagtgtgctggccctgtgactcaggaccagctctggagtctccagcccaccctccgcaccgtcccctcctgagcagcactcggcgccagcagcctctgccagagtggaagccagagccctgcaggtgtccggcgcagccgtgggagctgaggatctggcacttgagaggcagcagctccttgaaggtcctctgcctccagctgtggccctgcatccagatacctgcctcgtccgaggcagacacccccacccctgcctcctccagacccccctccccgctgcctgcaccgcctggagcagcatgggggtcagacccctgctccagggccacttgagttgtgggcccaggagccctgcggctgccggcaggtgaactgagtgcccgacagctgagaccggcgcccacccgtcctgagcatagctctgtaggcagtgcgggcatagcctgcatagtgtcctggcgctgggagttgcccgtggacagagccagagggcagtggcgctccctgtcagagctggatcaggccccccatcgaggagggagggcagacggaggcccgagagcctccccaggcctcttcgtgggaaggccccagtaccactcgtaggaggtctcagctctggcatggctgccccggatgtggccgagggggcttcaccctgtgtccttaggagggggtggccttgaggcagagccgtgcctcactgacccccaggggcctcatcctccccatggaatgggctgtatgtcctgccccaacttggcccgcagcaggccagacccccctacccccgcccagagctcagtagccagcctggttcctgccagggcttctcgagggcttgggggaagaatagatttagtaaagcaggaagatctgttgttacttaacag

SEQ ID NO: 618 - DNA, 3473 bp, Homo sapiens
gttggctgggcgtggtggtgcacgcctgtagtcccagctacttgggaggctgaggcaggagagtcgcttgaacccaggaggcggaggctgcggttagccaagatcgggccactgcactccagcctgggcaacagagagagactgtgtcagaaaaaatgaaaaaccagcaccagcatgaagagcctgtgtattgcatggggtactttgctgcccttgggcagaatctgcatccctcccagccagcaggcactgcggactgtctcctccctctccctccaggctcctgttttcccaccgtccccactcctgctgcaccagtgcatctgccctcctttccaagtgccagcctgtggccacctcagagcttgcaccagctgttcccactgcctggaacttgctcatcctgcacttggcttctctcggctttagctggagtgtcaccctgagcgtcccctcccctccatcctgtccccagggacacacactccaagagagcagttgccgagtgggccttcccgcctcttccatagagccagacagttggcgactgtccttactgcaagccctggttcacactggctcccctgggagggaggtggtttaggcccacgtgccctgtgttcctgctcagaatgggcattagaaatgctgcaatatcctgtgccactgcagtggaagcatctttaggaaacggcttatatcttaagacaaacttcagatgcgtggggccagaacgccgtgtccatctacatctttgctgagggatcgggtagcctggagtttgccctctgctgtgttggcttgaagctcataggagacttaagacgggctctcgagcaaccaacgttctgtcctttgctgtagactgtgaagcatcctgtgtgtgtgaagcacccgccatcagtcaagtgtgcccagtgctttctctcagaactcatcaaaaatgtcagcaatgggcagtgtccgcccagtagctggacagcatagccacctgcgtgctggagcccccgtccttcccaggccctgggcctgctttgccaataccagcatggcaggggcctccccaggcaactggctgcagctgagtgtgacccatgggagacagtgcagggcaggaagaaggggagaccagcgtctctccctcactctgcctcatggggtttccacagcagctgcttctctggggccccagctcctagaatatgaattctcattcctaccaggctggtccagcccacagcactggaaccctcatccacaccctctgtcctgcccgctgaagggtttggagtttcctgctcttgtctgtctctgggttgccccacaggcccctgttggaagatttagctcttgccatacctttggaactagttcctctgtgaattctctgcattgatcctgctggaatgagctctttcctgactgatacaggatggattttattttttacttatttatttagttttttgagacagtcttactgtggtgcccaggctggattaccgtggcacagtctcggctcactgaaacctctacctcctgggttcaagcaactctcgtgcctaagaagctgggactacaggcacacgccgccatgcctggctaatttttgtatttttagtagagatggagtttcaccatgttggcgaggctggtctcgaactcctgacctcaggtgatccgcctgcctcagcctcccaaggtgctgggattacaggcatgagccaccacacctggcctaggatggattttaaagatgggcccaaacatgcagggtttgacatgaggatgtcgagaggccgttccttagtaggcagtagcagacctgctgagtgaaagggccacacttttagcaaataaacaatcccctgcttctccaatacctgctttctccctagtcctccccaaaagcgtgcatctgtgttcaccagcaggtctgccctgtgccaccaggagagggcagcagtcacccagtgtaccctgctgctgccctgtgaatcctaggatgggaccagctgtggagaagcggcctgctgacagccacagcctgcagcatgggccgccctcacagttctgcctgggctcacttaaaagcaccttttgttttcctcctctctgtttgatccaaacacagagctctctgtcatggtcacgtggcagctctcacggaatccttgtttccttccctagactacacctaaccctaacctctcaacacctcttgttgaaggccctcccatccaggttgccctaccaagtgaaattttttttagagacagggtctcttgcccaggctgtcctcgaactcctgggctcaagcagtcctcccgtgtcggcctctagattagctgggactattcggcacacaccaccacacccaacgaagtgagtattttatatgccagctggctggtattacaccattccatcccaaatctcccctccaaacttggtgaaaatcatctgaccatttttacagattagaacgaaagcaaacaagctctcactctgtctgcccccagcacgaggctgtccacacggagcttttggacgagctgtacgaggcgctggcagagaccctgatggccaaggagtccacccagggccactggagctatttgctggtatgagaagggcaccctcctccccctcacagcccagatacccttcctgcacagacaaagtgaaaacgtgggtgtgggttcaaatcctgactcacccattctgcagtcttagacatgaggtccgttaaccttctttagcctcagtttccctgtctgtaaatcaagcacttcaacaacaacagcatgtctcgtggggttgttgggcatttgtccaataggtgacacacactacctgcttcacaaggacctggtgcccagtcctcaaagaatatttgacagggctggacatggtggctcacgcctgtggtcccagcactttgggaggccgaggcgggtggatctgaggtcaagagttcgagaccagcctggccgatatggtgagaccctatctctactaaaaatacaaaaattaggccaggcgtggtggctcatgcctgtaatcccagcattttgggaggctgaggcggggggatcacctgaggtcaggagtttgagaccagcttggccaacatggtgaaactccatctttactaaaaatacaaaaattagcggggtgtggtggtgggcgcctgtaatcccagctactcaggaggctgaggcaggagaatctcttgaacccaggaggtggaggttgtagtgagccgagatcacgctattgcaccacggccttggcaatgagagcgaatctttgtctcaaaaaaaagtacaaaaattagccggacatggtggcacacacctgtagtcacggctacttgggcagctgaggcaggagaattgcttgaacccaggaggcagaggttgcagtgagccaagatcatgccactgactccagcctgggtgacagagctc

SEQ ID NO: 619 - DNA, 3571 bp, Homo sapiens
atacccgtctcctcatccctgggaaggagatggttctggagggggataggggaaaagggggaagggggaagggcaaggaggaggaggaggggagatgaggtcagggtgtgagtctctgagccccttcccctgcccaagggagcagcagctcagcccagctctggaggggccatcatgggactgtgcccacggggagggcaccggtctggagacagtgggttcacagtgggagtgggatgggggtgggagcgctggggacagaggacttgacttcctgaggttggatgttgtaatctcggttcacaaacttttggcctcagtccctcctgctgctcctggtatttctctgtcctttcactccccaacacacacagcccccgccccaacacatacacacacggcttctttctgtctgggagtccctggacaagtcacatgggattctgcgctgggaggaacagggtaaggcgtgaacgtggagggcagtttccctttcaggtcccggctctcttggctttcccataagcagctgccttgggactctcctggagacctgatgcccacagccaagctgaccacaggagccggtgctggggactgagggaaacttagagttcagagagggggtgtgatttgcctgaggtcacacagcaagttagagacccagctccacgactcattgtcttggctttggccctcgtcatcctgcccacccagcggggcttcccaacccaccacacagccgtggacgggaaggtggcagtgcaagagtgtgggcctcctgcagtctcctgggtccccgaggagggagagaagttggaccaggaagacgaggaccaggtgaaggatcggggccaatggaccaacaagatggagtttgtgctgtcagtggccggggagatcattgggctgggcaatgtctggaggtttccctatctctgctacaaaaacggaggtggagccttcttcatcccctacttcatcttcttctttgtctgcggcatcccggtgttcttcctggaggtggcgttgggccaatacaccagccaagggagtgtcacagcctggaggaagatctgccccctcttccagggcattggtctggcatctgtggtcatcgagtcatatttgaatgtctactacatcatcatccttgcctgggctctcttctacctgttcagctccttcacctctgagctgccctggacgacctgcaacaacttttggaacacagagcattgcacggactttctgaaccactcaggagccggcacagtgaccccatttgagaattttacctcacctgtcatggaattctgggagagacgagttctgggcatcacctcgggcatccatgacctgggctccctgcgctgggagctggccctgtgcctcctgctcgcctgggtcatctgctatttctgcatctggaagggggtcaagtccacaggcaaggtggtttatttcacagccacgtttccgtacctgatgcttgtcattttgctgatcagaggtgtcacccttcccggagcctaccagggcatcatctactacttgaagccagatttgttccgcctcaaggaccctcaggtgtggatggatgcgggcacccagatcttcttctcctttgccatctgccaggggtgcctgacagccctgggcagctacaacaagtatcacaacaactgctacaaggactgcatcgccctctgcttcctgaacagtgccaccagctttgtggctgggtttgttgtcttctccatcctgggcttcatgtcccaagagcaaggggtgcccatttctgaagtggccgagtcaggtcctgggctggccttcatcgccttccccaaggctgtgactatgatgcccttatcccagctgtggtcctgcctgttctttatcatgcccatattcctagggctggacagccagtttgtctgtgtggagtgcctggtgacagcctccatagacatgttccccaggcagctccggaagagcgggcggcgcgagctcctcatcctcaccatcgccgtcatgtgctacctgatagggcttttcctggtcaccgagggcgggatgtacatcttccagctgtttgactactatgcttccagtggcatatgcctgctgttcctgtcattgtttgaagtggtctgcataagctgggtgtatggggcggaccgtttctatgacaacattgaggacatgattggctaccggccatggcccctggtgaagatctcctggctcttcctgacccctggactttgcctggccactttcctcttctccttgagcaagtacacccccctcaagtacaacaacgtctatgtgtacccgccctggggatactccattggctggttcctggctctgtcctccatggtctgtgtcccactcttcgtcgtcatcaccctcctgaagactcggggtcctttcaggaagcgtctgcgtcagctcatcacccctgactccagtctgccacagcccaagcaacatccctgcttggatggcagtgctggccggaactttgggccctccccaacaagggaaggactgatagccggggagaaggagacccatttgtagggtgtggccagaggccaggcggctcctaagccgggaacctaggtcagggccaccctccattctcagcggacagcctctgcctctgtctcctgccacaatcctgctgggaacctctggagagccacaggcacccccagctggaggccagactcctctcttgtgctagctggagcagctccttcccctttgttgataacacctccactgggacgtgccatgttgggacgccactccctgtgggaaggcaccatcgtttttataaaggggggtctttttggaggccgccatctgattgcaacacctcgagttatgaggattccactgtggggatgcctcttgttagagcgtactgcatttgtacacggggagaggagctataattggaacgcacactgccgtccaatgtggagagcctgatgggacaataccctgttggaagtgacaactgaacacactgtgttggatcggaggttccgttaggggatccttccttaggcttaacgacagaggcaagcctttgcatgccgtcagtctggagtttcctccgagtctctcatggcatctccagctcctgccctagttccgcactgttcttgcagtgtttcatcaactcctggagcattggaatggaaggggcttgggagatgattcctagacttcacaaacactcggcatgcctccctgcactgtccgttcctctgcccaaggccgatattgctaactgatcacagattctttcccacctcacaatccttccgaatgtgctccaggcagcaccatttgccatcctgcttctaacgcaaacccctgacttcatggatgaggaacctggagaccaaagagacaaagggactttttcaagttcacatggggacccccttcttgggggccagagatatgactaaaaccttatctccttgtgctcaggccagtgtcttcccattaaccccctgccttagttaacaagtgtgtatggattgcc

SEQ ID NO: 620 - DNA, 3455 bp, Homo sapiens
aaaagacttcagtggcagacaaaggaggagtaataagatcgctagggggcccgtgcccagcccacccacgcacaatctcagtcctcgcaatacccacaaggtaggtgctaggatcacaccctttacggacgcggcacctgcgacagggatgcgcgaggagtcagggggcctcgccggatcgaacctaagctggggaagagtatttcttgtatttttaggagaaattctcagcctcggggaagagtatttcttgatgagggaagagcgcggggaagacactcacgcacgcacaaacatgtgggcggccatggtgtgcccagcgccgtgctggcttctgggaacccccagtggacaagacggacaaggtaccggctctcatgggaagtgggagccagtcacaagcgtacctaatttcggagagtgacaagtactctgaaaaagaaagaaggtagggctggtgactggccaatttaagcgggcaggagtctgctgggggacggagaccagcctcaggtctgggttggggacagaagctgtgcctaagtgtggtgcaggatgcagttgcaaaggagcgcttccgatcgcacttgatgctcgccacgtccctgcaaagtgctcccgccccctttctgcaaatgaggaaacgggacgcgcggctcgccgggccagcccgcgtgcctgcgcagtcccctccccgagaaccatccccttgccccgcccagcgtcaggggtgcgcggccgccgagagaccccggaggcgtagccggctgcggaggcgaagaggtggcagcgcgagctgggaccagcgtctcggaggcgccgcagaattcacagatggattcagtggaaaagacaacaaatagaagtgaacaaaaatccagaaagtttttaaaaagcctcatccggaaacagccccaggaactgctcctggttatcgggactggcgtcagcgcagcagtggcccccggaatccctgccctttgctcgtggagaagctgcatcgaggccgtcatcgaggctgcagagcagctggaggtgctgcaccccggagacgtcgccgagttccggaggaaagtgacaaaggaccgggacctgttggttgtcgcccatgatctgatccggaagatgtcacctcgcacaggcgatgccaagcccagcttcttccaggactgcctgatggaggtgtttgacgacctggagcagcacatccggagtcctctggtgctgcagtcgatcctcagcctgatggacagaggcgccatggtcctgaccaccaactatgacaacctgctggaggcctttggccggcggcagaacaagcccatggagtccctggacttgaaggacaagaccaaggtccttgaatgggcaagagggcacatgaagtacggcgtcctccacattcacggcctctacacggacccctgcggggtggtgctggacccatcggggtataaagacgtcactcaagacgcagaagtcatggaagtcctccagaacttataccgcaccaagtcctttctgtttgtgggctgtggggagacccttcatgatcagatattccaggccctctttctttactccgtgccgaataaggtggatttggagcactacatgcttgtgctgaaggagaatgaagaccatttctttaagcatcaggcagatatgcttctgcacggaatcaaagttgtatcctacggggactgttttgaccactttccaggatatgtgcaagaccttgccactcagatctgcaaacagcaaagcccagatgctgatcgcgtggacagcaccacattattgggtaatgcatgccaggactgtgcaaagaggaagttagaagagaatggaattgaagtttcaaaaaaacgcacacaatcagatactgatgatgctggagggtcttgaaatctttacagtaaaacctgcaacttgaaaactagccttctgtaaccacagtgcccaaacgaagaggaatgtatggagaactccacgtggatctctgattgcgaaaccgtcacatacaccaagagagccacatgggcatgtggccctgaaggctgggtgagagggctcccctgtgtgttgaactatgcaggagggtgacgcggacacatttcaggtggactttgcaaggactgatggatagctacctcagggaccagaatccgtgggaagggatggacctggtgttcccgttcccatctgacaggctctcttttgtcaaggtggtatttttcgtaataaaaggggaagagtaaagactgtccaagcaacagtagctgccaaagagaaaatacgaaatagacacttttttttttgagtcagagtctcactctgtcgcccaggacagagtgcagtggtacgatctcaagctcactgcagccgccaccgcctgggctcgggtgattctcctgcctcagcctcccgagtagctgggattacaggcgtccaccaccatgcccagctaatttttttatttttagtggagttggagtttcaccatgttggccaggatggtctcgaactcttgacctcaggtgatccacccgccttggcctcccaaagtgctaggattacaggcatgagccactgcgcccagcaaaataaacacattttataatttgtatgtggaaacatgttactatagaaagcattttaaaggtacgttttaaaggtccactgttaaatagtaaagaatgaatccgctagcgaaaatgtttttagggagaacagctggatcaaaagggcttctttggaattaggttgttttagtaacttctgttccaaagaaacacaggtctgatattgctaagaactgaaatcggaggagccagaggcccttttcagtccaggccaacattgtgcacggccactgtgggactgacaaccgggatagctcaagttcgagagaccaggtttcaaacattgtaagttccaggctttgcaagtctttattctctggggtaatatccagtctttctgttattgtctcttaaaattctcttccatggcccacattaagggagtttgcagagagtgagggaggcaaaacttgaaaagggcctgcaacactttaaaccttctcaggtccacccacacgaaacggctgtgctgagtgtgctgccggtgcccggggagcttctctgactgtgacccggcagaggcttctgtggcggtgcatgagcggccctacagtggagggttctctttggaaacaaacagccctgcttggtttcagtttgaggccacttatcttcaatgtgacatttcttgccaagccctgtgacactccccattgatgactcccataggtacagataaagttaagaacaggaaacagaagggtaggatgcatagggagggagagaagccctgaaaactttttttttctttttgaagcatgggaaacaaatcttttatgccactccagccataaataaaattttaacttc

SEQ ID NO: 621 - DNA, 3736 bp, Homo sapiens
agggcttcggcttccctgcttcacacatgtggttcactgttgcgggggttcgtggagttatggtgggtgggaaatccgagattctttgcatccatgtgatttctgcggatctgtgaagaacttcaggcctgggtctgagcgtccttttcccaacccttgggccccggcctggctgtcagcactttcggagctccaccctcttccgtgcaccccaaggccagtgtgtcgttgttagcgtgtggggtggacagatctggtgtgtagccggtggtggagaaaggactcattttgtcctagcacccacacacacaggcccccactcctctccacctctgctaaggagggctcaaaacccaccagcataaatgtggctcggtagtccaacgtggacttttaatttttttttcttttttttttttccagagtctacaataaaacatctaattggtgtcagagagtttacagaataaaaccttctgaatgtcttgtgtaatgtttgtcttgtaggtatctcttcaactgtggagaaggcgttcagagactcatgcaggagcacaagttaaaggttgctcgcctggacaacatattcctgacacgaatgcactggtctaatgttgggggcttaagtggaatgattcttactttaaaggaaaccgggcttccaaagtgtgtactttctggacctccacaactggaaaaatacctcgaagcaatcaaaatattttctggtccattgaaaggaatagaactggctgtgcggccccactctgccccagaatacgaggatgaaaccatgacagtttaccagatccccatacacagtgaacagaggaggggaaagcaccaaccatggcagagtccagaaaggcctctcagcaggctcagtccagagcgatcttcagactccgagtcgaatgaaaatgagccacaccttccacatggtgttagccagagaagaggggtcagggactcttccctggtcgtagctttcatctgtaagcttcacttaaagagaggaaacttcttggtgctcaaagcaaaggagatgggcctcccagttgggacagctgccatcgctcccatcattgctgctgtcaaggacgggaaaagcatcactcatgaaggaagagagattttggctgaagagctgtgtactcctccagatcctggtgctgcttttgtggtggtagaatgtccagatgaaagcttcattcaacccatctgtgagaatgccacctttcagaggtaccaaggaaaggcagatgcccccgtggccttggtggttcacatggccccagcatctgtgcttgtggacagcaggtaccagcagtggatggagaggtttgggcctgacacccagcacttggtcctgaatgagaactgtgcctcagttcacaaccttcgcagccacaagattcaaacccagctcaacctcatccacccggacatcttccccctgctcaccagtttccgctgtaagaaggagggccccaccctcagtgtgcccatggttcagggtgaatgcctcctcaagtaccagctccgtcccaggagggagtggcagagggatgccattattacttgcaatcctgaggaattcatagttgaggcgctgcagcttcccaacttccagcagagcgtgcaggagtacaggaggagtgcgcaggacggcccagccccagcagagaaaagaagtcagtacccagaaatcatcttccttggaacagggtctgccatcccgatgaagattcgaaatgtcagtgccacacttgtcaacataagccccgacacgtctctgctactggactgtggtgagggcacatttgggcagctgtgccgtcattacggagaccaggtggacagggtcctgggcaccctggctgctgtgtttgtgtcccacctgcacgcagatcaccacacggtgagtgttgggctggaccacaaagctggagcctggaggaggcactgccacgttgagttggccctttggctgcgtcttttcctccgcttccaaacttgcccagagcttttgttactcatctctggctaggaaatggttttttgcaaaactcaacatagtccttctgcgccacaagaatgtcttctcttcctgttcagttcctttcctgcagcaggacaggtttgagtttacccagccttccttgagtcttgaatctcacacggcctgctcagcggaagctttgaccggatgcaggaggtgtggctatgagaccctcaccttggtctcctggggtgccgggccctgggccgttgccctcttcccagcacgggtcgtgtcgctttctgcctgtgacatttcagggccatggcgcagggggctcggcctgtgccacccccactgcggctgtgttagaggctggtgggtgacgtcgggctggcaactcctgcaagagagagggctgcagaccctaacccggaggggatggccctggggcctggctgacgcatgtctcctgtttccttgccagggcttgccaagtatcttgctgcagagagaacgcgccttggcatctttgggaaagccgcttcaccctttgctggtggttgcccccaacctgctcaaagcctggctccagcagtaccacaaccagtgccaggaggtcctgcaccacatcagtatgattcctgccaaatgccttcaggaaggggctgagatctccagtcctgcagtggaaagattgatcagttcgctgttgcgaacatgtgatttggaagagtttcagacctgtctggtgcggcactgcaagcatgcgtttggctgtgcgctggtgcacacctctggctggaaagtggtctattccggggacaccatgccctgcgaggctctggtccggatggggaaagatgccaccctcctgatacatgaagccaccctggaagatggtttggaagaggaagcagtggaaaagacacacagcacaacgtcccaagccatcagcgtggggatgcggatgaacgcggagttcattatgctgaaccacttcagccagcgctatgccaaggtccccctcttcagccccaacttcagcgagaaagtgggagttgcctttgaccacatgaaggtctgctttggagactttccaacaatgcccaagctgattcccccactgaaagccctgtttgctggcgacatcgaggagatggaggagcgcagggagaagcgggagctgcggcaggtgcgggcggccctcctgtccagggagctggcaggcggcctggaggatggggagcctcagcagaagcgggcccacacagaggagccacaggccaagaaggtcagagcccagtgaagatctgggagaccctgaactcagaaggctgtgtgtcttctgccccacgcacgcacccgtatctgccctccttgctggtagaagctgaagagcacggtcccccaggaggcagctcaggataggtggtatggagctgtgccgaggcttggggtcccacataagcactagtctatagatgcctcttaggactggtgcctggcacagctgcgggccaggaggctgccacacggaagcaagcagatgaactaatttcatttcaaggcagtttttaaagaagtcatggaaacagacggcggcacctttcctctaatccagcaaaatgattccctgcacaccagagacaagcagagtaacaggatcagtgggtctaagtgtccgagacttaacgaaaatagtatttcagctgcaataaagattgagtttgc

SEQ ID NO: 622 - DNA, 3408 bp, Homo sapiens
aaatttaaatcagtcgttcttagggaaaaaagaaggaacagggacaagctcctggcggttggctgtggcagacacttcaccaggggctgactcgcgggggctgagtgtacaggccccaggtggtggttgatgagaggtgatgagtgtgccagccaccttgcaggggtctttcctggcgagctggcaggagcagggaggagcacgttgctcctgctgctggtggggcagtaacgtgttcaacctgacagcgacgtttttgctgaaagccgaagccaagggtggtgtggttggccgtcagggatacagggccccgcgtgggaatggtgctttcagtgaggctggcaggattcttgcggctcaggtgggagctttggcctgcacggtgttttgctctctggagaccaagggtgatgatggtgctggcactgagtcacagctgagattcagctcagggacttcatttctgaatgcgtgtcctctttcccagggaaagcaggcaggatgggagagtcgccgatagaaccacctcttccctgcctcctgggcttgggggaagcttgaatgacatctaaggccccgtgcctgggtaagccttgtggtgtctcagacatgcccagtgggtgccatggctgactcaaggtggcacagtccccattgggagttggcacagtccccattgggagttggcacagccaaggccctggggccacctggagcggcagtgaggtggaaaggtgagtgggcccttgggcgtcgctgcagggtcgatggcggacgccttgggagagctccagctcttctgcccggaggagacagccccaggacgggggtggcgcgggtctttggtgggggcaggcaggaagtgccagtgctgagactgaatttcaggcccttctcatctgccaataagagacagccccagaatgggggtggcgcgggtttgtcgggggtaagtaagtggggccagtgctgagactggagcttcagggccttcaccttcatctgtgggcctctcgttagttcgtgagtgcaggctcattgggaggcttctgtctgtgtccccccacccccgccccaggctgtaattcagaggccgtgtggcataggcttctagtttactgtgcatcatttcagatgtagacttctacattctttttcctgattataaaatactcgcaaaagctgtaggaaagcgagcctgtgtcccacttggcagcagtgcaggtgagcgtggtgccgtcaccactggcctgtcccaggaactcatcgcccgccacgcatgaggtcagcgtgcggctctgtggcacggtcctctccccatggcaaggattgggatcatctttcatgtctgcagacagcatgggcgaggctgactcgccattgctgtgagctttgtatgccgtcacgtgcacaaggacgtttgcgtcagctgcttctgtggtttgaattaagacctcagcttggcttggatgggggcatttctaaggcgagcgctgtcttgatcctgaatgttttctcattgaatcgcaggaagctcttcgtgggcggtcttgactggagcacgacccaagagactctgcgcagctacttttcccaatatggagaagtcgtagattgtgttatcatgaaagataaaaccaccaaccagtctcgaggctttgggtttgtcaaatttaaagacccaaactgtgtggggacggtgctggccagcagaccgcacacgctagatggccgaaacatcgaccccaagccatgcacaccccgggggatgcagccggagagaacacggccgaaggaaggatggcagaaaggacccaggagcgataacagtaaatcaaataagatatttgtcggtggaattcctcacaattgtggtgagacagagctcagggaatacttcaagaagttcggagtggtcacggaggtagtcatgatctatgacgccgagaagcagaggccccgaggtggaagttaaacgagctgagcctcgggacagcaagagccaagcgccgggacagccaggtgccagccagtgggggagccgggttgtgcccaacgctgccaatggctgggcaggccagcccccgcccacgtggcagcaaggatatggcccgcaaggaatgtgggtgccggcaggacaggcgattggtggctatggaccgccccctgcaggaagaggagcccccccgccacccccaccgttcacctcctacatcgtgtccacccctcctggaggctttccccctccccagggcttccctcagggctacggtgccccgccacagttcagttttggctacgggcctccacctccaccgccagatcagtttgcccctccgggggttcctcctccaccagccactcccggggcagcacctctggctttcccaccgcctccgtctcaggctgccccggacatgagcaagcccccgacagctcagccagacttcccctatggtcagtatggttacgggcaggacttgagtggcttcggacagggcgtctcagaccccagccagcagcctccttcctacgggggtccctccgtgccagggtcggggggcccccccgccggcggcagcggctttggacgagggcagaaccacaacgtgcaagggttccacccctaccgacgctagcccgcggcgccgcgacgtctgcacggcccagacccaggattccaaacttgtgaactcgtgacaatcacaaacttggtggcaaagtggcgactcaaccttgggggggggggcggggggagggcgcgaggcttttggagcggctgtgggtgtcgtctggactgaggtttttaaatatttctttctctaacccatcagcacaataaaaaaaagtcactggttcaacaacagggtttaaaaaaaatgtcttcagctttaattcaaaacttcaggtttctttttcttccttttttttggaaattattttcctgagccttttgttttacggtatattgtaaacttttatgttaaagaaaaaatatacatttacaaattgtgagatttttaagagaaattttctacgatgtatactggcttattttttaatttaaaacggggtttccgtcggcactggtggagggggtgcgctgttagtcccctcgctcctggctttgggggttgggacttggtggtccagaaactctgggagcttctagaagaaatctactgagtgtatttctgttttttgtttaattccttgcttttgtcgactgacctgcttggtagtgtctgaggtgaactgtgggggttgcgcacagccagccgcgtggatcccacgcagcgctgaaccgaaccgagtaggaagcctttctccccaggcacgtggcttcagggcgtttcccattgaccagtttgaccctggtttgaataaagagaagtgcgtttggattag

SEQ ID NO: 623 - DNA, 3450 bp, Homo sapiens
ttctctgggagctacaaaaaggaggatgtgtggacaaatcaaaacagaaacaaatagcagcttcctgctttgtcctgtagaccaggtaccctgatgccttcctagcatgcggaggaatgaggaggaagccatgcccatccttgtcccctctagacactttcccggctcctgtccagcccagccctgatgcctggaaaaataaggaagggaaagcaggaggggaggacaaggagaaaaactcccagaatccagggcctggaggcctcggggcccaactgcagccgccatgttttagggctaggccaagagcagctcgtttgctttcccagcttaacttaccacattggccctttcctgccatgattaatcacgtgaccgcgtttgtgcaaaggcatcccggcagagggggccggtgggctgtgtacagtctcagcttcctttaacccaatgaatggagctcaggcaacctgctttgaagctttattccgcagtccgctaagaggattcctggtgggttttgtgcattccttacttgtcagctgtagaagacttcagaaaaccagtcctgagaaagaaaaaattgcaacttaaaaaaaattgcactaaaataattagaaggaggcttgtagtggtttaacttgaagaaggctgcttgttaaacatgaacagcagcacgactgccatgtacagtgggacaggtggtgcactgcacaaccccggggggcaccattcatcatgatgtaaatgacatcaccgacattgtgcaaggcagtggctttgagtggcagtgatgttgcacagatgagcaggccctggtcttgaaaaaagtgaccttcctagggagcagatgtcctagctattagagagctcagacagttgcttctcttctgaaatcctcctgtaaatctgaacattagcatcagggtctaagaggaggtaggagataggagagaacctgtgggttaagggcagagttttgtgacaacatccatccaaggtagaactgtcaggacctaggttgctttctccaataactagatgtgaatgaattttagggagagctggaaaagcagcttctacaagcaaacccgattctggaggctttcggcaacgccaaaacagtgaagaacgacaactcctcacgattcggcaaattcatccgcatcaacttcgacgtcacgggttacatcgtgggagccaacattgagacctatctgctagaaaaatcacgggcaattcgccaagccagagacgagaggacattccacatcttttactacatgattgctggagccaaggagaagatgagaagtgacttgcttttggagggcttcaacaactacaccttcctctccaatggctttgtgcccatcccagcagcccaggatgatgagatgttccaggaaaccgtggaggccatggcaatcatgggtttcagcgaggaggagcagctatccatattgaaggtggtatcatcggtcctgcagcttggaaatatcgtcttcaagaaggaaagaaacacagaccaggcgtccatgccagataacacagctgctcagaaagtttgccacctcatgggaattaatgtgacagatttcaccagatccatcctcactcctcgtatcaaggttgggcgagatgtggtacagaaagctcagacaaaagaacaggctgactttgctgtagaggctttggccaaggcaacatatgagcgccttttccgctggatactcacccgcgtgaacaaagccctggacaagacccatcggcaaggggcttccttcctggggatcctggatatagctggatttgagatctttgaggtgaactccttcgagcagctgtgcatcaactacaccaacgagaagctgcagcagctcttcaaccacaccatgttcatcctggagcaggaggagtaccagcgcgagggcatcgagtggaacttcatcgactttgggctggacctacagccctgcatcgagctcatcgagcgaccgaacaaccctccaggtgtgctggccctgctggacgaggaatgctggttccccaaagccacggacaagtctttcgtggagaagctgtgcacggagcagggcagccaccccaagttccagaagcccaagcagctcaaggacaagactgagttctccatcatccattatgccgggaaggtggactataatgcgagtgcctggctgaccaagaatatggacccgctgaatgacaacgtgacttccctgctcaatgcctcctccgacaagtttgtggccgacctgtggaaggacgtggaccgcatcgtgggcctggaccagatggccaagatgacggagagctcgctgcccagcgcctccaagaccaagaagggcatgttccgcacagtggggcagctgtacaaggagcagctgggcaagctgatgaccacgctacgcaacaccacgcccaacttcgtgcgctgcatcatccccaaccacgagaagagggtgaggcccgccgcccagaccctggggctcccagaagccagggctgtcccaagcggtcacagcgtccccagggcgccctctgcccccacctaccctgaggaccccattttccatgtggggaaggctatctgaatctcagacccattccccatccctggaggaaaaggaggaagggaggatgcatccagagacttttcagttgtggagttgctgtgcaggtcatccagccactcattcattcattatcccaggaagtattcactgggctctgccctgtcctgggtgctggggagcagtgttagaaaaattgtagcccttccctgtgggtttctcataatctggtgcaggcatcttcagcttggggcgattgtgtcctctatatggacatgctacagacatttttggttgtcacaaccaggagggggctgttagtcagcatctagtgggtaggggccagggatgccctaagcattgtacaatgcacaggatggtccctcaacccccagcacagaatccctacaagatgccagtagtgctgaggttatgggagacacggggagaggtaaacatacagctgatgatggtgatggaatgtggtcagttaggagaacaccaaagagccagggctcctcccacagcctcaggactcagagaaagcttctggtgaacttgaacgttaagaatgtgtggccatcaacttggtgacatggaaggcagggtggggcctaggataagcagggggcctaggataagcagagggcccaggctaagcaagagtgtggaggtgagaagtgaaggaactaggtgagaaaatgctagatagtgtccaggcgtgttgctcacgcctgtaatcccagctactcaggaggctgagaaacaaaaatctgttgaacccaggaggcggaggttgcagtgagctgagattgcaccacagcattccagcctgggcagcagagcgagactccatctt

SEQ ID NO: 624 - DNA, 3444 bp, Homo sapiens
gcactatgcactgggctctgacaggactggatggtaagctcccaagttgccattttctagctgtgggacttcaggttggtccctcaacctctctgtgcctcagttgcctcactgataagattgagataacaacagttcctacctgggacgattttttttctttcctgtttttttggtttttgtttttgttgttttttatttttttgagatggagtctcactcttgttgcccaggctggggtgcagtggctcgatattggctcactacaacctccacctcctgggttcaagcaattctcctgcctcagcctcttgagtagctgggattacaggcacccaccaccatgcccagctagtttttgtatttttagtagagacggggtttcaccatattggccaggctggtcttgaactcctgacctcaggtgatccgcccgcctcagcctcccaaagtgctaggattacaggcgtgagccactgtgcctggccgatttttttttcctttcaatcactttttttataactacttattgtgtgccagacactgtgctaggttttagggaatcctgctctcgtggaggtgacattctgtgaggttggcaggataatgaagaggaacacaattctcagcacagagaaaagttctgctcaactggtgcaccccatttattctagttctttccagggcagagtcaccctttccccaacccccacctttcagctctgtggctggggaaacagcccccaccccaacccaccacatcccttggaacaccctagggcctggaggcgctggggccctttcagaaaaacaccctgccaagaatgcatcaccccgccagggcgccgaccaaggaaaacagagggcctgaggagggagatcagacaggccctcaggccaggccattggaggggcaggcgcagcaggaaagccgagtcaggcaccaggtgaaatatgacctccaaagcatccataggcatttcttgtataaacaccccagtccagacaggaagtggggctgggggaactcgagggggatgtggccccacaggaccccccagaggcagacagatggacaggaaagcgggggaggaagaggtcagtggagaaaaacaaagagggtgtgggatgtggagagaagagagtgctgctggggagaaggaacagcccataatactccgctctcatacagagagaggcttccatttgcttctcatcatccaagaggtacagaatcaccagacagttggggaaactgaggctgcaagaagcaatgaggccagcatcctgtgactgtttatcatctgttgcccccgagggtcctgcccagaggcactctggaatgttctgtgaagaattgtttgtcatgaccttcctgagaccccacagtgggttggtggccaagctggggcatagatctgggtttccaatggtgtcttcaggccccaggatgacctccagaggcccagcgcattcctaaggctctgccgcagctcctgctgacagagcggggtcagcctgaaatcaccccaggcctcacgacacagagtcactctgtatagtggggactccacccggcaccttccagtcccagagtgctggactgagcctggcagtccccactggacagatgggaaggctggggacccaggaaagcatgcaatttacccaaagtcacacagtgagttagtggtgggatcagaacccatgtccttctcaagtcagtggaaaagtctgtttgtttgtttgtttgtttgtttcccaaaccacggtagccagagactgcagagtttggccctacctttcagagtctgtatcccatggcctgagcttaaggggagatgataccagggctgggccacctctggagggcttcgaggggacatgctcaggattgactcctaggcaatgggcttattcattcattcattcattcattcattttagagacagggtatcactctgtcacccaggctggagtgcagtggcatgatcatggcctactgcagcctcaaactcctgggctcaggcaatcttcccatctgtctcagtctccagagtagctgggactacaggcatgtgccactacgcctggctatattcaatttttttttttttgtagagaaggcatctcgttatattggccaggctggtctcaaactcctgggctcaagccatcatcttgcctcggcctctgaagagactgggactacaagtgtgtgtcacaacaccagggttgggcggttttaataaggggagaggagaaagagactgagcacattccccagcccttcaggaggcagggggtttccggagggtcccgggacccgcctcaacttccacccaaagtgggaagggagaaatggccccgtccttaaccgagggaccagcccacatccttgccgccagtcatgatggggtgggtgccgccccattgaacttcacggatgccctaccctcttccccaccctgcccttctcactccaggtttggctccttgaagccaggtttccaccgcacacccgaggccccgcccctcttccccagctggccccgcccctcgaagccctgccctcatctctgccggccccacctccgcgccccggccaggctcaccttggtctccgccagttgtcgcttgagcagctgcagcgcttcggtgtgttcccgctcgctgtcttgaagggcctgaagttggtccttcagctccctctgaaacacacacagggccgggatgggggcaggggccatgcctggcccaggcattcagccctgaccactgccaggcgctgggggttagcctggtctctgtccccaacctccaacacttgcctcccgtcacagttcaaccaccagcaagtcctgtagagtctgtctcctaaacacctccagaacccgtccgtatctttcacctgcatctttgcaacaacctcctcctctttggccaccctagaggcttctgtgacaatcgacttccacatacacactctctggctccccacacttggccctggatccccgcttagaattaaggcaggggtctccaacccccaggccacaggtgggtattggtccatagcttgttaggaacctggacgcacagcaggagatgaacagtggtggggaggggcaaaccatctgtatttgcagccgctcctcatcgctggcattaccacctgactccacctcctgttggatcagtggtggcattagattctcacaggagtgtgaactgcacatgggagggatctaggttgcctgctccttatgagaatctaatgcctgatgatcactcactgtcttccgtcacccccagatgggactgtctagctgcggaaaaacaagctcagggctcccactgatcctacatcatgttgagttgtgtaattattccattatatattacaatgaaataataatagaaataaagtgcacaataaatgt

SEQ ID NO: 625 - DNA, 4525 bp, Homo sapiens
gtttttggtggattagagtccatgattaaagaagcaagacgaactgctgagcaagcttcaaaaccgaaagtacctccaaaatctgaaaaagaaaatgatcctctgcgaacaccggaggctttgcctgaagaaaagaagattgaatatagattgttaaaggaagagattgccaaccgtgagaaacagcgtttgattaaatcagatcagctgaagacaagttcatcatccccagcaaactctgatgtggaaattgatggtattggtaggatagcaatggttactaagcaggttacagatgcagaatcaaaactgaaaaaacataggattctcttgatgaaagatgaatctgttttaaagaatttagtgcaacaagaagctaagaagaaagaatctgttagaaatgctgaagcaaagattacaaaacttacagaacagcttcaagcaactgaaaaaattcttaatgttaacagaatgtttttgaagaagcttcaggaacaaattcacagagttcaacagcgtgttacaattaagaaagctttgactctaaaatatggagaagagcttgctcgggcaaaggcagtggccagtaaagaaataggaaaacgtaaactggaacaagatcgctttgggccaaacaaaatgatgagactggacagttctccagtatcaagtccaagaaagcattcagcagaactaattgctatggagaaaagacggttacaaaagctagaatatgaatatgccctgaaaattcaaaaattaaaagaagcccgtgcccttaaagcaaaggaacaacaaaatatctctccagttgtggaagaggaacccgaattttctttacctcaaccctcacttcatgatctgacacaagataaattaaccctggacactgaagaaaatgatgttgatgatgaaattttgtctggttcaagcagagagcgaagaagatcttttttagaatccaattattttactaaacctaaccttaagcacactgatactgctaacaaagaatgcataaacaaacttaataaaaatactgtagaaaaaccagaactttttctagggttaaaaattggtgaattgcaaaaattgtattcaaaagctgacagcctaaaacagctgattttaaaaaccaccacaggcattacagagaaggttttgcatggtcaggagatttctgtagatgtggattttgtcacagcacaaagtaaaacaatggaagtgaagccatgtccttttagaccctaccatagtcctcttctagtttttaagtcctacagatttagtccatattatcgaaccaaggaaaaacttcccctgagctcagtatcatacagtaatatgattgaaccggatcagtgtttctgccgttttgatttaacaggaacatgtaatgatgatgattgtcaatggcagcatatacaagactatacacttagccgaaaacagttattccaggacattctgtcatataatctgtctttgattggttgtgcagagacaagtactaatgaagaaattactgcttcagcagaaaaatatgttgagaaactttttggagtaaacaaagatcgaatgtcaatggaccagatggctgttctccttgttagcaatatcaatgaaagtaaaggtcatactcctccatttacaacctacaaagataaaagaaagtggaagccaaagttttggagaaaacctatttcagataatagcttcagtagtgatgaggaacagtctacaggaccaattaagtatgctttccagccagagaaccaaataaatgttccagctctggatacagttgtcactccagatgatgtcagatactttacaaatgagactgatgacatcgctaatttagaagcaagtgtgcttgaaaatccttctcatgtacaactttggctcaagcttgcgtacaagtacttgaatcaaaatgagggggagtgctcagaatccttggattctgctttaaatgttctggcgcgagcattggaaaataacaaagacaatccagaaatttggtgccattacctcagattgttctcaaaaagaggaaccaaggacgaggtgcaggaaatgtgtgaaacagctgttgaatatgctccagattatcaaagcttttggacttttctacacctagaaagtacctttgaagaaaaggattacgtatgtgagagaatgttggagtttctgatgggagcagccaagcaggaaacatccaatattttgtcctttcagcttttagaggctcttttgtttagagttcagctgcacatatttactggaagatgccaaagtgcactggcaattttacagaatgcattgaaatctgctaatgatggaatagtagctgaataccttaaaaccagtgatcgatgtttggcatggttggcctacatacatcttattgaattcaacattctcccttcaaaattttatgatccatctaatgataatccttcaagaattgttaacactgaatcatttgtaatgccatggcaagctgttcaagatgtaaagactaatcctgacatgttgttagcagtttttgaagatgcagtgaaagcttgcacagatgagagccttgctgttgaggaaagaatagaggcctgccttccactttacacaaacatgattgctctgcaccaactcctggagaggtatgaggctgcaatggagctttgtaaatctttattggaatcatgtcctattaactgccagttgctggaagctcttgttgcattatatttgcaaacaaatcagcatgacaaagccagagcagtgtggcttactgcatttgaaaaaaatcctcagaatgcagaggttttttatcatatgtgcaaattcttcatcttacagaatcgaggcgataatcttcttccatttttgcggaaatttattgcatccttctttaaaccggggtttgagaagtataataacttggatctgtttcggtatctcttaaatattccaggaccaattgacattccatctcgtttatgtaaagggaattttgatgatgatatgtttaaccaccaagttccttatttgtggctgatttactgcctttgtcatcctcttcaatcaagtattaaagaaacagtggaggcatatgaggcagcattaggggtggctatgagatgtgatatagtacagaagatatggatggattatcttgtctttgcaaataatagagctgctggatccagaaacaaagttcaagaattcaaattttttactgatttagtgaatagatgtttggttacagtccctgcccgataccccattccttttagcagtgctgattactggtccaactatgaatttcataatagggttattttcttttatttgagctgtgttccaaagacccagcattccaaaaccttggaacggttttgttcagttatgccagctaattctggacttgcattgaggttacttcaacatgaatgggaagaaagcaatgttcagattctgaaacttcaagccaagatgtttacatataatatcccaacatgcctggccacctggaaaatagccattgctgctgagattgttctaaagggacaaagagaggtccaccgtttatatcagagagccttacagaagttacctctttgtgcatcactgtggaaagatcaactcttgtttgaagcatcagaaggaggtaaaactgataacctgagaaaactagtttccaagtgccaagagattggagtcagcctaaatgagctcttaaatttaaacagtaacaaaacagaaagcaagaatcactgaacactgggtgcagtcagttctaagtccttataataattgccaaaattatttgaatgattcttcaagattaggctgatccctggctaaggtctgtgtaaggcagacaagcgttattgatcatatcaagttccctacaatatcctgtcctcaaaaccggaagcaatgaacatgatcctcttcggttggataaatgaacttcctgtttggcctgcttctaggccctgccagattctcataacatcatatacgtaagtatagttcctcaaagtgactgacatttattttaattttgctttgttttttttttattttctcccccattcctttattttgtgttattcctgactcacttgacactctctgatgcctgagagattcctgtttgggatttaatatccagggctgtgtttacagtaaaaaaagcaggcagtcccttttagtttttcctttttaaatttttttgagattcttcatttcaggatttaaaactatagcagtccatcttaaggaaagtgtaactgccatggccacaagtctgctagttgcacttgaatgctctatcagggttgtttattaccctttctacgttctgggctccttgccgagactgtttaacttgaagattaaagaaactattgcaaatgccagtgcatcagaacctaagagtggtcaaatattatgtgcaatttttttgtaaagaaattttaatttataataaagtttaacagtttaaagaacagtt

SEQ ID NO: 626 - DNA, 3755 bp, Homo sapiens
agaggtatccacgagggaggaggtggattgtgacacctgggagaatgaaggcggagatgggtgaattgctaattcagaccttggagaagaggcagacggatccagggggtctccatcaaggaaggagcggtggcggacactaagaagtgtaaatagggaaggggcgcggcctctgtgtggtcagggcggaccccaggggtcccggactcaccttccgcataatcttccggccatagaagagcactttgtccctcttccggaaccgataccgggggccatccggggctggggtttctggggataggtggggacaggggcactccgagctctgtgcagactccaccctgccagagctggggtaccgcgaacagacgccagcaaatccccatctctgccgcctcgggacccgggcatttgggccccccaccatacagcctcccaagaggggcccctcgggtgctcacttggcactcgcagcctccgcaccaccaggaggatgagcacggccgtgaccaccaccgccactccggccccgatcatcacgccaagcacctgagggacgaacggcactggctgcgcaccgcaaatccgtcccgccgagccttccccgggcgccaggacgtcctggaacccatccctctccgccaccttcgcccccgaggagttcgtagccagcccgtgactcgatgtccccatctgcagaatgggccagtgctgctccctccccgggggcgcgactcttccctgaggcccggcggcccgcagtgcatgccgggaaacgtagttccgcccgagcggacgcagcgcgttatcgccagaccacgtaatgcgcgctgagcacgccgggagttgtagtcctcttggcgccccacgccggcacctacccggtctccgccccaccccttaccattccagtttgcagcggagcctccatcggttgattccagctggacggccgatctggtagcccggagtcctgggaaatcaaggagtcgaaggaacccgtgcaagtcgtcaatctgggcccacctctcccctgcctcaagccctgcccccagctcaagccctgccctctggggtggcgggggaagcgtctccagctgccaggggcgaggctagaggggcgctgcgggactaagggatggagcaaaccgacctctcggccctggccaggagatgaggcgggtccccggcttcctgctcccttcgcctacgcgtagggcctaccagacgcccgcctgtccaaccccaccccggggccaaaggccgacctggtacccactgtcagcagcctgcaggcaggtccccacagggcacggtcctctgcacctggtgacttcctcccgggtcactgccctctgcagggttgatcaagcctgaccaccccaccccccaggccgcaccccctactccgtcgaagactgaatgccccaccccaggaaaacgggcccgcaaaccgtggggtccgggagtgggcacctagatactcggctcccgacgcaagcctgccccggggaagacccaggagctgggaggcacgggagtactgccggggcatccgcggaaggcgtctgatacccacgtttcagaagagtcctgggatgcttggggtggcgtgggcttgcaaggcgctgcgggtttttgccggggatttactatcacgtagtagtgaagttatgggggctctatggcacagagcatcactgggactccgggaccgatggtggcgccattgctgggaggcgtaaccagagacgctgggattagtgggtggggatgcggggtcactggaaagttactgagattctgaggattacaatactactgctgggaaaaccaggaggtgggtgggcacattcctggggtgcttatgagagcgggcctggggagggcgtccgggctccttggaagatactgagagatgctggaatattactgggatttttctgggaagctgaggatgtttctgacatcgctagaatattaatggaaattcgggggccgggagataggaatcccggagactccgagtcgttacttggaaaattcctgggtggccggtcctcttccacctcagggcacagctggctaccggtgtggaaacacctgccgagacgtggggggtatgggaacatcagaaagtctagagttaacaagaatcggaggacagatcgtgggaaagcggaggctcgctaacgaccctcgaagggacacccctgcgaggctaacggaaacccagactcacccaggggccgcagccggggtccactccgcgccaacaccgctagcgttccgcccggctccgcaggcgcggcccctttaaattattcactcctagtcgcaccgcagtccctcccgaccctcccacccctcctccccgcgccatgcttggaaggccgactgaggccgccatgctgagtgtggccgcgccttaaagggcctcacaccgcttaacgcaaggactgctcctcccgctaaaaatgaaaacgacacatttattttcccttttattcaacaccctccccacccagtctccccgcccccaagggtccgacacgaaaggtccaggccctcctcgggcgcgacagggagccgatccttaaaagcaaaccctacaaataaataagcggggtcgggggcgggggtctctgcagtccagggcctacggtccaacggcagtcgggtcgaatcaattcaccagcagcgaatgctcctccgaggggtccctggaggaaggaagcagggaagaggggcgtcagttttctctggctcgctcccctttccccattccctaacctccaatctgaatgtgccagacccgggactcgaaccttccgcagcagcagagaaggctgcaggccgagccgctcccgcggcggaacttgccggaggtggggctgtcctggcactgtgcgatgtaggcctgcagctcgctctcctctgcgcctgcgccgccgggatgctggggagagaagccgggaggctcagcctgaaagtggctcccaacctccaaggcccttgaagtccgccctcccctccagccatatctgcatcgcttcccacctccgggcctttgcacttgctgggcctgctccacccgttgttccacagtttgcttgcacagagggaccttccctgacccctgaacctggatacaagctgtgtctttgccagtctgtgtctttgccttctgctgtaggtccagcacctacagacctagagccagggctgacatgacctcgatgctcagaaaccatctattgagtgagctggatgcacgctgagcacagcagtgggagcagggcctgagactgcccacctgagtggatgcatgtgtgtgatgtctacgtgctaaggcaagacaggaagtagttccaagggcctgagtcaatgtgtctgtgggacagctgaatccatgcatggggaaaagggggtgtacccatctgccggtgacattggatgtggcagggtcccagccaaggcttccttcctctcactcggcctcatggaggggccatcttttctccaagttttttcaggctactagacctttgctttagctattccttcccctcggtgcactgcccctgggctcccatctcttcagtctagaggcgatggaagtattcaatatctatgctgtccaatatggcagccaccagccacactggcttttgagcactggatacaggatggtgcaagtcagaggctaaatttgcaattgtacttcatttgaattaaaatttttaaaaaat

SEQ ID NO: 627 - DNA, 3684 bp, Homo sapiens
agagctggggttcatgggcagagtggtgagcgacggagaactggggttcgtgggcagagtggtgagcgacggagaactggggttcgtgggcagagtggtgagcgacggagaactggggttcgtgggcagagtggtgagtgacggagaactggggttcgtgagcagagtggtgagcgacgcagagctggggttcgtgggcagagtggtgagcgacggagaactggagttcgtgggcagagtggtgagcgacgcagagctggggttcgtgggcagagtggtgagcgacggagaactggggttcgtgggcagagtggtgagcgacgcagagctggggttcatgggcagagtggtgagcgacggagaactggggttcgtgggcagagtggttggctgccccactgtcagcctgttctgaaagtaggaatgaccctcagctgagctgagatgttgctggtggagactctaagactgtggattctgactccctgggctcaggaaggacggtgctgggaacaaggtgcagacaaggcacgacgaagctggagtgcctcataccacccccatgaaagcgacgaaggactcccagaaccattcctgggggcccgtgggaacgaggactttgggggcacaaggacgagctgaagaagtcttcctgattgtggttgtcagagggaggacatggcatcgtggtgggccagagtatcggcctcaacaccacccacttttcaggctgcagtctccaccgtggccgctgtgtgcattggagggcacttggcagcatccccagcctccccactagaaaaccagatgccaggagcatatgcgcccctcctcaaggtgcaaccaccagaaacgacgccagacattgccaaatgtcccttgagggtggggacaaatgcccctcatcccccttgaggactgcagctggaactcaatgaagagcagcgaaaggggccacaagccaaggcctctgccgcagcatctaacagctggaaaaggcaaagatacgggatctcctggagcctcgaacaggagccagctctgcagacaccttgattgcagcccagcaaggcccatgtcaggcctctggcctccataacttgataataaagttgtgttttagttctttgttacaggagcaatatggagagggactaatgaactgccattgtattaaaccactggcaatcagagttgtttgataaagcagtcaagtcaacctaagtaaaacacttaaggaccaagaaataaagtcctcacttgaggatagtgagatctgagagcagtaaagccacttccttctcgtgagaccgacccctcttgcagacctgcctctggcctggccccatggagtggcaggccccggtcctccgctcttcgggtcacaggtggcccagcaggctctgcgcacagcatttcggcagcacagcaatgcctaacttaatactcactccgggaacaagccagctgcaagctgtcaacgctaagtccccctaatgctttaattggtacttactctagtaagttcatttaaaagtccccacctctgccagatgcacagtgaagctgacccgacaagagggcctgacggtggcagagcaatgtgataattaatgcgtcctgctttcctctgcttgaattaatgttttcatgtcacttagacatcactcctggaaacctttctggttttcagtaatcagcagttctccatcccagaacccagtagatgatcaataagtggttgccgagtgaacgaatggctgagtcagagatctcgaagggtcagatttcacttggttcaaaccccaaccagtctctgagaaactgagccagggaggcctcaggaggcctcgagacgccagggtacgagctaactgtggctgggaaggttgtgtaaagaggaatacaaagcagcctgggcatcccaaatgctgccacagacgtgtcagagtggctaggagccatggcctgcacccaggcaggggccactccccagctgtgggagcagaaggggcccagcacagccggccgcggagcccgcaggagccccggtgctcgggaggagccggacgccgactccagcagcgcagacgccgccggggaggcccgttgaggagcgcgcagctgagtcccggtagaggaggcgccggcctggagaggctgggggcggatccgctggaccaggcggggtagcgaagggtggagttgcacagagcggcctcgagtccggactggggaaggctcagacagggggtggaacaaaggccagaaaggaggcgggggtcagaccggggctggatcatgaaggcggcagagagctcggagggagcccaacaaggccgtgctgcggcccggttttccttccggtgctgaggatggcggcggcctggttttccttccggtgctgaggatggcggcggcctggttttccttccggtgctgaggatggcggcagccgcgggacggtgctgaggatggcggcggccatggaaggtgctccctgcttctgcgcggatccaggccttcgggatctcgccctctgcagtgcggagaactcactggacggagacgagagaggcggcggcggctgcacagctggtgcgtggggactggggggcgggtgagcgctgtccttggctggggaggaagcgcagcccccggaagcccgcctggggctgcagggagaaaggagggcgccccagagccaaggctgcccgctggtccctgcgaccggggcccggagaaagtgcgggaaggagagagaaggctggtggccgcctgcctccagggcgggcctccgagcagtgccctgtcccagccacagccttgcttcttttgatcctcatcacgaccgctctccgggccaggccgtgggtgaggcccccaggccttcaggggagaagccggggtctccagagagaggtaacagagtgagaacggccgtgggtagcgcgcccctcggccccgcagctctccacaggcctctggcgagctcagctgacctgccccatcagtgaggtctctgctcagctaccacctgctctgagaagccttctctgccagggtgactcattaccctgatttgccaggactgagtgggttcctggagcggcctgggagccggcggcggtggtggctttcctgagccctgtttgtctaatgtaggcccggttcgcactgttcattcactctgctcctcagttactttacggcaattaacaccaatctgttctcaaaacgtgaggtcctcttgctcagggctgtgttcctagcacgcggcccttgcctgacacacggctgacattcagcgcacatttaaacgagtagatcaactgctccatcttcccccagaagctctgtctgtccctccacaacttggctcatgccatctcttccataagcgccgtgtgctcttctctctcagaaaaaaactatttgtttcttgacagctcagctcaaatatcagcttctctcgaccccaggcatgagcgtgggtcccgaaaccctggtgccctccacagtgtgtgttcagtaaatgactctacgtttatccctgtagctgccagtgttatcaactttggcctatgttttctgaattatttttgaatctttattttgtaatccaatctattagtgacccataacaggccgtgtcatccacaattaaataaatgtgcactctct

SEQ ID NO: 628 - DNA, 3596 bp, Homo sapiens
atgagcacaagggcagtctgtgtgtgggatcccttcccattcacgctccaccctgctcttgaccatggtgaacttgtatggattacatcaatatgctacgtgccctgtggattctggctggatatgggcaatggcgagttccagcaggaaactggagggacagaagagagcgaggtcagagaatttaatctcctgcctccctccctatgaggtcaccccagctggtgactgtgaccctggatggaaggtgattgtctcaaggtggtctgctcttcgcaactctccttctttctggtaacctcgcccagcatccctctaggtcgagggaggggtggtgttggcctcattgcttttaacctggattcctgtaccatccctcatggttctctcctacaaacctttgcaaagaatccctccccacacgagcagaattttagtgcatgctctctgtgttcttctaaggtcctcttagggaatagacaattctgtaggcactttcattgcaaacagaatcccagtgaagaaatggtagcgtcagtccaagatactaatcaacatggcaatcttcactacaggatgagaactgttttccctttgccccaggtaggacataggccgccttagccttccctgcctcaggtggggaaggggctgtggctggccctgctctttcccacctcacctgttccctgcggttttcatttctgcctagcctgagatggggaaagtgggggataggacagttttcactttgatatggtttggctctgtgttcccacccaaatctcatcttgaattgcaatctccatgtgttgagggaggggcgtggtgggagtaattggatcatgggggcagttcccccaggctgttctcatgatagtgagttctcacgagatctggtggttttaaagtgtggcacctccccttggcttgctctctctctctcctgctgccacgtaagacgtgctttgcttcccctttgtcttccgccatgattgcaagtttcctgaggcctccccaagccatgcagaactgtgagtcagttaaacctctttcctttacaagttacccagtctcaagtagttctttatagcagcatgagaacggactaatacacacttgaacttgttctaactttgttttgcactcttaggtaagatctagttagacctgaccttctctcctagtcccctcggggactccctgcacatcccaaatcccaggtgcatgcccatgacccactgggcaaggcctcatctcaggctggctttccctctgccctggttctccaggagtgctgttcacacttgactcaccactggggagtcttcgtgcttccaggttagctccttaggcagaaattaagactctaggtgacatcctgccagcaaagttccgatctggctgacaacctaccttgtttgcctttgttgtgctaccaaaacacacgcagcttgacgctcctgcaggtcaccctgtccccaagtgcctgggaaccaacaggtatgtaagtgtctcctcaaagtctcttatcagccaaattgaggcagggaggcagataccctcattttctctattggggaggggcccatctccaaagagatccttccagtgaagtcatcttggtcacgattttctcccttcctttatattcccaaagtgtgtgagagaggtgtttaagagaaggaggaaatcagctaggcatggtggcccatgcctgtaatcccagcactttgggaggtcgaggtgggtggattacctgaggtcaggagttcaagaccagcctggtcaacatggtaaagccccgtctctactaaaaatacaaagattagctgggtgtggtggcacgtgcctgtagtcccagctgctcgggaggctgaggtgggagaatcccttgaacctgggaggtggaggttgcagtgagctgagatcatgtcactgcactccagcctgagtgacagagtgagactccaaaaaaaaaaaaaaataataataagcaggaggaaatcatctctcctaaatctactctgaagattcccccaggaaggagggcaatctctctcacacacactttgatatctcatttttacttcatcttggagtcttagtggaaacttcaattttaacatactgtaacagattgctacatacatttttggttgctagtaaaaacaaaacaacaattgaaactggcttccacaataactggaactggttggctcacacaactggaaggatctagagattgggtgctgtttctctgtgattcccttactcagattgggcaaaattgaacttgacaaggccaagtttttattctgagccaatccctattgccaggggagcagcacgggtcgccaggggtaggtgccatccctgccccaatcgctatggaagagtcatggtcatcctgattgatcgggttaaacctctagggactcattcccggaactggtggtgagagtggtggagatggactcaaccttatccaaatctcctagttatataactaggaagtacggtgagaatgtagtttaggaagcaaccacaaccacaaactacgaggtcatctttttcaagcatctcattttgtcctcccataaatatgatgattttgtggttagctgaggttttgttttgttttttatttttttgagacaggatctcattctgtcacccaggctggagtgcaatagcatggtcacagcttactgcagcctcgacctcccaagcccaacccatcctcctgcctcagcctcacaagcagctgggactacaggggcgcaccaccatgcctggctaattttgaaatctttgtagagacggggtctctctatgttgcccaggttgttctcgaactcctgggctcaggtgactctctcgcttcagcctcccaaagtgccagggttgcaggcatgagccaccatggctagccttgtttttatattcataatattaatacaaacacacttgtgcctatagaggaattcattttgcatcagccaacttctccatgatgtgcaggaggcatcatgcctacaaaccatgatattctgaaggaccatgaaaatgtttcaatttttttaatcaagagcaataaatgaacttacaggtctaaaaatgttttatgatatcattttaatataatcatcttcatagcaatgtgactataaaatgaaatttttattaactgttttatggagagaaaggcctactaaggcaaaaatagggcccctgaaagtcaccacgcagctcggccttgtattccttctttcctggggcatcctatcatagaatttaagtattgacaataggaacccaaagtctgagacaagatgatcctttgaatccccaagtaactagccacttacttaaagaactcatgtggattgtatcaatgttgtaccagagatattatgcttgaaaacaacagtccaggaaggtcaggcttggctctacaaaagtagaaggggcaaagtatggtgaggcatgcctgtagttccagctacttgggaggctgaggcaggaggatcgcttgaggccaggagttcgagaccagcctgggcaacatactgaaacatcatctctgaaaaaat

SEQ ID NO: 629 - DNA, 3646 bp, Homo sapiens
aaaaacagcaggttgcatgacagtttctcagtgaagaggttcaaaaaaggtgagatgctattgctttgtgaatttacaaaggaaagaataatttaactgctcagaattacatgtccggtcactgctttttaatttaaaaaataatagagcatcattagtaatcttgttttctctttgatacataggtaaagggtgttttgtgtctggatgcctaaggtgattccaagggaggggatggaagatatgtgacatcttccctgaaatttatattgatatgcaatgctttgtcatttaaaacctaagctaatgttttctacaatccataactctgagtttatctttttggaaacatagaaggggatgacattgaagatgaaatggatacagcaattgctgaatgacagtttgcccaaattagtgcagttaaaatatgctgacgcccctgcatggccaggaagacttctgctccatgcacacaagcaccaagtatcaagcgaccaccaacacattcccattcctttaggcctccatagctttgcttttgctttctgtttcctgaactaaaaaaaaaaaaaaaagtgtagattgccagccttccctttttcctgcacgctaatggcatgtagtgcctccacccttccctatagtgagattaatgacctgctctgtaactcacattgtgtccttctctctccctttccttaacccttcccatcccgcttcaactcctggccatacagagaatgaacagccttccctcgtttggtttgacagaggaaagttttatttgacttttgaaggttcttccaggggacccagccccctaaccatgggagctcaggacactctccctgttgcagcagcatttacagaaacagtcaatgcctatttcaaaggagcagacccaagcaaatgtatcgttaagattaccggagaaatggtgttgtcatttcctgctggcatcaccagacactttgccaacaacccgtccccagctgctctgacttttcgggtgataaatttcagcaggttagaacacgtcctgccaaacccccaacttctctgctgtgataatacacaaaatgatgccaataccaaggaattctgggtaaacatgccaaatttgatgactcacctaaagaaagtgtctgaacaaaaaccccaggctacatattataacgttgacatgctcaaatatcaggtgtctgcccagggcattcagtccacacctctgaacctggcagtgaattggcgatgtgagccttcaagcactgacctgcgcatagattacaaatataatacagatgcaatgacgactgctgtggccctcaacaatgtgcagttcctggtccccatcgacggaggagtcaccaagctccaggcagtgctcccaccagcagtctggaatgctgaacaacagagaatattgtggaagattcctgatatctctcagaagtcagaaaatggaggggtgggttctttgttggcaagatttcagttatctgaaggcccaagcaaaccttctccattggttgtgcagttcacaagtgaaggaagcaccctttctggctgtgacattgaacttgttggagcagggtatcgattttcactcatcaagaaaaggtttgctgcaggaaaatacttggcagataactaatgaaatcttatgcaaggatttggaggattcatataatggagaactgatgtatgagaaacagattttaattttggtttgatgaaaacaaaccaatatctgcacttgggatatatcaggtggaaagtcaatgactttcatctgtgatttccctcacacactaccatgatgaccagtcctacagtatttacttctaggtgtaatattgttaatggttttaaaatgtaattattgtatttgtaaattgtactctcattccagtaaggcagttagacacttgagttttagcattttaccattcctgaaatggatataatttaaactgtggtatgtaaatttaatagtagtattgttgaatggcacaatgcttacagaggtagattgcattttgtcaatatataaaatttaaatataatattgatagctgtcataaagggggtgccacatattaaagaaacttaagtggaaccagaagaaaaagaaacaaacttacttttcttcaatgcttagtatgttttactctagtgctaaataaaaactctatcttcaaatgtttagtgggttaaattgagaaactatttcagaaaaaaattctaaggttacagcatattcaaagaaaagcattagttaccactttttaaaaagcttttttttcaaactgcaaatttcataaaaatgcaaactgtgtaaacagggcctcttatttttataacttgtgtaaaaagggaaagcaattcatatttaaagtttaagtatattaaattataatcaagagtaaagaagatgctgaagtcttaactacttgcccctctctacagtttcgcaaatgtggggattgctgaataatcagtcagactaaaaccaaaattgtgattttaagatttcaagactttccgtagttgaactggttaagaatttttgcttagttactctgaatagatgatcttactcatccagtatgggggaatgatacctcacgtcttcctctttacccacaggaatcaaaacgctgagactgagaattttagggaaaaaaaagtccgctgtttagatccagaaggagagttttaatcattgtttatatcatttgagaatgaaaaaataagcttcataaatgaaattctattcacattactgtgtaataaatttccttttggatgattaggattcattgtataaaactgtaaatctttgccattcttggagaagcaaaaggagagttatcaaaaatgtatgtcgtttcatcgttgcaaggtataataaaaactgtaattattcaatctggccctgccatatgaacatttagaaagacaaacttcttcgggagtctcagttgtaaaaccttccctcattaatatctgaaaatgttagtcttcctttaagtcatagaacttatttaaacataaaccaatttctattacaggttatgctattaaatagctgtaattattaagttattatttttataattagttgttaaatttcattttacacccactcaaatttaacaaagaatctttagcccctttaaattttagaattaaattaaatttttaaagttttacttctaaaatgagattgtgactggcaattgtttatagtgaaactttttaaattaatctttgtactcctctatcagtgcttgctaccaagagaatgtccaaaatgatttgttttaccatgggaaaattcttactattcaacaaactctcagttggccccctacagcagtctggtgttgaagtttctttgaacgaactaaatatactcattttatgtaaaggtatccaatttgattttgaaaccaaaatagaaaatgcaaaattctaaattccatgaaacatggaatttatgacaccaaaatcaatggagagtaagcagcagcaaactgagaattatccagcatatgaatataacaatgtgtttttaagtaatcaattcatttaaaaaattgaatattaatacaaagcatattaaaaacatgtaaatatt

SEQ ID NO: 630 - DNA, 3450 bp, Homo sapiens
gagtggagaagtgaagagtgtgatcctggaggctgtcttatagaattgacaacccaattgaccattataatgaccgggaaacagatttttggaaacattaaagaagccatttatcccttggctttgaattggtggagacgccgaaaagctcggacaaactctgagaagctgtatagtcgatgggagcaggatcatgaccttgaaagttttggaccccttgggcttttctatgagtacttagaaacagttactcaatttggatttgttacactatttgtggcctcttttcctttggctcctcttcttgctctcataaataatattgtagagattcgagtggatgcctggaaacttaccactcaatacaggagaactgtagcttctaaagctcatagcataggtgtttggcaagacattctttatggaatggctgtcctttctgttgcaactaatgcctttattgttgcatttacgtcagacatcattccccgtctagtttactactatgcttactcaacaaatgccacacagcctatgacaggatatgtgaataatagcctgtcagtattcctgatagctgattttccaaaccacactgcaccttcggaaaaacgagacttcatcacttgcaggtacagagattacagatatcctcctgatgacgagaataaatattttcataatatgcaattctggcatgtccttgctgccaagatgaccttcatcattgttatggaacatgttgtgtttttagttaaatttttgctggcctggatgatacctgatgttccaaaagatgttgtggagagaatcaagagagaaaagttaatgactatcaagattctccatgattttgagctcaacaaattaaaagagaacttgggaattaattctaatgaatttgccaagcatgtcatgattgaggaaaacaaagcacagctggctaaatcaacactctaatcagtatagtgaggaagcagcaggtgatctgccttacttcactttatcctctggttttagggccagacgccagaagccatgtgtcaattttaccctttctttttttttttttctttttttttttaaactcaaagtttttatacacttttatagaggccaactttgtgatgttggaaatgtactacttctctgcttcattgactgggccctctccagatgttgttttctgaggtgctgtaaatgactgttgaaagtgcaggtagaatcagaatactgggaaattatggagtcttgcagtttagtaagaaacactggccttgggctgtcccatcactttccagtgcatctatttatttttgtggtcttctcttgggttatttgatacctccttccccattaagaaaaatgttggggcaaaaagaaatggatcaaagagactgactgagccctatatatcctatcattttaaaatatgcaaatgaattgccaagatcggatgacataagaaaactcacacattaaggtgttaatgtatcatagcagaggtttattcctaacacattcaactaccatcagaatcccagatagttcttcctggtaaaggcagaattccttttctcgagactgaaattttgggtttcaacataaaacaacttggttcttagagataataatttggttataatagtttcaagactgatcttatctggaaagcaacattatgaagctgttagattgcttcaggttctcaagcaaagacacaatacagaagtaaatgtgttttcttagtagttaatggatgcaggacaatgtatattgattaatttgttgattttaatttagaaaattgttaaattatttcttaaaaatcacttttcttctggaatgccaatttcacatcatgaagcctttttgtataagttagatacgagttgtttatgataaacatttctttgctttaaaataattgcaaatattttaataagtttacaaccttttctattgatgtatcatcttatacaatgctcagtgccttgttccaatacctctgacacacaagaagtcatgttgttagctagtgatttgatgtgatgtaacatcttaaatgtaagcttgtcttaatgaaattgtcagtgtaataacaactacagtcttgaaaaccaaaagtgaatcaaccaactaagaatgagttcatggacttaataatctaagggggaaaaaatgtttgttgaattattcctctcaaatttaggcttgtgttacatgcacaaaaatccttgttcttttttcacttaaaaaaactaaatatgtataactttgtgtatacacacacacacatctatatatataattattagcactagagggatatagtccagttatgtagtatttaaatctccagtttcaaattataattcacctccaaaagaatagttttttaatcacacacataagaaattttatcacaatatttaaaactaatatttcattatctaatgctaataaattattgtggtactgccagtattaaatatatggcagatggtattaactactgatcaatagtaagcatacagaactggggattatggattttataaactatgagacagtcaccccagtttggactgggactaatccccagtactgatttgtcatccactgagtagactttatgaatattttgggtaatttgaaatgatctcattattgaaagatgatttcatatgtagagaagataatatttctttcttgaaaaacaagtcaggcttaccatgatgtgtgcaaccaatgtaggatctttggcttgtcaaatcagattctccattgctatagtgtacagtgcacacagctcatattgcttccttcctgggtgctgataaaaataagagcatggaaattggtttcttgaatataagctttaatttttaaggcttaaaagtattcatagaggtagactgtatgataaataaaaacaaatttaattcacaaagttatctgtacactgcagttttaaaatataccaactaaattattgggtttctggaagtgaatggagaaaacagcaagggaagaaatcgtttttaagataagtaaataattcccatggattgataaatattttccttttaaaatgttatggactgatattttttattcacctttaaatttcttatcaagaagtttatctttgtttttcagatttaaaaatgaaatacaggtattcgtcactttcctgaaaccatgctaaccaaaatcagtagccaaaccaattcagatagatgtgtctcatctaattaaacccattggtttttatgggagggctgcattaagagcacccaaccaccacatgtaagttgataattaccagcatggcaggtgattttatctgctgaccaagcgcatagttttgttttgttttcagaatgttctagggaacatttgagattttatgtgaaataaaattttaagtgccaaagccaaaaaaat

SEQ ID NO: 631 - DNA, 3584 bp, Homo sapiens
tgtcacacgagactggaagtaatacacgcagtgcctggcatgctgtatgcagccaatgcccctgtgtctggctctcaggagaacacagtgccacccagccagctgctgctccagcagctcagtccagcccctcacccctggccacaggctcctgcagaaaggagcctccctgctccagccctggccaaggctgcccgttcagcctggaacctccatctcccttttaccgaccagcaccttgctcctttcctgttcccctcctccatgacccagcttggggacccctttcagcagccttgggacagtggcttctgcttgcctctgcctgcttgcatggattttgccctattcattctttctttgagcatcatttccctccattccatctgctgtaatgttcagacatttgcttgggtcctttgtcaggaattgtgttccagtaccactgtcattatgcaagatgatgtttgcaaaccatattcgtttcctatcgccactgtagcaaattagcataaactgagtggttcaaaccaacagaaatgttttataattgtggaggccggaagttgggaatatgtctcgtggggataaaatcaaggtatcagcagggctggtcctggagactccaggggagaatccattcattgccatttccagcttttggtggttgccagcatcccttggtttgtggccacatcattcgaatctctgccttgttgagcacatcaccttctcctctgtcctagttagtcaaatctccctctgcctccttcttataaagatacttgtgattccatctagggcccacccaggtaatccagaataatctcttcatctcagtgttcttaacctaaccatatctgcagggtcccttttgccatctaagggaacattcccaagttacagggattagggcatgttcttcttgggagccattattcagcctaccacactgggcttttgaccttttatttttaattatctatgcttttatttttctggttcacttccctatatagtaaaagagctagttttctacttagggtagtggtctaacatttttctaagtcactttttaaagtaaaaagggcaagttgttttcattgaaagaatgtgaagtgcacagctgcgcaggtggaactgatctgtccaacctggagaagggagtgtctggggcatccccggggatccttcctgccctcctctcagtctagagcatcttaagtgtggggctgtgcctcctcccactgtgcctcacccactctcctctgcccctttccccggcagctcaccatcatcttcaagaacttccaggagtgtgtggaccagaaggtgtaccaggctgagatggacgagctcccggccgccttcgtggatggctctaagaacggtggggacaagcacggggccaacagcctgaagatcactgagaaggtgtcaggccagcacgtggagatccaggccaagtacatcggcaccaccatcgtggtgcgccaggtgggccgctacctgacctttgccgtccgcatgccagaggaagtggtcaatgctgtggaggactgggacagccagggtctctacctctgcctgcggggctgccccctcaaccagcagatcgacttccaggccttccacaccaatgctgagggcaccggtgcccgcaggctggcagccgccagccctgcacccacagcccccgagaccttcccatacgagacagccgtggccaagtgcaaggagaagctgccggtggaggacctgtactaccaggcctgcgtcttcgacctcctcaccacgggcgacgtgaacttcacactggccgcctactacgcgttggaggatgtcaagatgctccactccaacaaagacaaactgcacctgtatgagaggactcgggacctgccaggcagggcggctgcggggctgcccctggccccccggcccctcctgggcgccctcgtcccgctcctggccctgctccctgtgttctgctagacgcgtagatgtggagggaggcgcgggctccgtcctctcggcttccccatgtgtgggctgggaccgcccacggggtgcagatctcctggcgtgtccaccatggccccgcagaacgccagggaccgcctgctgccaagggctcaggcatggacccctccccttctagtgcacgtgacaaggttgtggtgactggtgccgtgatgtttgacagtagagctgtgtgagagggagagcagctcccctcgccccgcccctgcagtgtgaatgtgtgaaacatcccctcaggctgaagccccccacccccaccagagacacactgggaaccgtcagagtcagctccttccccctcgcaatgcactgaaaggcccggccgactgctgctcgctgatccgtggggccccctgtgcccgccacacgcacgcacacactcttacacgagagcacactcgatccccctaggccagcggggacaccccagccacacagggaggcatccttggggcttggccccaggcagggcaaccccggggcgctgcttggcaccttagcagactgctggaaccttttggccagtaggtcgtgcccgcctggtgccttctggcctgtggcctccctgcccatgttcacctggctgctgtgggtaccagtgcaggtcccggttttcaggcacctgctcagctgcccgtctctggcctgggcccctgccccttccaccctgtgcttagaaagtcgaagtgcttggttctaaatgtctaaacagagaagagatccttgacttctgttcctctccctcctgcagatgcaagagctcctgggcaggggtgcctgggccccagggtgtggcaggagacccagtggatggggccagctggcctgccctgatcctctgcttcctcctcacacccccaagagcccccagcccggtccatccacgtctggagtctggggagaggagcagggtcttaggactctcagctctgagcatccctggcagggtcttcaacctctaatctcttcccttaagccctgtggccacacagccaggagagacttgccgctggctcccgcctcatttcagcccagggtgctcatccaggggcccagaacagtcccacctgtgctgctatgcccacagcacaaagccaggcttcactcccaaaagtgcagccaggccctggagggtgatcctgccagcagccctacagctccacaccctacccacccatcggcagcccctctgctgttccccagggacctctcatacactggccaggaggctgcagaacgtgtgtctccccctccctccaagaggtcctgctccctctgccagaaccgtgtgtgggcgggtgggagggcgctcggggcccggcccctccctctccctgctggttttagttggtccctatgttggaagtaaaaagtgaagcactttattttggttgtgtttgctcacgttctgcttggaagtggggacccctcactgcgtccacgtgtctgcgacctgtgtggagtgtcaccgcgtgtacatactgtaaattatttattaatggctaaatgcaagtaaagtttggtttttttgttattttctt

SEQ ID NO: 632 - DNA, 4980 bp, Homo sapiens
agtgaaagtccagtttatgtatggagaggatccaagcaatgccatgccggtaatctttggtaaatctagctgttcagaattttcaaaggaagcctatacagccgtagtatatcataacaggtctcctgattttcatgaagaaatcaaggttaagcttcctgctactttaactgaccatcatcacttgctttttactttttatcatgttagttgtcaacaaaaacaaaatactcctcttgaaacaccagttggatatacatggataccaatgcttcagaatggacggttgaagactggccagttttgcttgccagtctcattggaaaaaccaccacaggcttattctgtactgtctcctgaggttcctctacctggcatgaaatgggtagataatcacaaaggtgtttttaatgttgaagttgttgctgtttcgtctatccatacacaagatccttatcttgacaaattttttgctctggtcaatgctctggatgaacgcctgttcccagtccgaattggggacatgcgaatcatggaaaataacttagaaaatgaattgaagagcagtatttcagcactgaattcatcccagctggaaccagtggtccgatttcttcatcttctgctagataaactgatacttttagttattagacctcctgtcattgctggccaaatagttaacctaggtcaagcatcttttgaagccatggcatcaattataaatcgacttcacaaaaacttggaaggaaatcatgaccagcatggcagaaacagccttcttgcatcatatattcattatgttttccgcctaccaaatacttaccctaattcatcatcaccaggtcctgggggtttgggaggatcagtgcattatgccacaatggctagatctgcggtgagacctgcaagccttaatttaaatcgttctcgaagccttagtaatagcaatccagatatatctgggactcccacgtcaccagatgatgaagttcgatcaatcatcgggagtaaggctatggatcgaagttgtaatcgtatgtcttcgcacacagagacgtcaagtttcttacaaacattaacgggacgcttaccaactaaaaagctttttcacgaggagctggctttgcagtgggttgtttgcagtggcagcgttcgggaatcagctttgcaacaagcctggttcttttttgaattaatggtaaagagcatggtgcaccatttatactttaatgataaacttgaggctccaaggaaaagtcgttttccagaacgtttcatggatgacattgcagctcttgtcagcacgattgctagtgatatagtttcacgatttcagaaggacacagaaatggttgagagactcaatacaagccttgcattctttctcaatgatctgttgtctgttatggacagaggatttgtttttagccttataaagtcctgctataaacaggtgtcttcaaagctttactcattaccgaatcccagtgttctggtgtccttgaggctggattttctacgaatcatctgcagtcatgagcactatgttacattaaacttaccctgcagcttacttactccacctgcatctccatcaccttctgtttcttctgcaacatctcagagttctggattttctacgaatgtacaagaccaaaagattgcaaatatgtttgaattatccgtgcctttccgccaacagcattatttggcaggacttgtgttaacagagctggctgtcattttagaccctgatgctgaaggactgtttggattgcataagaaagtcatcaatatggtacacaatttactctccagtcacgactcagacccgcggtactctgaccctcagataaaggctcgagtggccatgttgtatctacctctgattggtattatcatggaaactgtacctcagctgtatgattttacagaaactcacaatcaacgaggaagaccaatttgtatagccactgatgattatgaaagtgagagcggaagtatgataagccagaccgttgccatggcaatcgcagggacatcggtccctcaactaacaaggcctggcagtttcctcctcacgtcaacgagtggcaggcaacacactaccttttcagcagaatcaagtcgaagccttttgatctgtctactttgggttctcaaaaatgcagatgaaacagttctacagaagtggtttacagatctctcagtcttgcagctaaaccggctattagatctgctttatctctgtgtgtcttgctttgagtataaagggaaaaaagtgtttgaacgaatgaatagcttgacctttaagaaatcaaaagacatgagagcaaagcttgaagaagctattcttgggagcataggtgccaggcaagaaatggtacggcgaagccgaggacagctcggtacgtacacaatagcttctcctcctgagagaagcccatctggaagtgcctttggaagtcaaggaaatttgaggtggaggaaagatatgactcactggcgtcaaaacacagagaagcttgacaaatcaagagcagagattgaacacgaagcactgattgatggaaacctggctacagaagcaaacctaatcattttagatacattagagattgttgttcagaccgtttctgtaacggaatccaaagagagcattcttggtggagtgctaaaagtgctactacacagcatggcctgtaaccaaagtgtagtttatctacaacactgttttgctacacagagagccttggtttcaaagtttcctgaactcttatttgaagaagagacagagcagtgtgctgatttatgcctcaggcttctccgacactgtagcagtagcatcggtacaatacggtcacacgccagtgcctccctttacctactaatgaggcaaaactttgagattgggaataactttgccagggttaaaatgcaggtaacaatgtcactatcctccttggtgggcacatctcagaattttaatgaagaattcttaagacgttctctaaagactatattgacatatgctgaagaagatctggaattgagggaaacaacatttcttgatcaggtccaggatctggttttcaatctccatatgattctttctgatactgtgaaaatgaaggaacaccaggaggatcctgaaatgttgattgatctaatgtacagaattgccaagggttaccagacctctccagatctgcgattgacctggttgcagaacatggcaggcaagcactcagaacgaagcaatcatgctgaagctgcacagtgtctagtccactcagcagcacttgttgctgaatatttgagcatgctggaggaccggaaatatcttcctgtgggatgtgtaacatttcagaatatttcatctaatgttttagaagaatctgcggtctcagatgatgtggtatctccagatgaagaaggtatctgctctggaaaatactttactgagtcaggacttgtgggattactggaacaagcagctgcttccttctctatggctggcatgtatgaagcagttaatgaagtttacaaagtacttattcctattcatgaagctaatcgggatgcaaagaaactatccacaattcatggtaaacttcaagaagcattcagcaaaattgttcatcagagtactggctgggagcggatgtttggcacctattttcgtgttggtttttatggaaccaagttcggggatttggatgaacaagaatttgtttacaaggagcctgcaataaccaaacttgcagagatatctcacagattggagggattttacggagaaagatttggagaggatgtggttgaagtaatcaaagactctaatcctgtagacaagtgtaaattagatcctaacaaggcatatattcagattacctatgtggagccatactttgacacatatgagatgaaggacagaatcacctatttcgacaaaaattacaatcttcgtcgattcatgtactgtacaccctttactttagatggccgtgcccatggggaacttcatgaacaattcaaaaggaagaccattctgactacgtctcatgcctttccttatattaaaacaagggtcaatgtcactcataaagaagagatcatcttaacaccaattgaagttgctattgaggacatgcagaaaaagacacaggagttggcatttgcaacacatcaggatcccgcagaccccaaaatgcttcagatggtactccagggatctgtaggcaccacagtgaatcaggggcctttggaagttgcccaggtttttctgtctgaaatacctagtgacccaaagctcttcagacatcataataaactgcgactctgctttaaagattttactaaaaggtgtgaagatgccttaagaaaaaataagagcttaattgggccggatcaaaaggagtatcaaagggaactggagagaaactatcatcgccttaaagaggccctacagccactgatcaacagaaagatccctcagttatacaaggcagtattgcctgtcacctgccacagagattccttcagtcgaatgagccttcgcaaaatggatctctaaactgaatgcacttgttttattcatctgcaaagagccatgtattcaacatcgagtgtgaaaagatctattggaaaacaacatggaatggaattctggaaattattattcattgaagaatgcagtggccaagaaaatatcaaatgtagattgttaacgcttgagaatcatggctatggtttctaatgttctggtaacaagctgttatcttttaagacattttaatgactcaaaggtacactatacatttaccattatttataccatagctaaggttaaaaatttattcactttaagttcgtattttttaatttatattaccatttatagattcattttggaaccattttaaatgtagtaatgcttattttaaaggtactattaaatatgtgaatgtttacact

SEQ ID NO: 633 - DNA, 5127 bp, Homo sapiens
agatgcgcccagcagcggctgcgccgggaccccacgttttccgctcaagatgaagacgctaaaattcagagctcaacacatggcatagtcaagacttgaactcaagtcatcaaactccaaagtctatgctcaaccacagtgccctcctgccttctctgctataatacagtccactggaccttcacatgtcaaaatgcagattccccaaatccatctgctcttgcagatggccaaaaatgtccatatattgtcttggtttcacctttgttgtgatgtttctcctcactctgtgcatcctgtgaatgtgtcaaaacaatttgggacatgcatggctatgtatgtgggtgcttttgtgcatgtgtgcatgagtgtgtggatgtgtgtgtgtatgcaggtgtacacttgtgcatatgcaagtgtacataggtgcatgtgtgtatctgtgagcacatgcatgtatgtgtgggtaagagttcatgcatgtgtatttgcacctgtgtgcatgtgtgtgcgcatatgtctgtgaatgtatgcatgtgtatttgtgcgcctgtgtgcccatgctacatttcacagacaacagttcctgcttggttgttatgggaaccacagttctaaaaatgttaaactgaatcccactccatgtgaaccagagaaaccaaaagagagagagagctcagtgacggagacacctctggggtcccagagctgaggcaaagaattgtgggctcagcaagagctggaaagacccagactagccagaggtgtagacccactcatgaggcctatggtgcctatcagggccccttgctgcagactcggtcctcagtcctgctttttcccatctttccctcctgatcctttctcctccctctctctttgccagcttcatgctctccaaccaccttccttccctcctccttcccctttctgtttcccttctccttttgggttttttttgttgttgttgttcaactaattgacacaataattaagcactttcatgttagacttggtgatatggggaccacacatgtggatcaaatgaggtttctgcccttgaaggtgctcaaaggtgggagcatttggataactggtgggggaagggaggtggcagagcaaagcacaaagggagagatgacagaggaggttggaaggtgaatttggatcagatatagagggctttcacagcaagggtgaaaaataggtattgtttttataggagggtggaaaccttggtcagtttgggatgaagctcttgtttgttgtgaatggtgtattaggaaattttcatcattaatgctgggcaatgtggaatgaaagaggcataatggaggcagagggaccacaggacgcagtttggcatagtgtaggcttgtctcaaatagggtacaggagttggggtgaagagggagaaaatagcaaacattctgggttgctttctcaaacttcccccccatatcccacctcatcaagatttgtattactttttcccacctttctggtgtgagaatcaggacttgagtgagcctctgttactgatgtgtgtgtcgaatttctcaggtgccccaggaagtaaaatagttgggaatcactggcccagcatgtagtagcactcagtatctgtggagtgagtggatatttagatatgcactggtcttggaactggaaggcccaggttcaaggcccatttcattctcttattatctgtgtgcccttcagaaaatccccaacatcttgggcttcagtattctcttctatagagtgtgggtttggacaggatgttctttttaaaaaaatacttaaaaaaatagagacagagttttgccatgttgcccaggctggtcttgaactcctggactcaagccacctacccgccttggccttccaaagtactgggattacaggcgtaagccaccattcctggcctggacaggatgttcttacaaactccttccaactgcaacgctattatgtgattctatgaaattgacatagccaaggtatgtgtgtatatggagggagtggcatggactaaggtgctggcaataggcacagagaggataaatgtgggaaatattttaatagaagaattaatatcatctggcttcagttttcaacaacattgttgactagatagcccaaagactctcttgctacaaaatatgtggattgcttcataaaatgtaacagacatctcctgaaatgcttggctgagcttgcaagaaagggaaaaaaatctacatggaccaaaatagggggactgagaccaagaaatataagcatgagatgtgctgtgactaaccccagaaggtatgggaagggaggcatattgcttgtttgtcctgacctggatcctggttagagaagtgggaactgtctctgagaatttataactacttgagttggactttgaactcaaaacatctgcatgttacaagaacctcaaaccaagaaattaacaaaagattggtctccatcaggtgatactcttggagtgtctggtagaagcaaacaggaaactgctcaggagaaacataccatcacccaaggccacagagcattgctgcccaagtaaatccccactgaagttgagctcacaagctaaagattataatacgtaacctggaacaatgtaccgtgaatgagagtagagaagaccctgaagaattacaataagattcaacaagtctaagtgacagcctggatgtgtggggtgggaagaagcaaaagcgaatcccacagagctgtagttacttagatgaatccagggaatcaaataatgttgctattaccagaaatatggaagggtgatttgattttagacagactgtatttggaatggtggtgggacatccatatgggggtattcattagaaccatggggctgtctgacttagaagccatctacgtaggaataatagctgaaggcctggcaatgaatgcactctgtaaggaaagtgttgaaataggaaagaagagagctaagaactggtccaggaaaacactcatgttttgaggaccagttgaaaaagaggagcaaataaggaaaatgagctctttggtctccaattctggttgggtcctgggtttggattttcacattgtttggttttaattctttccatctctagtctaatattctcatccctcacaatccctaggggaagctccaataaatgggagcagtgtcccttgggacatagcaggaacttctcagctaggagttatagagccagactgggctctggtaccaggactactactaagtcacttctttggggttcaattttctcatcagtgatgttaggcctaggtgggtgtgaggataagaataatagagctgatggcacttgctggaatgctgctggagagggcaagataggggtgatcagaggccagccacccactgtctgcgtttcctcctttgttcagcttgtgtgttttgggaccagttgcttgaaatatgggccattatgcttttcttgccctactcttcatgaaaagtgaagtcaggtggcccatgcctaataagtgaaaggtgtggtgacttaaatagtaagacaatgagggtcatgattatcttgtgtctccatgaatctaccacttatcacagtgcctgacagtccacaatttgagcctcttcattgggttaaacattgccctctgcaggctactgttctaaaatgttaattctcctagaagaggtaatattaaatcctttaccacaaattagtttcttagatacaagatacttggccacatgaaagcacttaaaacctagggagagaaaaggatggaattctctgagttgatcattttgtctctggtcagctggactgtggggtggagggtgagcatatcttagagtgaaggagtgaagaaagcagcaagagtatcagaagctggtttgatctggcatcatagggctgtaaggtctcttaattcaagaacagctcagctcagaagagaaaacaatgaagtcctcagacacaggccttctttcttccttatcagagaggggtcattggagcagagagatggagagcacagcggcctttttatgctccaaggtctgcccaaggtggccagaaagagtggaaaagctttgggtggggagttcaaagagtaaaaaggggccaccttcaccattacaaggtcatgctttcctcatcaccctcctagccttcctctgatcccaaagccatgaagagttcacttggaaggacagctggagaaaagtggctgtggcaggcgcatggctgaatggtaagtaggctgatgccacctggagaagatcctttttgtgggaagagcaactaaggtgaccatcagtctctggcaagtgcctgctcccagctatattcaggtgtgctctagctaaatgctgagaccctttgggtcctgacatcacgtgactcttgaacagatgcatagatactgtctggagcctctgtgacactgaacactctgggctttcacaaacagcaccaaaatactgcagccttttgctgttgtcgctactgcctggagctccctctagctgccaaacctgtttctcaccttctggtaggaagcctttccaatcagtgctattaagtttaggtgtctccattctggggttggaaaatgagggttggctttgaagttggacagatttgtttgacctgtctgttcctagcctgggttaactacattgttccagcaagctatctacattgcttccacatctttgaaatgaggtatatgcctgctttatttgggaatgcgaggattaaggagaataatatatacataatgttgaacacctacgccttttaaccactttgaggttccagaaacacctccagcccttaggtgagctgtgattaaattcgttcattaacccaacacacatttactgaatgcctactctgtgccgcagttcctggcaggtgtgcctgacagtgggtgtgtaatatgttcagggtctgtatcccatgagcgtggggatctcctttatcttctggcacatatggtcctgggggagaagctaaggggaagggtcaggagcttacatggcagattcagtaagcttttagcacaataattttaattgcaaaaataaacagttttgtcaactgcttg

SEQ ID NO: 634 - DNA, 3123 bp, Homo sapiens
ggccactgcgggaggcgcgcgcgcgaggcagccaagccttgccttcggaggagatgcccaggaatcttagcaagcagcctgcggctgccagggatcggacctggcgagtttcccgacggaatctgagggatcccgaacctcggcctcgagggggcgctatccggcctactcgaggaccaggcagctgcagagaagctccaaggtcaaggccctgggccaggccagggcttggagagccggaatctagcccgagtcctggggaggctgaggcggggaaccagatccccgaggacaaagatgggcgggccagtgggatccaccgacgctgcccggagctgctccaacgagagctgggcctgtggcgtgaacaaactttacttcagcgcaggggcggaggaaccgggctggaggcttctcccccgggcctctgctctcctccacctgccagtgctcagcctccgcccagccttcgcccaccccagctccctccccctcccccacgcgcctctgttcactcagactcctgtctcccctctcccctcctccttctccctcttgcctttctcccccacttttctcctgtctcttcttttgtattctctcctccctcgccgccccggttgcctctcgcctcctccgggccgcaggggaggaggtgagcgcgctgcgcccggggcctgcgcggctcagagggaggcgtttctcctacttctcccgggtaatttggagaggttgtgtgtgtgtgcgcgcgcgcgtgagctccaggcgaaaaggggtaggattcagcgccgagcagagagggtcagggtttttgacgttcctcgccagctgcacaaacctcccggagcaagtgtgagtgtgggtgagagtgcgcgcgcgcgcacgggctggctgcgcttggcacgcttggtggcccagggtcccggggcccggggtcccgtctggcggcccgggattaccgtgacgtcacattgagcctctggccaccttggactgggacacctccggagcctcacagccccgcgccgcgccgcgcctcacctcgccaccacgcgcctttgggaacccgcatcttcttccttcccctgcccatccatgggcccttctgtcttccggaccccacgggccggaggggcgccttccggagcgcagggctcggcagccgggctgccctcggctctgcctccactggggccaaccaggcgaaggaaccggcgctgggcatccgcagcggtgtaaggaactgagacacctcactgctgggggcgcggaacagctgggctgagacgggaactcgacagggaagagagagacgggccagggacagccaccatgtccttcccacactttggacacccgtaccgcggcgcttcccagtttctggcgtcggcaagttccagcaccacatgctgcgaatctacccaacgctctgtctcagatgtggcatcaggctccaccccagcgcccgctctctgctgcgcaccctacgatagtcgactgctgggcagtgcgcgaccggagctgggcgccgccttgggcatctatggagcaccctatgcggccgctgcagctgcccagagctaccctggctacctgccctatagcccagagcccccctcactgtatggggcactgaatccacagtatgaatttaaggaggctgcagggagttttacatccagcctggcacaaccaggagcctattatccctatgagcggactctggggcagtaccaatatgaacggtatggcgcagtggaattgagtggcgccggtcgccgaaagaacgcgacccgggagaccaccagtacactcaaggcctggctcaacgagcaccgcaaaaacccctaccccactaagggtgagaagatcatgctggccatcatcaccaagatgaccctcacccaggtgtccacctggttcgccaacgcacgccggcgcctcaagaaagagaacaaaatgacatgggcgcccaagaacaaaggtggggaggagaggaaggcagagggaggagaggaggactcactaggctgcctaactgctgacaccaaagaagttactgctagccaggaggcccgggggctccggctgagtgacctggaagacctggaggaagaggaggaggaggaggaggaagctgaagacgaggaggtagtggccacagctggggacaggctgacggagttccgaaagggcgcgcagtcactgcctgggccgtgcgctgcagctcgagagggccgattggagcgcagggagtgcggcctggctgcgccccgcttctccttcaatgacccttccggatcggaagaagctgacttcctctcggcggagacaggcagccctaggttgaccatgcactacccatgcttggagaaaccgcgcatctggtctctggcgcacaccgcgacagccagcgctgttgaaggtgcacccccagcccggcctaggccacgaagtcctgagtgccgtatgattcctggacagcctcctgcctctgcccggcgactctcagtccccagagactccgcgtgcgacgagtcttcctgcatacccaaagcctttggaaaccccaagtttgccctgcagggactaccgctgaactgtgcgccgtgcccgcggaggagcgagcctgtagtgcagtgccagtacccgtctggagcagaagcaggttagcgcaatggctgcgatttgcgaaagaatcttggaaatgggccccacgtttcgaattcatctccaggttaagaagctgccagaccttgccagggaccaggagctctcactttgcctaagagacagacacacagaaaccctcctagcagctgtccttgcacgcagagctggggtggtgggccgacttgaaccttagcagtccccacgggagatggcagggcaccttggggaaggccaagtgggaagctgggaggctgccccacccaccgactctaccaagtctctcttcctcctgtggattcagcaaggcttcctctcctgctcacccctgtctctcacctccaccaaccccactcactttgtaacttcatcactgacccggccaataaggaccctgtgcgtcttctccccctcctaagcccttgtgtccttaaaaataatcagtccgaaccc

SEQ ID NO: 635 - DNA, 4871 bp, Homo sapiens
ctggctctttttatgaatttggaagtttttagactaggtggttgtagtgttgcctcccgggtgttaggatccctgggcgtcacctctcagctcctgctttccatttcctcatcataaaccctgtttttgttctcactgtgaccctgttctgctttgaccctacagctcgctaccacctctgtggtttttttcttttcaggaagcttagggtggtaaatgcttttggccattcttgttcatactcatttattcagataccatttattaatagtaagcccctgctttgtgtaagcactttgttagacactagggtgctcctttgacccccccatcccactccattgtgagctggctcttgtcctcagggtcctgctcaacatcatgtacctgatagtggagaccgttcatcaggagtgtgagggtgacaaggctgagtggaggaccatgcggcagaccttcagagccgagctgggtaggaccctggggatcctctctagaggccctgcctggaagctgaggcggaaggctttgggagggtcctgatacctttgtgtcacctccaggctccccgctgtacaacaatgagccatttgccatcatgctgtttgggatggtgaccaaattttgcagtggtcacgcccctcactttcccatgaagaaagttctcttgctgctctggaagacagtattgtgcacgctaggcggctttgaggagctgcagagcatgaaggctgagaagcgcagcatcctgggcctccccccgcttcctgaggacagcatcaaagtgattcgcaacatgagagcagcctctccaccagcatctgcttcagacttgattgagcagcagcagaaacggggccgccgagagcacaaggctctgataaagcaggacaacctagatgccttcaacgagcgggatccctacaaggctgatgactctcgagaagaggaagaggagaatgatgatgacaacagtctggagggggagacgtttctcctggaacgggatgaagtgatgcctcccccgctacagcacccacagactgacaggctgacttgccccaaagggctcccgtgggctcccaaggtcagagagaaagacattgagatgttccttgagtccagccgcagcaaatttataggttacactctaggcagtgacacgaacacagtggtggggctgcccaggccaatccacgaaagcatcaagactctgaaacagcacaagtacacgtcgattgcagaggtccaggcacagatggaggaggaatacctccgctcccctctctcagggggagaagaagaagttgagcaagtccctgcagaaaccctctaccaaggcttgctccccagcctgcctcagtatatgattgccctcctgaagatcctgttggctgcagcacccacctcaaaagccaaaacagactcaatcaacatcctagcggacgtcttgcctgaggagatgcccaccacagtgttgcagagcatgaagctgggggtggatgtaaaccgccacaaagaggtcattgttaaggccatttctgctgtcctgctgctgctgctcaagcactttaagttgaaccatgtctaccaggtacccacagggctttccctcctgtcctgtgggctggggcctcgggcactgctgctcctccagcccacaagaacgggggccttggcctttgacccacttgaactctgcatgaatgttctaagacatggcccttcagccaaggcctttcatccctggaggaaagagggcaaggtcccaagggccgcgccttttttttttttttttttttcctgttggcttcagtttgaatacatggcccagcacctggtgtttgccaactgcattcctttgatcctaaagttcttcaatcaaaacatcatgtcctacatcactgccaagaacaggtgatgagggccagggaccatgaaggggtggatatggtcagacggcagagttcccagctggtatttcccactgtgtccatttttccagcacctacgagccagcactgtgctaggcatcaagacataaagataaatgagacatggcctctgcctgtggagagcccactgtgtcaaatctgagtctagctagtcctgccccaggtgacttggtctgtgcctgggcaggagggttttcatcccaggatctagtactttcctccctgtcccttctgtactttttttttttttttttgaggagtccatgggctgcttgctgtctctaaggggctcggccatgtgccttgtaatgccctatctgctgactcttagcccctgctgttggcctggtgccagctgtgcttgacattacttgctcgtcagtgtgatataccacagggcgccggccagaccctgtctccagaaaggtttggcataaattagttgccctgagcgatctcctcccccgccccacattgattgctgtgggggaagctgtgagggtctcttccccttacaagatcaacaagctggcctctggctacaggggtgctttacaagttctcttgtaacagatatttcctcatcttataggtggggaaactggggtgggacacatcaggtagattcctacttctgctccaacaagtgagggaggaaagctgggagctggctcaggcacggctgctccaccaggccctgggcctttgctcatggtgggcatctggttcctctcccctctgcagcatttctgtcccggattaccctcactgcgtggtgcatgagctgccagagctgacggcggagagtttggaagcaggtgacagtaaccaattttgctggaggaacctcttttcttgtatcaatctgcttcggatcttgaacaagctgacaaagtggaagcattcaaggacaatgatgctggtggtgttcaagtcagcccccatcttgaagcgggccctaaaggtgaaacaagccatgatgcagctctatgtgctgaagctgctcaaggtacagaccaaatacttggggcggcagtggcgaaagagcaacatgaagaccatgtctgccatctaccagaaggtgcggcatcggctgaacgacgactgggcatacggcaatgatcttgatgcccggccttgggacttccaggcagaggagtgtgcccttcgtgccaacattgaacgcttcaacgcccggcgctatgaccgggcccacagcaaccctgacttcctgccagtggacaactgcctgcagagtgtcctgggccaacgggtggacctccctgaggactttcagatgaactatgacctctggttagaaagggaggtcttctccaagcccatttcctgggaagagctgctgcagtgaggctgttggttaggggactgaaatggagagaaaagatgatctgaaggtacctgtgggactgtcctagttcattgctgcagtgctcccatcccccaccaggtggcagcacagccccactgtgtcttccgcagtctgtcctgggcttgggtgagcccagcttgacctccccttggttcccagggtcctgctccgaagcagtcatctctgcctgagatccattcttcctttacttcccccaccctcctctcttggatatggttggttttggctcatttcacaatcagcccaaggctgggaaagctggaatgggatgggaacccctccgccgtgcatctgaatttcaggggtcatgctgatgcctctcgagacatacaaatccttgctttgtcagcttgcaaaggaggagagtttaggattagggccagggccagaaagtcggtatcttggttgtgctctggggtgggggtggggtgtttctgatgttattccagcctcctgctacattatatccagaagtaattgcggaggctccttcagctgcctcagcactttgattttggacagggacaaggtaggaagagaagcttcccttaaccagaggggccatttttccttttggctttcgagggcctgtaaatatctatatataattctgtgtgtattctgtgtcatgttggggtttttaatgtgattgtgtattctgtttacattaaaaagaagcaaaaataattcccgttggcttgtctacaggaaatatggcctctacgtatctcctccaggtctagaaagtggttttttctgctagcattgctggtcaacgcttgtccttgtcaagctgcctgcctttcccatcctgggggaagaggagagagagttggcatttatccagtttatcaagaagtttactgtggaggatgaaaatatcacccagggaaatgtcaccaacaatttaaacaaggcagcctggatcaaaggctgagtcttctgcctcccatgacaaccttgctgagcctcagtttcctcatcagaaaggagagcctaccatgtgatccccatttgctggtaccaggatatagtggcacacacgacatgtgatccctgccttcacagtgcttacactttgctggaatggaagtgtctcatccacgttgaagaaaatcatcctcatttggctgtgaattagaatagaatctggtcttgtgagaagagttcctggctctgggcctcaactgtaaggtcagttcttcatttagggaaacatcagccccagcaccactttccgtttcattctctgcttccctcagcctgcaccacaggaaggacatgtgcttctttttcccccagtggatttccagaagggatagggacgatgagaaagaggtaacctcagatctgagatttgcttgacatacacaaaatttccttccaacagggaaaactcagttgctttttttccttcaaaggaaatacagttggtattacctttgtcctgtttagatactgaaatcctaaattgattcatataaaaattctgggtttgggaaccc

SEQ ID NO: 636 - DNA, 4133 bp, Homo sapiens
tttgcctcataaaagataaagctgcagttcagaagaactgatttctttttgatgtaattaatattaatgctggctgtcattgtccattcataggtccagaactcagctcagcagcccaggacttgtccctacccttctgctttcagccagacccccgtgctcagccttggtttacactccatgccttaccaagtggccattccacagccagtcgcttgctgccccctgctccctgcccccatgtgctcatctaatatcacctctgggggcaagaaagggggcagcacaaaagtgggagtgagcagaggggcagtgggtgtgctgttgtcttgcatgagcgacaagggaggttttgggttctctctgtctagtcaaactagacatatagagcttttcttcagacctaagcagtatagataccttccaaagcctaatataaggtttatttttaaattatctgcaataattatccatgccataattccctgccaccagaatgagtaatcaggaattaatggtagaggcatttctgcagtgtacatctgcaaggtggaatctggaggctctgcccatatgtggaaccaaggagaaggtggtttaatacagttacagctgcctccttcccagcaaatgccagtgggagtgatgccttcagttgagccaacagccgcctccctgcccctcatgggctcacccacagaaaacggcagtctcatctgtatgcagctctggtcactgtatttattgtttgggttagaatgaggaggtggcactagtttgtcttcatatgttctttactcctgattaatacgtaagaacatacttgctgatttcacttgcttctttgggcctgcttgttttaaattagaatatcaacattttcctggggtccattataacaccccccccccccacattttcaactaaaaacccgaacaagtctggtactctctagatttggtgttaaggaaacagaactggctcctctgtgggtcttctagtgttagagacttttcagagtgattttggataaatagtcaaacgtttactctcttcataaggtaggtagggtagaaattattttcgttttatattcttcccagcctctaagacttaatttttttaaaaaaagaaatgaaatgtccctgaacattttgtttctaggattatgcttgtgttcatcagtcggttttcctctggtgtgattttgctgtagtagattgggggtggaggaggtggcagggagggagggggtggtcaccacttgttggatcttaggataaagttggttgtgtccagaggtgactgatacaccttataatttcagactgttccatgtcatgtgatcactttaaactaggcttaatccaaacctctctctaaagataattcacaatagaggacagagtggtcacatagtgtttcttacagtgacatgtgcattagaatgatttgtagaccaaatttcaaacgtttccttttttggcaaattgtgtctgaaattatttgatttttcttttagaaaaacacaccaacttttatagccctatggctatgtaaataagatgatttctggaacacaaatgggcaaatagtatgtagaatatcattagaatcattatatcactgtcactggtcctggggttgccaggccttttctgattatcagatgcaacaaatgacgtccaattttattgaccagtttggcttcaacgatgagaagtttgcagatcaagatgacattggcaatgtttcttttgatcgagtatcagacatcaactttactctcaatacaaatgaaagtggaaatattgccttgtttgaagcatgttgtaaggaaagaatacaacagtttgatgatggtggctctgatgaggaagatatatgggaggaaaagcacatcgcattcacaccagaatcccaaagacgatccagctcggggagtacagacagtgaggaaagtacagactctgaagaagaagatggagcaaagcaagacttgtttgaacccagcagtgccaacacggaggataaaatggaggtggacctgagtgaaccacccaactggtcagctaactttgatgtcccaatggaaacaacccacggtgctccattggattctgtgggatctgatgtctggagcacagaggagccgatgccaactaaagagacgggctgggcttctttttcagagttcacgtcttccctgagcacaaaagattctttaaggagtaattctccagtggaaatggaaaccagcactgaacccatggaccctctgactcccagtgcggctgccctggcagtgcagccagaagcggcaggcagtgtggccatggaagccagctctgacggagaggaggatgcagaaagtacagacaaggtaactgagacagtgatgaatggcggcatgaaggaaacgctcagcctcactgtagatgccaagacagagactgcggtcttcaaaagagtgttgaaatcctatcgtgaggaagggaaactgtctacctctcaagatgctgcttgtaaagacgcagaggagtgtcccgagactgcagaggcgaagtgcgcggcgcccaggcctcccagcagcagtcccgagcagaggactggccaaccaagcgcaccaggtgacacttcagtgaatggccctgtatgacgggtgacgtctgctgctgctgactgaggactgcagaccgccaccactcaggggctctggaggggtcagctggagcccaccaagctgtcactgctgcactcactctgcaagggatcaggaccagcaacctttatattctagattctaagacattgtacagagaaattcagaagtgtaaaaatattgcacattgacaaataccaagaatttttgcgtatgtttatattgtattgttctaaataatgggtagcctgtgaaataagatcttgccacccatgtaataatagtagtaatactatagttaaaatggctgtaagaatagttttataaaagtgaatacacagatctattgtatttgaaacataactttgacaattattagtgtgaccaaagtattaggcggttttcatacatttttcaccttgtacaaaattatgaattcatttttcctccaggccgacaaggagttgtagaatgaaaatgccctctaagtgttattttggttgttctaacttacaaaagtgattttgaataagaaatatttggtgttctttttataaccagtttttgattggtaattgttttctgtattgtttaaaacggatcaaaaatgtaagtctattggtagagattaagtaaagtatttattgctacatcatagttgataaattgatgttatcgtaaagccatatgttctgttcaagtcttgtttgcttgaaatgattattcctacaagtgaaacactagactatttggagtgtatatggcttgtgttttgggatttttttttttttttttggcttttgtttttgtttgtttttttgtttcgtttggtagttcatctgccttttaacccattcaccaaaatttaccttgttaacaagcatcaccaatgaacatttcagagcaatctgcatatttaacagacctaaaataaatcctattaggcaagtcagttgaaaatgctcgtgctgctaatggaattagagtgcgttcattttacaggctagtattttaaaagtagaaatcaaaatctggcaccgaagcatgctaattgtttactgtaccttgtgaggttttcactcataaatttaaaccagtgtatttttttagaactggtttgtgtatatatatagtgattatggatactaattcaatgtaatttataattttctatgtcaatacaaaaatacatcacagccttctcaagcagctcaagcaatatattgtatattgccatatcgtctggtgaaagggttaaattacttcacctcttgcacttttagatgcaaatcagtttttcatttctgtaatagaaaattattcacgtatttttacatcatttgtttttcctgaccagtatttaaaaccaaaaggatattctgaaaaatggccaacaatttttttagaagtagcatcccaagcagcgtgcctaaacattacattgcatatggaaataaaagaatcaaacgtc

SEQ ID NO: 637 - DNA, 4877 bp, Homo sapiens
agctatgcaaacacgctgcgagcggccttgagagcccgaggagggtctgctttctgggcccctgcagagggcaggggtcgcgggctggtggtctgccccgcccagagagaaagggccttggcttcccctcattcttcgttctgtgttagctctttttattgcaaataattaattaaagtcagtacagcaagagtgggaaagtggttaatgcaattgccaggtccagattcagagggatgaggcgccgaaaggaaagacaaccttgggatcgcttccacttcctccacttcgcaccgcatggccggcaagttggcggctctcgcctgctcccagttttcccggagttgagtatggttgactctgactggaccaggttgggtcacgtgtcggccctgagccaatcagcttgcccagagagatgatgcgccctgagtggagggtgaacctggtgataggccccagagtggccagagaggaagggcatgcgcacaccatagacgtaggcaacgtggtggacgacatgggggctgggcgggggtgctgctcacccaccttgtgcccagtgctttcccttccccttgtccatggtcccctagcttggggagaaagcagggtgcttgctctacccgccagtgctgtctcggggctgcagggagttgtggctgccctgcttgcggtcttcactcccaactcactgtggctttgcagagctggagtccgccctatctgggcttgggggtctgctccctgagagcattatttggtgcccctcgactgtgttgattcagaaatctgggacctgttgtttctcgactaaatgtcttatgagatcagtctttcttttggaggcaaacattttcggaagttttggaaccatgatgttctatgcctcagacacttgtggtccctgagaagctgctgctggaaaaaggggtccccatccggatcccaggagagggttcttggatcatgccgggaaggaatccaaggcgagtggcagagcgcagtgaaaagagatagtttattgaaagcttctcagttacatagtagggcatcctcagcaagaggaggaatgcctctgttttgtttctttcttatataggggtcttatctatgtaaaagctaagctacgtctccctgcgggtaggctgacaaagtgacatttattactttgttgattgaaagaaagctatccttggcattttagtgcataagtacatcaaagcatgcctataatcatcttaaaagcatatattatgcaatattggggcatctggacattctgttgttgcaagagtttgtctttgcaggtattaagctacttcgtcagctgtaaacatcttatgactgtgggtcatgactggcaaggaatgtgccttgctagttttaagatggaattgattctaaaatggtgtcaccatggctcccctacgctcctgttcccctaaaaaaaccctgccgtaagcggacttaaggatagccttgtcaccctagcaatgtggcagtgaatctctgccaatagcaatctacaaatgttaaaaacttttctttttctggaaaagtactttccatgcattaagtattccagtgcctgttttcctggcactgggctggatgtatatgacataaaatttgcagtattgctccacccccaaactgctctgcattttggccctcctccatctctgatggctttctcttccctgtgctgcagggaactactggagaccacgtgccgcctggccaacacgctgaagaggcatggagtccaccgtggggaccgtgttgccatctacatgcccgtgtccccattggctgtggcagcaatgctggcctgtgccaggatcggagctgtccacacagtcatctttgctggcttcagtgcggagtccttggctgggaggatcaatgatgccaagtgcaaggtggttatcaccttcaaccaaggactccggggtgggcgcgtggtggagctgaagaaaatagtggatgaggctgtgaagcactgccccaccgtgcagcatgtcctggtggctcacaggacagacaacaaggtccacatgggggatctggacgtcccgctggagcaggaaatggccaaggaggaccctgtttgcgccccagagagcatgggcagtgaggacatgctcttcatgctgtacacctcagggagcaccggaatgcccaagggcatcgtccatacccaggcaggctacctgctctatgccgccctgactcacaagcttgtgtttgaccaccagccaggtgacatctttggctgtgtggccgacatcggttggattacaggacacagctacgtggtgtatgggcctctctgcaatggtgccaccagcgtcctttttgagagcaccccagtttatcccaatgctggtcggtactgggagacagtagagaggttgaagatcaatcagttctatggtgccccaacggctgtccggctgttgctgaaatacggtgatgcctgggtgaagaagtatgatcgctcctccctgcggaccctggggtcagtgggagagcccatcaactgtgaggcctgggagtggcttcacagggtggtgggggacagcaggtgcacgctggtggacacctggtggcagacagaaacaggtggcatctgcatcgcaccacggccctcggaagaaggggcggaaatcctccctgccatggcgatgaggcccttctttggcatcgtccccgtcctcatggatgagaagggcagcgtcgtggagggcagcaatgtctccggggccctgtgcatctcccaggcctggccgggcatggccaggaccatctatggcgaccaccagcgatttgtggacgcctacttcaaggcctacccaggctattacttcactggagacggggcttaccgaactgagggcggctattaccagatcacagggcggatggatgatgtcatcaacatcagtggccaccggctggggaccgcagagattgaggacgccatcgccgaccaccctgcagtaccagaaagtgctgtcattggctacccccacgacatcaaaggagaagctgcctttgccttcattgtggtgaaagatagtgcgggtgactcagatgtggtggtgcaggagctcaagtccatggtggccaccaagatcgccaaatatgctgtgcctgatgagatcctggtggtgaaacgtcttccaaaaaccaggtctgggaaggtcatgcggcggctcctgaggaagatcatcactagtgaggcccaggagctgggagacactaccaccttggaggaccccagcatcatcgcagagatcctgagtgtctaccagaagtgcaaggacaagcaggctgctgctaagtgagctggcaccttgtggggctcttgggatgggcgggcacccaagccctggcttgtccttcccagaaggtacccctgaggttggcgtcttcctacgtcccagaagcagcccccaccccacacatgacccacaccgccctcacgtgaagctgggctgagagccctttctcccatccattggaggtcccaggagtgtcacccatggagaggctatgcgacatggctagggctggttctgccatctgagtttggtttcctggaatgaaaaggcattgccatctccattcctctgccctcttgagccagcacaggaaggtgaagccctgggatagcgcgcctgctcagataacacaaagctagttagctagtagcaaccgtgttttctccagatctgtctagatacaaaggtcagaaatcttatttttatacttttatattgtggaagaacagcatgcaacactcacatgtagtgtgtggatttacttgaacatgttctttttaacatgtagttatgaaaatctccttttttgcctctactggtgaggaaacatgaggatcagaggccacatttttaattattgttagtgtatttggaagtctgaattggagatgtttgtacctctgtctaaatagttcccttgagaacttccaagcctccggcatcttttcctggtgagtgtttctcctgtgcttggttgtgtataatggagctaactcctaagcggtggggtgaatgtggccgccttagttctgaagctactccagttatgttctgtttcttcaagctgtgatccagaaagatttttgtgcccccagatgcctcttgataggagaggcaacatactccaaatagttgggttcttcagggaagctattagaaactcaggtgacttgttagagcactaacttggtcagagccaaatcctggcaaacgctgcctgaccttcactctgtggttggggcagtgagaaccactgaggtccaatgatgagacttggaggtctggatccagtctctctttgttttaatgtgacttaggtgctgtcaacattagcaagataatggaaatcacgacgccagtgggtgcttacctccctgctaggcatgcaggggctggcggttggcaggggaaggaggcccagtgagccgggtcccttaggggagggagagtttgtcctctttgccccacagtctacccttcagggccttgtggcagtgccagtgttcggggggtgtctgggccactgagtacccactcggtcgtggttgtgctggcctcttgggtgagtgaacctgtgaagcccaggaggtggtgttggctgcagggtacacaaatactgagtggtggtcttttgttacaggcttagcaacaaagctgtgccctgggcatggggggctgtagtgtagctacagttgtgcgtttgtgaaatggcttagctttccatgttgctgagaggaacctggacatggtcccgggcatctgaatgatctgtaggggagggagttcaaataaagctttattttgttc

SEQ ID NO: 638 - DNA, 4211 bp, Homo sapiens
agactccggttactggggagcaacacagccgcctcgggttgcagacgctcctgtccgggtcgcagtgggacgccatggagcgctccctgcaccgcgtctccctcgggagccggcgtgcccacccggacttgtccttctacctcaccacctttggtcagctgaggctgtccattgatgcccaggaccgggttctgctgcttcacagtctctttattcgtgtggatggatatgtctatgtgtgtctctctttctcgctgtgtgtgtgtgtatgtttccattcatccaccccaatgtctgaattctcttttagttatagaaggtaaaggcctgatcagcaaacagcctggcacctgtgatccgtatgtgaagatttctttgatccctgaagatagtagactacgccaccagaagacgcagaccgttccagactgcagagacccggctttccacgagcacttcttctttcctgtccaagaggaggatgatcagaagcgtctcttggttactgtgtggaacagggccagccagtccagacagagtggactcattggctgcatgagctttggggtgaagtctctcctgactccagacaaggagatcagtggttggtactacctcctaggggagcacctgggccggaccaagcacttgaaggtggccaggcggcgactgcggccgctgagagacccgctgctgagaatgccaggaggtggggacactgagaatgggaagaaactaaagatcaccatcccgaggggaaaggacggctttggcttcaccatctgctgcgactctccagttcgagtccaggccgtggattccgggggtccggcggaacgggcagggctgcagcagctggacacggtgctgcagctgaatgagaggcctgtggagcactggaaatgtgtggagctggcccacgagatccggagctgccccagtgagatcatcctactcgtgtggcgcatggtcccccaggtcaagccaggaccagatggcggggtcctgcggcgggcctcctgcaagtcgacacatgacctccagtcaccccccaacaaacgggagaagaactgcacccatggggtccaggcacggcctgagcagcgccacagctgccacctggtatgtgacagctctgatgggctgctgctcggcggctgggagcgctacaccgaggtggccaagcgcgggggccagcacaccctgcctgcactgtcccgtgccactgcccccaccgaccccaactacatcatcctggccccgctgaatcctgggagccagctgctccggcctgtgtaccaggagtataccatccccgaagaatcagggagtcccagtaaagggaagtcctacacaggcctggggaagaagtcccggctgatgaagacagtgcagaccatgaagggccacgggaactaccaaaactgcccggttgtgaggccgcatgccacgcactcaagctatggcacctacgtcaccctggcccccaaagtcctggtgttccctgtctttgttcagcctctagatctctgtaatcctgcccggaccctcctgctgtcagaggggctgctgctgtatgaagggaggaacaaggctgccgaggtgacactgtttgcctattcggacctgctgctcttcaccaaggaggacgagcctggccgctgcgacgtcctgaggaaccccctctacctccagagtgtgaagctgcaggaaggttcttcagaagacctgaaattctgcgtgctctatctagcagagaaggcagagtgcttattcactttggaagcgcactcgcaggagcagaagaagagagtgtgctggtgcctgtcggagaacatcgccaagcagcaacagctggcagcatcacccccggacagcaagatgtttgagacggaggcagatgagaagagggagatggccttggaggaagggaaggggcctggtgccgaggattccccacccagcaaggagccctctcctggccaggagcttcctccaggacaagaccttccacccaacaaggactccccttctgggcaggaacccgctcccagccaagaaccactgtccagcaaagactcagctacctctgaaggatcccctccaggcccagatgctccgcccagcaaggatgtgccaccatgccaggaaccccctccagcccaagacctctcaccctgccaggacctacctgctggtcaagaacccctgcctcaccaggaccctctactcaccaaagacctccctgccatccaggaatcccccacccgggaccttccaccctgtcaagatctgcctcctagccaggtctccctgccagccaaggcccttactgaggacaccatgagctccggggacctactagcagctactggggacccacctgcggcccccaggccagccttcgtgatccctgaggtccggctggatagcacctatagccagaaggcaggggcagagcagggctgctcgggagatgaggaggatgcagaagaggccgaggaggtggaggagggggaggaaggggaggaggacgaggatgaggacaccagcgatgacaactacggagagcgcagtgaggccaagcgcagcagcatgatcgagacgggccagggggctgagggtggcctctcactgcgtgtgcagaactcgctgcggcgccggacgcacagcgagggcagcctgctgcaggagccccgagggccctgctttgcctccgacaccaccttgcactgctcagacggtgagggcgccgcctccacctggggcatgccttcgcccagcaccctcaagaaagagctgggccgcaatggtggctccatgcaccacctttccctcttcttcacaggacacaggaagatgagcggggctgacaccgttggggatgatgacgaagcctcccggaagagaaagagcaaaaacctagccaaggacatgaagaacaagctggggatcttcagacggcggaatgagtcccctggagcccctcccgcgggcaaggcagacaaaatgatgaagtcattcaagcccacctcagaggaagccctcaagtggggcgagtccttggagaagctgctggttcacaaatacgggttagcagtgttccaagccttccttcgcactgagttcagtgaggagaatctggagttctggttggcttgtgaggacttcaagaaggtcaagtcacagtccaagatggcatccaaggccaagaagatctttgctgaatacatcgcgatccaggcatgcaaggaggtcaacctggactcctacacgcgggagcacaccaaggacaacctgcagagcgtcacgcggggctgcttcgacctggcacagaagcgcatcttcgggctcatggaaaaggactcgtaccctcgctttctccgttctgacctctacctggaccttattaaccagaagaagatgagtcccccgctttaggggccactggagtcgagctcagcgttcacaccaggcgggctgggtcccctgcccacctgcctccctgccccctgtgacggagggggcaagcaagcccccagaggccgtgtctctggacagacggatagacatacggaagcgaggcctggaccaagagaggcccaggctactggaggagtagaaggatgggccccgtggggtccccactgccccggtacgagggggcccaagaccctggcaggtcaggggccctggccaagccagatctggagctgctgctccctgctgcggagaccgcggaggcttcgcgttgaccaagttccttaaagaactggctgatggggcaggaggtccaggcctgggctctcgggccctcctagagggccattggagcttgcagctcagacccccactttgagttttatttatttaaatagtagttggatgcttggcacgtcgtcctgtaataggaaacccttgcctcatcagttttcctgatttacaagtgcaatattttagccaatgccttgggagaagctgccatgcaaaggtggacaccattctccagcttcaggggatatgctcgtcccgggcaccggtggcaggcagctggccttctggactaaggcagcctggggggacactgcagtctggctacacacagagatctggcaccccctgggtggagtgtccctcgggggctttgggaaagcatggcaccctcagaccacacagtagccaagttctggagcaaataaaaggcctgtgtt

SEQ ID NO: 639 - DNA, 4581 bp, Homo sapiens
aaaagacagcttttcttcctggagaacagactttttcagcaggattttcctttcagtgaaacataatttgacttgaaaggaacccagggaaaagtgtccaggtgtgagcatgagcgggtagaggtgtgcccttgtttgcttcaggctgtctgcttttcgcccctgactgttttttctgtttctggccatggaggaagagaaagatgacagcccacagctgacggggattgcagttggagccctcctggccctggccttggttggtgtcctcatccttttcatgttcagaaggcttagacaatttcgacaagcacagcccactcctcagtaccggttccggaagagagacaaagtgatgttttacggccggaagatcatgaggaaggtgaccacactccccaacacccttgtggagaacactgccctgccccggcagcgggccaggaagaggaccaaggtgctgtctttggccaagaggattctgcgtttcaagaaggaatacccggccctgcagcccaaggagcccccgccctccctgctggaggccgacctcacggagtttgacgtgaagaattctcacctgccatcggaagttctgtacatgctgaaaaacgttcgggtcctgggccactttgagaagccgctgttcctggagctttgcaaacacatcgtctttgtgcagctgcaggaaggggagcacgtcttccagcccagggagccggaccccagcatctgtgtggtgcaggacgggcggctggaggtctgcatccaggacactgacggcaccgaggtggtggtgaaagaggttctggcgggagacagcgtccacagcctgctcagcatcctggacatcatcaccggccatgctgcaccttacaaaacggtctccgtccgcgcggccatcccgtccaccatcctccggcttccagctgcggcttttcatggagtttttgagaaatatccggaaactctggtgagggtggtgcagatcatcatggtgcggctgcagagggtgacctttctggctctgcacaactacctcggcctgaccacagagctcttcaacgctgagagccaggccatccctctcgtgtctgtagccagtgtggctgccgggaaggccaagaagcaggtgttctatggcgaagaagagcggcttaaaatgccaccgcggctccaggagtcctgtgactcagatcacgggggcggccgcccggcagctgctgggcccctgctgaagaggagccactccgtccccgcgccttccattcgcaaacagatcttggaggagctggagaagcccggggcaggtgaccctgacccttcggccccacaagggggcccaggcagtgccacttctgatctggggatggcatgtgaccgtgccagggtcttcctgcactcggacgaggaccccgggagctccgtggccagcaagtccaggaaaagcgtgatggttgcagagataccctccacggtctcccagcactcagagagtcacacggatgagaccctggccagcaggaagtcggatgccatcttcagagctgccaagaaggacctgctcaccctgatgaagctggaagactcatctctgttggatggccgggtggcgcttctgcacgttcctgcaggcacggtggtgtcaaggcagggagaccaggacgccagcatcctgttcgtggtctcggggctgctgcacgtgtaccagcggaagatcggcagccaggaggacacctgcttgttcctcacgcgccccggggagatggtgggccagctggccgtgctcaccggggagcctctcatcttcaccgtcaaggccaacagggactgcagcttcctgtccatctccaaggcccacttctatgaaatcatgcggaagcagccgaccgtcgtcctgggtgtggcgcacactgtggtgaagaggatgtcgtccttcgtgcggcaaatcgactttgccctggactgggtggaggtggaggccgggcgagcaatatacaggcagggggacaagtccgactgcacgtacatcatgctcagcggccggctgcgctctgtgatccggaaggatgatgggaagaagcgcctggccggggagtacggccgaggagacctcgtcggcgtggtggagacactgacccaccaggcccgggcgaccacggtgcatgccgttcgggactcagaattggccaagctgccggcaggagccctcacgtccatcaagcgcaggtacccacaggtggtgactcggctgattcatctcttgggtgagaagatcctgggcagcctccagcagggacctgtgacaggccaccagcttgggctccccacggagggcagcaagtgggacttggggaacccggctgtcaacctgtccacggtggcagtgatgcccgtgtcagaggaagtgcccctcaccgccttcgccctggagctggagcatgccctcagcgccatcggcccgaccctgctgctgactagtgacaacataaaacggcgccttggctccgctgccctggacagtgttcacgagtaccggctgtccagctggctggggcagcaggaggacacccacaggatcgtgctctaccaggcagatggcacgctcacaccctggacccagcgctgcgtgcgccaggccgactgcatcctcatcgtgggcctgggtgaccaggagcccacagtgggcgagctggagcggatgctggagagcacagctgtgcgtgcccagaagcagctgatcctgctgcacagggaggagggcccggcgccagcgcgcaccgtggagtggctcaacatgcggagctggtgctccggccacctgcacctctgctgcccgcgccgcgtcttctccaggaggagcctgcccaagctggtggagatgtacaagcatgtcttccagcggcccccggaccgacactcagacttctcccgcctggcgagggtgctgacgggcaacgccattgccctggtgcttgggggagggggagcaagaggctgtgcccaggtgggcgttctcaaggccttggcggagtgcggcatccctgtggacatggtgggaggcacgtccatcggggccttcgtgggtgccctgtactctgaggagcggaactacagccagatgcggatccgggccaagcagtgggccgagggcatgacgtccttgatgaaggccgcgctggacctcacctaccccatcacgtccatgttctccggagccggcttcaacagcagcatcttcagcgtcttcaaggaccagcagatcgaggacctgtggattccttatttcgccatcaccaccgacatcacagcctcggccatgcgggtccacaccaacggctccctgtggcggtacgtgcgtgccagcatgtccctgtccggttacatgccccctctctgtgacccgaaggacggacacctgctgatggacgggggctacatcaacaacctcccagcggatgtggcccggtccatgggggcaaaagtggtgatcgccattgacgtgggcagccgagatgagacggacctcaccaactatggggatgcgctgtctgggtggtggctgctgtggaaacgctggaaccccttggccacgaaagtcaaggtgttgaacatggcagagattcagacgcgcctggcctacgtgtgttgcgtgcggcagctggaggtggtgaagagcagtgactactgcgagtacctgcgcccccccatcgacagctacagcaccctggacttcggcaagttcaacgagatctgcgaagtgggctaccagcacgggcgcacggtgtttgacatctggggccgcagcggcgtgctggagaagatgctccgcgaccagcaggggccgagcaagaagcccgcgagtgcggtcctcacctgtcccaacgcctccttcacggaccttgccgaaattgtgtctcgcattgagcccgccaagcccgccatggtggatgacgaatctgactaccagacggagtacgaggaggagctgctggacgtccccagggatgcatacgcagacttccagagcacctcagcccagcagggctcagacttggaggacgagtcctcactgcggcatcgacaccccagtctggctttcccaaaactgtctgagggctcctctgaccaggacgggtagaggcctctgctaaagagcccggatgcagcgtcttccgtgggactgtccccaaggctgaggctcctgccaagtcctaggggcctctgtacctgccctgctggaagccctgacttccccggggccccaggctgtgttagggttctctgggcctcttctttgtaccagcagccctgcatacagggccctgtgagcccccctgcagtcctgtgaggcccctgaagctctgtgaggcccctgaagctctgtgaaccccctgcagccctgtgaggccccccgaagccctgtgaggccccccgaagccctgtgaaccacctgctgccctgtgaggcccccaaagctctgtgaactgcctgctgtcctgtgaactgcctgctgccctgtgaggtgtgggagccctgatgctgccgtgtgatgtttcaataaaggtggatctcactgtt

SEQ ID NO: 640 - DNA, 3660 bp, Homo sapiens
tttccagtttacatagaaatcccaggaccgtgggaatgcatattgagggcctgggagaatggtaggaggaacacagagttagatcaggccaagtttattgatacgggctcactaagcagagattccgcatttagaaagggctctaattggttggttggctgcttggctgaaacatgggccaaaacatggcccaccatgggataactggacatgcctggccgcccatggttagtgtagaagaagggattcaaaggcttagggagattggaatgctagagtggatttgtctgccccatgctgctttcgttcccctgctagagtggatttgtcctccctattctcctcttcctcctcctctgcagccctccactaccctcctcctacatccctcctcctcctccagtcctcctccctctccccttcccctgcaactctccaccactctccttctcccactgcagttctcttttctttgtagccctcctcctcctcccctgccagctctcctccccctcccctgcaatactcctcctccccttgcagccttcctccctctcctcctcccgctgcagccctccaccctccttccctgcagctctactcttttctttgtagccctcctccttatccagccctccacccctcccctggcagccctactccctccccttcctcctcctgtctgcagccttcaactccctcctcctcctatacttctctccctcatcttccctcaggacccagccctaatgccagcaccccaagccttcgctgacccttagcagggaagctcccgactgggtgcacgcggccgtgcccaggaactctggttcgggcctgctgcagggctcgtttgcctctccagcggtggctctcaggtgctgcggtgccgtggccaaggagccacacaagaaggcccacgacctgtgtccctcagctttgtgcatctgcttctccgggacggggcccccttgagggcaggcctggtggaccaccctgtttcccatgaggccttgcacaggccttcctgtggacactggacacgggtgactgaacctgaagtgtgagatgtttctaagatctcatgaagtgtgagatgtttctaaaatctctacatgggccgaccacaacctgctatcttctgctactgtgtgccatgctagagctcccctaccctgggaacaaacgccagggtgccctgcggcccggctctcctcggttcccctgatccatccagggaacaaacgccagggtgccctgcggcccggctctcctcggttcccctgatccgcccagagaacaaacgccagggtgccctgcggcccggctctcctcagttcccctgatccatccagggaacaaatgccaggtgccctgaggcctggctctcctcagtcctccgatcgggtccagtccattttcattcatttcactttggtctcctgtctgtctgtgcctctgggccaaactcattgcagggccatggccccgggcaggccccaccttcctgctttctgatgcagcgatattcttccctttttaggacctcactctgtcgcccaggctggagtgcagtggcgcagtcttggctcattgcaacctctgcctcccgggttcaagtgattcttgtgcctcagcctcctgagtagctggaattacaggcgcctgccaccacgcctggctaatttttctatttttcatagagatggggttttgccatgttggccaggctggtctcgaactcctgacctcaagggatccacccacctcggcctcccaaagtgctagaattacaggtgtgagccaccgcacccagctgacattctcctcttaaagcctgtctgatgccagctcaggccacagggcacattaggcttctgacaaagctggaggacaaggccccctcgcatgccccatcctctcctcgcccccccctcccccgagtgcctccttcgaagccctgcctccctctatcatgccctccccccacgcagcctcaagaaacatgaagaggggacctctggggtggtctggcaacgcctgcctggtggacagcagatgggagagaaggaaagcagccggtaggagaagagacagaggaaaggggaggaggaagcccatgctcaaggtgcccctcctgcccaggcttcctgccagatgcttcttggatcaaatactttgttatatttccagcacaagaaagtgatgttacaaacactaagagaattcagagaaacagcaggatttaaagtagcacacagagatctttgtgcatactttcagttcaaagacagagtggaagagatgacccatttttaacagcaacaaaaagataaaaatccccatgcgtaaaagaaatgtgaaaccctaaatgggaaaaactttaaatagaccataaagacaccaaagtcgattttaacaccaccatggtttgaatgaattccccaaaagttcatgtgttggaaacctggactccaatgcagcagtgctgggatgggattctggggaggtgattggctcatgaggactaatccattcatggactaatgggttctcagggagtggagcagttatcaccagggggctggttataaaagccagctttgccgtctctcatgagaccctcacataatgcccggcaccacttgagactgcagagtcttgaccagcaagaaggtcctcaccagatgcaactcctataccttggactccctgcctccagaactgtaagaaataaaattcttttctttataacttacccactctgtggtattcagtcatagcaacagaaaatgaattaagacagaaagaaagaccatgttcctggataagaaaactctcctaagcaagacaattctacaaaagtaaatttataaatgtaatgtaatccttataaaaacgccgcatgcttttccccagatctagaaaactaattataaagttcttgtgagagaggaagtgcacaggagtgtaaaaatagccaggaaaactctgcaaaagaaatggagaggtcctctgcccccgaaccatctcctggcctccgtaatggaaccacatgacaccaggacccatgtaggcaagcaggcccagggacatgaaaacccggggacagaccccagtgcctagaacattcagtctataaggtagcatatgataccggtgaggaaaggatggacttgttaatacaagtggttaaacgttaaccacttggagaaagacgaaaatgaatctgcacttcataccatacactaagacaaattccaaatgggtcaaaagtactaggaaaaagtgaattccttcatcaccggggagtgggcaaaatcttcttaaatatgacttaaaacccaggagtgataaaagacaaaatgtatactgggaaaaaagttttataacatagcacattttcaaagtgtcggtgacttgagtgggaagcagggcagtgactgtcggggactgagggtggggggatggtgttgaacgggcgcggggtctccttctggcgtgatgaaggctttggaagcacacagaagtgatggttgtacgttatgaatgtattaaatgctgctaaattgtagactttaagagatggttaaaatggtgaatttttttaaccatctataggactctgataaaaatgttgttttatgtatattttacctc

SEQ ID NO: 641 - DNA, 3270 bp, Homo sapiens
ttaaatatttgcttcctgaaaagatttggtgctttatagtcagttttttgagttactaggtcctcagagattttggggagtagatgcaggaggagagaacgttatcaggaaacaacagacaagctcaacaatttcagcagcatctaagagcatgaaatattagctattatttttatgctggaaggaaaataggaaacttaaaaggagtaggttgtagaatccatgcctacaggtaactgagtaagtgcccaagtaaatgaggcatagtgagtgcctataaattcagaaaagagagattaacatggaattaccgtgaatatgtttatagaaaaaagtaaatttgaaataagacgcctgaaatgtactagcgatcttaactactttaaactagccatggtttttgctgttatgctcttaatttgcagaacctgcctattcaacccttattaccttatggtcacactaggttttgcttatgaaggacatgcttgctgtgaaacaaacttatctgtttcctcttttgaactatgttatcattatgtcattctcagtcatcccattgcttgttgtgttcctgagtcagagggtaactttgttcctggcctcatatttcacttttgattctgatattagtcacaaggggattcagagaacttgcaaataaacccattcacaaattcatcacacttgctgacaaattaaacaatgcccttctgtgggtggaatgtcatttgtatgaaaaaaagaattgttaactgcatcctttcagccttactccttccccatgctatgccttctttgtgacagtacttattacaacatccagaagagggtaaattggggttggggattgagggaatgaaaagaaaataaaactcagttttttggctcccttgcctatcagttttaactgtagctattatagacggggagatgcaggctttctgaacacagtggcatgtgcacttgagtaggcctgtgtcctgcccaagatggagcttggatgtctgcaggtggaagaaggccatttggacttgagccatctttgatgtccaaatcactaagcagggaccatgcaaagacacaggagggaggccatgagggcatcaagccagatgagcttgccagcctcagcaaccagccagggatgggggcagggctgcccaagtaggtggggcaggaagcccagccctcaacaaaaccctattatattctttgtcttagtgaggaagttcttactgttgtgtgtattattggaagacatcttctgtgatagggttattattgcatgtacagagagattccttggaaccgcatatgactcaatctatctcactcagatttctcaccataccttcacttattttgctgcagtgtccagcagatctccttgaaacagtgtgtactgaagacctaactaaatcctccaaattacctggttggttcagagaaccaaatcactggagctttgtagggaaggtttgactttcagggctttagccagagtaacttatttaatgattggcttttaatgtgtttctgtgcaaagatcaaagcaggtgaattttcatgtatttttagaattctagtagaaaaggaagataggaaaatctagttcaagtatacattctagtttttaggggaatttgtgtttttattttacttttttggttgctacgatttgtcctatattctatatttataagaacataaatatgtaattaaaagaatatatttgatggcactacctgtcaacaaagccacttatttgtgaaattttttggtaacttgatggaaatagtcacattttatccattgaaaactacaaagctcttatctattgttctttgtgtatatttatgcattaaaaatagatcctgcaggatgagcaaatgtactgaagtgtaaatccgttttttaagagaggctatatggaaaaatatatcattcaagactcagtctctgccttgcctataggcctcgtcagtgtttagtgaatgacctcaaccctgtttttttccttccttctttggtggttgaggacagacaatgaatggtctctgtactcgcctgggctcagctgggtggtggccattatgccattgtgctcactggagagggctgccgggtttgtagagctgcggatcccgaccttccctgacattgccaatctcttttctttcagctccaccagcccattggagaaaagttactgttcagtccctgaaggcttgtgccataaaagagtgggagacattcccagggagtttcagcacccatttggactttcacaatcagagatggcagcggtaaaggcatcaacatcgaaagctaccaggccttggtattctcatccggtatatgcaagatactggcaacattatcatcaagcaatggcttggatgcaaagccatcacaatgcctacaggaaggccgtggaatcctgtttcaatcttccatggtacttaccttctgcgcttcttccccaaagctcttacgataatgaggctgcgtatcctcagtccttctatgaccatcatgtggcctggcaggactacccctgcagttcttcacatttcagaagatctgggcagcatccacgttacagcagtaggatccaggcatccacaaaagaagaccaagctttgtccaaagaggaagagatggagactgagtcagatgcagaggtagaatgtgacctgagcaatatggaaatcactgaagagctccgccagtactttgcagagaccgagaggcatagagaagaacgacggcggcagcagcagctggatgcagagcgcctggacagctatgtgaacgctgaccacgacctgtactgcaacacccgccggtcggtagaagccccaactgagaggcctggtgagcggcgccaggccgagatgaagcgtttgtacggggacagtgctgccaagatccaagccatggaggccgcggtgcagctgagctttgacaagcactgtgaccgaaagcagcccaagtactggccggtcatccccctgaagttctgagctcagggcacagggtacccagcctctccttcttccttttgggtacacgctctttatctctccttctgtacatttcttagggaaaggggactttgtactggggtacaggcatgttcaccacagtcccagtgggcctgtcacggggtggatgtactatgccagccacttggaggtctgcaggacatgttctgttgccaacatgataaattttctcctgacataaaataattttgcatatact

SEQ ID NO: 642 - DNA, 3492 bp, Homo sapiens
aggtaaaattttcgcaaagcgaacatatgtgtgtaaccagcattcagatcaggaaacaaaacgttaccggcatcccagaactcccctttatgttcctctctagccactatactcccttcagaggtaaccactaacacctaattttgaccccttacataaatcttagctgcttgtttcttcactgtattctgaaaatactgacttataaagttaggaatggaaaggactaacttgctctgtttcttctttccatagcacgtttttggttcagttaagcttcagagtcaggaacaatttatttaactttttgtttgattatgggaatatttagaaatatgtgcatgtcattctaataataagtttttctatttgtggaatttttatgattttccaagtgttttctcatatgttttctttgatcctcattcacataaggatgaaatatacattttgtcatgtgaaagtattatattactgtcgttatttgttttttgtttttttgagacggagtctcactctgtcgcccgggctggtgtgcagtggcaacatcttggctcactgtaacctctgcctctcaggctcgagcgatactcctgcctcagccccccaaatagctgggaatgcgggtacacgtcactacacccagcttattgttctgttttttgtagatacagggtttcatcatgttgcccaggctggtctcgaacccgtgagctaaagccatccacctgccttgacctcccaaagtgctgggattacaggtgtgagccactgctcaccgcctactgtcactatttgtgataataaaattgtttcttggtaatgttacatattctcaaatggtaccatttattttccaaaaactaattaattttatttttctttaaaaaataattgtttatgcaggttcttgaattagtgttggaaaactttgtttatccgtggtacagggatgtgacagatgatgaatcctttgttgatgaactgagaataacattacgttttttttgcatctgtcttaataagaaggattcacaaggtggatattccatctattataaccaagaaactattaaaagcagcaatgaagcatatagaagtgatagttaaagccagacagaaagtaaaaaatacagagtttttacagcaagctgctttagaagaatatggtccagagcttcatgttgctttgagaagtcgaagagatgaattgcactatttaaggaaacttactgaactgctttttccttatattttgcctcctaaagcaacagactgcagatctctgaccttacttataagagagattctgtctggctctgtgttccttccttctttggatttcctagctgatccagatactgtgaatcatttgcttatcatcttcatagatgacagtccacctgaaaaagcaactgaaccggcttctcctttggttccattcttgcagaaatttgcagaacctagaaataaaaagccatctgtgctgaagttagaattgaagcaaatcagagagcaacaagatcttttatttcgttttatgaactttctgaaacaagaaggcgcagtgcacgtgttgcagttttgtttgactgtggaggaatttaatgatagaattttacgaccagaattatcaaatgatgaaatgctgtctcttcatgaagaattgcagaagatttataaaacatactgtttggatgaaagtattgacaaaattagatttgatcccttcattgtagaagagattcaaagaattgccgaaggcccatacatagatgttgtgaaacttcaaactatgagatgtctttttgaagcatatgaacatgttctttcccttttggagaatgtatttactcctatgttctgccatagtgatgagtatttcagacaacttttaagaggtgcagaatcaccaacacgcaattcaaaattgaacagaggtagcctaagtttggatgattttcggaacacacagaaaaggggagaatcatttggaatcagcagaataggtagcaaaattaaaggagtattcaaaagtaccacaatggagggagctatgttgcctaattatggtgtagctgaaggtgaagatgattttattgaagaaggtattgttgtaatgggagatgattctccagtggaggctgtgagcacacctaatactccccgaaaccttgctgcatggaaaattagcattccatatgtagacttttttgaggatccctcctctgaaaggaaggagaaaaaagaaagaattcctgtgttttgtattgatgttgaaagaaatgatagaagagcagttggacacgagcctgaacattggtctgtctatagaagatatcttgaattctatgtacttgaatcaaaactaacagaatttcatggtgcatttcctgatgcccagcttccttctaagaggatcattggccccaaaaattatgaattcttaaagtcaaagagggaagagttccaagaatatctacagaaacttctgcagcatccagaactgagtaatagtcaacttctggcagactttctttcccctaatggtggggaaacacaatttcttgataagatactaccagatgtaaatcttgggaaaattataaaatctgttcctggaaaactaatgaaagagaaaggtcagcatttggaaccttttatcatgaatttcattaattcttgtgagtctccaaagcctaaaccaagtagaccagaactgaccattctcagccctacttcagaaaacaacaagaagcttttcaatgatctgtttaaaaataatgcaaaccgtgctgaaaatacagagagaaagcaaaatcagaattattttatggaggtgatgactgtagaaggagtctatgattacctgatgtatgtaggacgggtagttttccaggttcctgactggcttcatcatctcttaatgggaactcgaatcctctttaaaaacaccctggaaatgtatactgattactatcttcagtgtaaactagaacagctatttcaggagcaccgtttggtctcactcataacacttctcagagatgctatattctgtgaaaacactgaacctcgctctctccaagataagcaaaaaggagcaaaacagacttttgaagaaatgatgaattacattccagatctgttagtcaagtgtattggtgaagaaaccaagtatgaaagcatcagacttctgtttgatggcttacagcaaccagtactcaacaagcagctgacttatgttttattggacattgtgatacaggaactgtttccagagctcaataaggtacaaaaggaagttacctctgtgacatcttggatgtaaacacttggatttggtatagaataacccattgaaatttctgctgtgcgagggtggtagaaatttacttttttgggtatattcttatatatattatgtacatcgctgtctgaaattttagttattttttgtttttaataaagactaacacaaacttaatgatt

SEQ ID NO: 643 - DNA, 3182 bp, Homo sapiens
gtgtggccacagatggttgttgagctgcattgctgacctccaggaatgtataagaaagcctaaagcaagcaattaaacagccactggaagtgataacacttgggagtttgattatccttatgtcagaaggaaaatttgtattttctctttattgtctataaaagataaaaatttagataagggcaacttaacttttaaaaatctccagtggcaataaaaaaatcttcattaccacatttctgttgaattgtattttaaagttcctaataaaatgacatcatttactgggaaatgcttctttttcttttgaaaacaatatgacttcagccctgggtatttttttatttgtttcttaagatgatttttctgtttatctcatacatccttgaaaagaagctacaaaaatttttttttgttttttttttgttgttgtttattgacagtcttgctctgttgcccaggctagagtgcagtggcacgatctcagcttactgcaacctccacctcccaggttcaagcaattctcatgcctcaggctcccaagtagctgagactacaggtgtgcaccaccatgcccagctaatttttatatttttagtagaaacagcattttaccatgttggccaggcgggtctttaactcctggcctcaagtgatccacctgattcggcctctcaaattgctgggattacaggcgtgagctatcacacccagcctaagctgcaaacatttcttaatccaagtgcacaaagactatctccatctctataaccactaaagccagccattttcatttttagaatctgtttgggatatgtggctgtttccaacttttctttaggagagttgtttgcaggctttttcgctccatagctcttcccccaagactgtcggttctaaccttgcttctcctcctcattcgctgcacatataccccttcccctatctaaataaattgcagacttctaaaatttagaatggagaaaaactggtacattctttgtcctgcacaagaaagaggtggtaacaggaatgtctgagaaaaaacgaatggcctagtgactctgtgatgcaggaaaggttgccggtctgcaaatcatagaaactgaggaccccatcctagtagctgctactcctggaaagtccccacgttctctgtggagtccactccatggctcactcagtttctgcagatggaaagtccccggtcgtcctttctcatgtttccctctcttcccagggcaggatagcgtgtgccaatgtcctcagtgacctctatgcaatgggggtcacggaatgtgacaatatgctgatgctccttggagtcagtaataaaatgaccgacagggaaagggataaagtgatgcctctgattatccaaggttttaaagacgcagctgaggaagcaggaacgtctgtaacaggcggccaaacagtactaaacccctggattgtcctgggaggagtggctaccactgtctgccaacccaatgaatttatcatgccagacaatgcagtgccaggggacgtgctggtgctgacaaaacccctggggacacaggtggcagtggctgtgcaccagtggctggatatccctgagaaatggaataagattaaactagtggtcacccaagaagatgtagagctggcctaccaggaggcgatgatgaacatggcgaggctcaacaggacagctgcaggactcatgcacacgttcaatgcccacgccgccactgacatcacgggcttcgggattttgggccatgcgcagaacctggccaagcagcagaggaacgaggtgtcgtttgtaattcacaacctcccggtgctggccaagatggctgcggtgagcaaggcctgcggaaacatgttcggcctcatgcacgggacctgcccggagacttcaggcggccttctgatctgtttatcacgtgagcaagcagctcggttctgtgcagagataaagtcccccaaatatggtgaaggccaccaagcatggattattgggattgtagagaagggcaaccgcacagccagaatcatagacaaaccccggatcatcgaggtcgcaccacaagtggccactcaaaatgtgaatcccacacccggggccacctcttaatctagacagaaatagctgtttggttttgtttttaaatagatctatttcccttatcacttcaattaaagactataaacaacaaaaatctcattgtgtctacacatcggggtgaccttaggtcggtttgtaagtggatacaattaataaaataaaatccattgcctttttttcctgttacattaactgaagatgcacctaatcttgaggcagcttctgagttgagaattatattgttatccaatactgttgattcattttgaatctttagacacttatctcttgccgcataggctttttaaaggtgctttcacatagcacaggcattacccgtagtcgtgtcaaatagcagttggtgtcttcattttatgtatatttatcatataagtctgattttttttttttaagcgtcttgaatggttttctggagagacagcattggtaagtggcacatgacggtatcccagtcataagagggttgcatgattcctttgagtgtttgatttgaaaagcctagtcttgtctctcaagagcatctcggacccagaacattctccagtagtgcattcagttcaacacagcaagtgcttcattgcatggaaaacactttgaagacaaaaaagaaatcttatttctttttttgtagccttcctgatatttacagtaataccattaactgttttatcgatagcaaaaaaggatactttttgcaatgttattagatgttctatagtgctacaaggaattgccttccgaatggaggttcatgtataatactcatttacaattcaatatataattacacaaataatttttaaatataatcaatagtaaagactgttctgtggatggtagtgtttaatacattttctattttgtacagtgatttcaggccttttgttttcttaaaatcagcagctgtttggcctaattcttagcattattttgtcctttgcgccagtacttttttgtgcacgctttttgtgatctgtgttaaaaacctgcattgccaacattgcagctcgaacttaaacttgttattcaaataaatatttaatttttt

SEQ ID NO: 644 - DNA, 3273 bp, Homo sapiens
ttcagcaaaacaagctatcgatcagggaagatctccagttataatagataacactaatatacaagcttgggaaatgaagccatatgtggaagtggtaaatatgaaacatgagaaagtttttattttttattcttgtcaattttttcacattctaaaattttggctggttggatcttgattattaaaacatttgtcctttgttttctaaagaggtttgttggtttgcttagtttttaaaaaaattgtgaatgatgttttttaaggaacatgttcatcttgttaatttttgtttgtttttttgagacggagtctcgctctgtcacccaggctggagtgcagtggcaccatcttggctcactgcaagctccgcctccccagttgaagcgattctcctgcctcagccacctgagtagctgggattataggtgcctgcccccatgcccagctaatttttgtatttttagtagagacagggtttcaccgtgttggccgggctggtctcgaactcctgagctcagcccatctgccgtgctcagcctcccaaagtgctgggattacaggcatgagccaccacgcccagcctcatattgttttgactttccttaaggatagtaatcttaaggaattactattccttgagaatagtaatcaaaatttatccggttaaatagtcttaactgttataaaccatattattttataaagcgtcatttttcttggtcgagcaagtgtatagtattgtcgaaatgaaatttaactgtctgccttctttttactttaagaagtacttctttgggtttttgttttcttcctttcctttgtgtaggccataggaaaaggatacagagtagagtttcatgaacctgaaacttggtggaaatttgatcctgaagaattagaaaagaggaataaacatggtgtgtctcgaaagaagattgctcagatgttggatcgttatgaatatcaaatgtccatttctattgtaatgaattcagtggaaccatcacacaaaagcacacaaagacctcctcctccacaggggagacagagagaaagagttttgaagaaaactgggcataggctcagcaaaaccaaacagaagaggaacagaaaaagaaacaaaaagcagaacagtcagaatagaatcatggaggaaaactcattagaattcttaagtgatcttacaccgggagatcaggacccatctcagagtgaagaggaagacattgaaaagaccagaagagaatcagaatatcccttcattgatggtctacaaaatgaagtcggagattttgtgactggatataaagaaaaaagatggaaaaataaagatcctaaagacagtttccaaaacgttatgtctatagttgaattagacaacacaccaaagaattacctctctaaggaaggtgataacttgtttgtaagtttgttactgaggccaaatgaaatctccgttacttgtccaatactgactcaaaacctttcctgtgtaacaactgatgactgctctggcatgaaggtagaaaagcatattagaaataggcataccatagcattagacacccaggacctttctgcggaaacttcatgcttatttatgaagaagagagaaatagtagataaaaatctctcacatgaacccattctgtgccatcaacatggaatcagaatgtcagataaagttttaagagaggaacaagtgtatacaactaaaatcaatcactgggcttttttcacaaccaatttatctgatgaagatttacagctgggctctgacagacagccctattttggtagctggcctgcaggacctcataagtttatatgtgaacagagaccaaagaaagatagagcatgtaagttggctggtcctgacagcagggggcaatggattcaaatgatcttcacttcggtggcagcatcagaaccaggaaacaatccagaaatattgacagacaaactactgataggaaatgaagatttttcacctccacctgaaactatggattcattcatagaaacaaacctcttcagaagctgcttacctcaaccggatataccaaagaatgccttagaatcaacaaaaaataagaaaaggaggaagaaaaggattttcaatttggtaccaaattttgacttattaggacagagtcgtatcggtgtaaaagaaagggagaaatgtgacctgttaacaaaaaaccatggactaaaaattactttgggagaagaaaaagatagaatttcagaaaggaacagtgaagaggagaataaacaaaaacttatgacctttgatcatcatccattgtggttttaccttgatattatcaaagctacccctttaaatattgatggacagcgttattctcattgcctgtcatttaacagactaaggtgctctgcatctttatacaaaaattatattccttcttttgtgctacataatttatctagtatttggaagccatcttttacaaacaagaaactgtttttgactttcgaatctcagacaagagtaggtaataaactaaatgatgcagggtttatttctccagaaattttacatagtcatcctgatacttcgtgctctttgggagtcacttctgattttcactttttaaatgaaaggtttgatagaaagctgaaaagatgggaagaacctaaggaattaccagctgaggacagccaagacttaacaagcactgactaccgttcccttgagctaccattatcacaagggtttgcctttcaattagtaaagctttttggatctccaggcgttccaatggaatccttgttgcctgatgactatgtggttccccttgactggaagacactaaagatgatctacttgcaatggaagatgtcagtggagaaaagacagaagaagattggttgaaaaatgaaaattccttgaactttgagttctgctgtcttcatggtactgctgaagatcatgatcacggagaaaagtcagagtgctcagtgccaacccaagggattctttccagagacgtacccgttggataccaaaattagtttggataatctgttcaaccattatatagcctcgatgatgagagagttacaaagaacaaaactccagacacaaacctccaaatttttcagcagaagcactctgcgtcgctgagctgaggtcggctctgcgatccatacgtggccgcacccacacagcacgtgctgtgacgatggctgaacggaaagtgtacactgttcctgaatattgaaataaaacaataaacttttaatggt

SEQ ID NO: 645 - DNA, 3242 bp, Homo sapiens
gttaatctcttttggcaacaccctcacagatacaagcaggatcaatactttgcattccttcaatcaagttgacacttagtattaaccatcacactcagcatttcttttccctttaatctgctcgtctgctcgatttctcaggactggatgaagacagcattcttttcaaagccccccagtcatatttaattactcctatgctctcaattctgggcacccccacctggtgcccagtgggtgtcccccgcctgttgttcttgagagctctctgcccagctgtcttttccctcctgccctctggctttctctgcactcaggtttgttccccctcctctctcctgccggcctggcctttctctgtctccccttcggccctggtgctgccttgctctgcagctgttcatggctgccccagggcctttagagaaccaagtggttctggccttgaaggcattttacaatctgtttccaagcctcctcctcactgccactgccccttcacaccacagcccacctcctggtccctgcagacacgtggctctcccttgtggtaaggcctgcctccagccagctgggcattcttccacggctcccagcctcatctctttccccaaaaatgttatctataattcaacactgaatccaatttcacctccttttttccacttctttcttgtagcgtctttcatctccatttgtcaattcacttcctccattcattcattatcctacccattcttggtggctgccatgtgcatgcgaggcctctagggatagaaatgaaaggcattgaggagctgacactctggctggggacaaggcactctgagtgcagtcctggctttgttaaggactacctctctgaccacaggaaagttacttcagtgtcagatcttcatctgtgagatggggaatgttactgccctccttaaagtggaattctaggagcgagtggggcagcacatgtcacaggctcaatgctcgcatttggaggaggctgctggcctgctgaggtctgagaacctcaacatgtgtgcctatcccagacatgtgtgcttattgttttgagtttcctggaatttggaggcagcagctccaggagaacaggggccttatccattgcttcatcttcttcagaggaaagtgagtgtcacttataggcataccttggttgataatgctttgccttattgggcttcacagagatcatgcgttttccaaattggaggtttgtggcaaccctgtgttgaacaagtctattgacgccgttttttcaacctcgtgtgctcactttgtgtctctgtcacattttgataattctcggatttttcacacttattatatctgctttggtgatctgcgatctgtgatctttgaagtcactattgtaaatgtttggaggtgccacgaactgcatgtgtgtgaaacggtgaacttaactgataaatgctgtgtgtgttctgactccagaacacagggttccagtgatcggccattctcctgtctctccctctcttcaggcctccctattccctgagatacacaataccaaaattaggtcaattaataaccttacaatggcctctaaagtgttcaagtgaaaggaggccttgcacatctctccctttaagtcaaaagcttgaaatgattaagcttagtgaggaagccacatcgaaaagcctagataggatgaaagctaggcctcttgtgctgaacagttagccaagttgaggatgtaagggaaaagttctagaaggaagttaaacgtgctactccagtgaacacaggaatgataagaaagtgaaacagccttatagctgatacagaggaagttttaatggtctggatagaagatcacaccagccacaatattaactgaagcctaatccagagcaaagccctaactttcttcagttccatgaaggctgagagaggtgaggacgctgcaaaagacaactttgaagctagcagagattggtttatgaggtttaaggaaaggagccatctccgtaacataaaagtgtaaggtgaaacagcaagtgctgacggagaagctgcagcaagttgtttaggagatctagctaagatcactgatgaaggcaactacactaagccacagattttcagagtagatgagacagccttctactggaagaagctgccatctaggactttcatagctagagagaagtcaatgcctggcttcaaaggacaggctgactctcttgatagggacagtgcagctggtgacttaaagtagaggccaatgctcagtgaccattcccagaaccctagagcctattaagaatgatgctaagtctgcctgtgctctagaaatggaacaacaaagcctggatgacagcacatctgtttatagcatggtttactgaatatttaaagccaactgttgacacctaccgcttagaaaaagactcctttctaatatgactgctcattgataatgcacctggttgcctgaggtctctgatggaggtgtacaaagaggtgactttggtttcaacatccatgctacagcctgtggatcaaggagtaattttgactttcaaatcttattatctaaaagccacatttcataaggccatagcttccatagatagtgattcctttgattgatatgggccaagtaaattgaaaaccttctagaagtccaggtgcggtggctcaagcctgtaatcccagcactttgggaggccgaggtgggtggatcacctgaggtcaggaatttgagaccagtgtggccaacatggtgaaaccctatctccactaaaaatacaaaaaatatctgggtgtggtggcaggtgcctgtaatcccagctacttgggaggctgaggctagagaattgcttgaacctgggaggtggaggttgcagtgagccgaaattgtgccattgcactccagcctgggtgacagagcaagactgcatctcaaaaacaaaacaaggccaggcgcggtggctcactcctgtaatctcagcactttgggaggccgagggggacagatcacgaggtcaggagatcaagacgatcctaactaacgtggtgaaaccctgtctctactcaaaatacaaaaaattagccgggtgtggtggtgggcgcctgtagtcccagctccttgggaggctgaggcaggagaatggcgtgaacctgggaggcagagcttgcaatgagccgagatcgcaccactgtactccagcctgggtgacggagcgagactctgcctc

SEQ ID NO: 646 - DNA, 3425 bp, Homo sapiens
ctatgttgccagtgagaggtgaggatgatgaccagctgtaagtgtttaaatgtttatcttcagatgcagaggttgtggtaggaaccacaaggccagagacgctgcctggagatgtggctgtggccgttcatccagacgactcgcgatacacagtaatacccagtgcgctcctgcactctggcccgccctgccaatggccttctcttctcttgggttttaaatggtggctctttctctcttgcttctacttccttttcctgagacttctctcagtggttctgattggactccctcctcctcttatagtttttctgtagctcaggggttgacaaactggcccatggtcctaatccagcttgcggcctttttttttgagacagagtctcgctctgtcaccaaggctggagggcagtggtgtgatcttggctcactgcaacctccacctcctgggttcaagcaattctcctgcctcagcctcctgagtagctgggagcgtggcaccatgcccggcacgtgccaccacacccagctaattttttgtatttttacaaaaattagtaattaattttttttaagtaatgtaatttttaagtaatgttatttagtagagacggagtgtcactgtgttagccaggatagtctcgatctcctgacctcgtgatctgctcacctcggcctcccaaagtgctgggattacaggcgtgagccgccgcgcctggctgcttgcagcctttatattatccatggctgctattatataccctctccagttctgctgcagtggcataatagagtaattgtgccgagaatgaatttgtctctaggcccaaaagcctaaaatatctacattctggccccttaagagtttgctgaccttgctctagcttgctaccttccactttctaccttcttattcctggggttctcacgccccagcccagacccttccaaccctcacaggtgcctgtccttgatccctctcccttcccttcagcatctacacgggcgacagcttcgtcaccccttgatggggcagcctcttcccctcatcacagactatgctgttcagccacatgtgggcacgggggcagtgaaggtgactccagctcacagtcctgccgatgctgagatgggggcccgacatggcttgagccccttgaatgtcattgcggaggatgggaccatgacctccctctgcggggactggttgcaggtcttcaccggtttgtggcccgggaaaagataatgtctgtgctgagtgaacggggcctattccggggcctccagaaccaccccatggtactgcccatctgcagccgttctggggatgtgatagaatacctgctgaagaaccagtggtttgtccgctgccaggaaatgggggcccgagctgccaaggctgtggagtcgggggccctggagctcagtccctccttccaccagaagaactggcagcactggttttcccatattggggactggtgtgtctcccggcagctgtggtggggccatcagattccagcctacctggttgtagaggaccatgcgcagggagaagaggactgttgggtggttgggcggtcagaggctgaggccagagaggtagcagcggaactgacagggaggccaggggcagagctgaccctggagagggatcctgatgtcctagacacatggttttcttctgccctgttccccttttctgccctgggctggccccaagagaccccagaccttgctcgtttctaccccctgtcacttttggaaacgggcagcgaccttctgctgttctgggtgggccgcatggtcatgttggggacccagctcacagggcagctgcccttcagcaagtatggaggccagagatcccaaggcacctccaaggaaacccccctctgctgacccctccctgcccccaggtgcttcttcatcccatggttcgggacaggcagggccggaagatgagcaagtccctggggaatgtgctggacccaagagacatcatcagtggggtggagatgcagttgctgcaggaaaagctgagaagcggaaatttggaccctgcagagctggccattgtggctgcagcacagaaaaaggactttcctcacgggatccctgagtgtgggacagatgccctgagattcacactctgctcccatggagttcaggcgggcgacttgcacctgtcagtctctgaggtccagagctgccgacatttctgcaacaagatctggaatgctcttcgctttatcctcaatgctttaggggagaaatttgtgccacagcctgctgaggagctgtctccctcctccccgatggatgcctggatcctgagccgccttgccctggctgcccaggagtgtgagcggggcttcctcacccgagagctctcgctcgtcactcatgccctgcaccacttctggcttcacaacctctgtgacgtctacctggaggctgtgaagcccgtgctgtggcactcgccccgccccctggggccccctcaggtcctgttctcctgcgctgacctcggcctccgcctcctggccccactgatgcccttcctggctgaagagctctggcagaggctgccccccaggcctggttgcccccctgcccccagcatctcggttgccccctaccctagcgcctgcagcttggagcactggcgccagccagagctggagcggcgcttctcccgggtccaagaggtcgtgcaggtgctaagggctctccgagccacgtaccagctcaccaaagcccggccccgagtgctgctgcagagctcagagcctggggaccagggcctcttcgaggccttcttggagcccctgggcaccctgggctactgtggggctgtgggcctgttacccccaggcacagcagctccctccggctgggcccaggctccactcagtgacacggctcaagtctacatggagctgcagggcctggtggacccgcagatccagctacctctgttagccgcccgaaggtacaagttgcagaagcagcttgatagcctcacagccaggaccccatcagaaggggaggcagggactcagaggcaacaaaagctttcttccctccagctggaattgtcaaaactggacaaggcagcctctcacctccggcagctgatggatgagcctccagccccagggagcccggagctctaactcatcatccccatcagttttcctccctctcagacctgtctttgaggacaaacagatttgtcagctgtcagggtgcagtgggacgtcagagactatgtggtccatcgccttcattgtgtaaatgaggacacagactggcttggtcgcagtgactgtggtgtccttgagatgctcacattactgcccggcctgcctcccacctggaagtctgggaatgaggagattgagataaacttttgaaatccc

SEQ ID NO: 647 - DNA, 4218 bp, Homo sapiens
ataccaccagggggcatacataacattataaatcttaaataggaaactagcagtttctgcatctaagtactgaatttaattatagtttaatagctaaaagacaaatgaaacacagtgcaaaatattaataaattatttctcacagatgatttttcttacaatagcactttctttctctggagcatcatatcacaagtatccaaacatcttttcaaatgtgcaattcatcctgaaagcctcggaaattataggtaaaagagaactccgttctgaatccatttttagacctgtggaagataagaaaagatatgagaacacagattctgatatgggaggatatgaaattaaccacctgctctggcactgtgttgctgcttggtcttgtgttcagaataacagtcctcagttgaataacgtgcttgaacatctcatcttccataagacacagcttcaaaagaaatgctggttggattcagtactggctttactggtccttggggaggctgccaaattaaacatggcctgcttgaaagctttaatggacgtagtgagagattttgtttcaagcattatgtctgttcaaaatcaggaagaaagttgcaaggtagatggtttttcctgggcctggaatgtagtctacatatatacagtaattcttgcagaaatctgcttgtatgcagccacttctgatttgcgaaaaactgctttaattggtttctgtcactgtaaaagttcacaaaaaaatattttatacttggacaaatcagtacctccagaattaaaggaaacaagtattttaagtcttttggaatatttctcttcaaaaatgtcagagaactgtgatcaagtagtctggactggttactatggcttagtgtataacctggtgaaaatttcatgggaacttcaaggagacgaagaacaggatggacttagaaacatgatatggcaaacattgcagaaaacaaaggattatgaggaagatgtacgaatccaaaatgcaatcaatatagctcaggaaggaaaaccaaccagaaccctggacaagctttttctctaatgggagagaagttttatatgaagcaatggatcttaggagcgtaataaatggactttacagactgctatcaggtgccaccaagatcccctgagatgctccttcccctgctgccaggggtattgccagccaagggctcaaagattaaaaattgacctcagaaaaagctgtcaacgtcatgcaagtttatatctcctctctgggagcagtttcatcaatgatttttagttgatgtgagatataaaggtccaatccccatacttcaatttgggacaatcttgaaggccatcagagctccagagctgcctgtgtaacaggttgaggctctgttgtgcctgcattacacttcaacgcctccttggcctcactctgctttcctcaggacctcactgatgttctccctgggagtactccccactgaattatttgcaagtgaaactatgtgttgaggtctgttttccagggcagctaccctaagacaaatactgacaatcattagctgctacacactcagaaaagagaggtgatgaaagcacagtgtctgtacttataagaccataccttgggcagtgttttaggtccatgttttaagagtgtctgacaaactcaaatgcacaagctggtgaaatagctatagaaagcatcaaatgaggaagcatcagtcaggagcttggatttttaaatgaagtacattagatttaggttgattgtgatagctctctttagatcattgaaaaactaacatatgagaggaagattgggaattcatcttacattacccataatatagatctaagatcaataagtaaaaattacagagcagatttcaattcagaatgaaaagaaacacaatgcctgataattaaaaatttcaacaattgaatgagttgctttgaaagagaatgagttccctgttattgaagctatttgtcttagtctattcaggctgctataacaaaaatatcagaaactgggtagcttatcaataatagaaatttattcattacagttttggaggctaggaagtccaagagcaaggtgctagcagatttggtgtctggtaaaggcctgctttctggttcatcagttatgtcttccagctgtgccctcacatgtggaaggggaagggcagctctctgggatcttttaggatggcactaatcccattcatgagggttctgccctcatgacctaagccttactgtcgccttgggaattggaatttcaatataggaatttgaggatgagggaacacaaacattgataccatagcagtatataaggagaagctgcataatcatttttgtggacattgttagtatagttttggggtcataaattaaatgaattatgaggtgtgtgttagttttctattactctatagcaaactatcacaaaagtagcagcttaaaacaatacatatttatctcactgtttccatgggtcaggagtctggatgtgtgttatctgcagctcaccagtttgaatcaaggagtcagctaggtctggggtgtcctcttaatgcctggggccctcttccatgctcactctggttggttgcaaggtgcacagtttcttggaactcttgaattgaagtccttgttgttttgctgtttggacaggggactctctaagatactagaggctactccttgtttcttgccacataccaccatcctctgccccccgctttggccctctgtattcttacactcaaatctttctccaggaagggaccatgaccttttaagggctaactttattaggtcagtccaaatcagataagtcaactgatttgtaatgtcatcgtaggagtgatattccatcatattcacagattctacccatatttaatggaagacaattatacaaggcatgtatactagaagtcaggaatcttgggtccaggcccgtctcagaattctgcctgccatattgtgctttccacatatacatctccagaattcaggtcaccacaatcattcatggatgatcactaaattaaagatctcatgggatgacaaactgtacttcctgggctgacttttaacatgacatcagcctcggtcctgagataataagaccatctccaggttagtgatgcctcagaggttcctggtgaggttggcgtgggatatgagtgtttagagcaatgcccgtagcactccaggcttccccaggtatctccgaaacattgtggatctagagatgatttggaatccccagaatttctgaggacccaaaagaatagttgctgaacacccagaacagtgtgtggtactagaagatttctggaaatagactacaatttttcagggttaagccatgaagaggttcgatttccctccttctgttctttgtctcaattttcagcttttcatctggagactaaagggttaggattttgtgcagaattatgacagtagctcaaccgagacccctccgtaaagagagaaaggatggaattactggatagaaatttagatatggaaagccatacacactaaggatctggctacaaatgcctccgggccctgaaggaggtgatacagagacgattttctgtcacccacaataagccagcctaatctgctttcattgtatgtgtctattgcttcctgtgactgtgcccctccaaatcagactgaaaataacccatttggcttcaccaaggtgtgaaactaggagaaatcctggctctcctgacattttggctcccagttcctatatcactggccctgagagagctgagccaagcaaacagatctttatctttgttcagcgagctgcttatctcatccttgagcaggaaccaagcaacctttttaaataagggtgtaatgttggacagaccctaaacaataagtcttgctttgtacagaaattctaaagaaatggacactctatataaaattatacaaccacatgaacactgttctaaactaatattcaagcagaatcaaagcatgctattttttttggataagcagttaacatatttgagctaaggcttttgattttacctctaaacttatacccacataatttgaagtagactccaccctcacttattttttattctgtgggcatgtatgtttgtgtgtattagtctgcatatatgtcattgttctgataaaaaaataaatccttatagaaaatgc

SEQ ID NO: 648 - DNA, 3363 bp, Homo sapiens
agcaaccctcgacatggcgctgaggcggccaccgcgactccggctctgcgctcggctgcctgacttcttcctgctgctgcttttcaggggctgcctgataggggctgtaaatctcaaatccagcaatcgaaccccagtggtacaggaatttgaaagtgtggaactgtcttgcatcattacggattcgcagacaagtgaccccaggatcgagtggaagaaaattcaagatgaacaaaccacatatgtgttttttgacaacaaaattcaggtgaagccagtgacccctgtctgtagagtgccgaaggctgtaccagtaggcaagatggcaacactgcactgccaggagagtgagggccacccccggcctcactacagctggtatcgcaatgatgtaccactgcccacggattccagagccaatcccagatttcgcaattcttctttccacttaaactctgaaacaggcactttggtgttcactgctgttcacaaggacgactctgggcagtactactgcattgcttccaatgacgcaggctcagccaggtgtgaggagcaggagatggaagtctatgacctgaacattggcggaattattgggggggttctggttgtccttgctgtactggccctgatcacgttgggcatctgctgtgcatacagacgtggctacttcatcaacaataaacaggatggagaaagttacaagaacccagggaaaccagatggagttaactacatccgcactgacgaggagggcgacttcagacacaagtcatcgtttgtgatctgagacccgcggtgtggctgagagcgcacagagcgcacttgcacatacctctgctagaaactcctgtcaaggcagcgagagctgatgcactcggacagagctagacactcattcagaagcttttcgttttggccaaagttgaccactactcttcttactctaacaagccacatgaatagaagaattttcctcaagatggacccggtaaatataaccacaaggaagcgaaactgggtgcgttcactgagttgggttcctaatctgtttctggcctgattcccgcatgaatattagggtgatcttaaagagtttgctcacgtaaacgcccgtgctgggccctgtgaagccagcatgttcaccactggtcgttcagcagccacgacagcaccatgtgagatggcgaggtggctggacagcaccagcagcgcatcccggcgggaacccagaaaaggcttcttacacagcagccttacttcatcggcccacagacaccaccgcagtttcttcttaaaggctctgctgatcggtgttgcagtgtccattgtggagaagctttttggatcagcattttgtaaaaacaaccaaaatcaggaaggtaaatcggttgctggaagagggatcttgcctgaggaaccctgcttgtccaacagggtgtcaggatttaaggaaaaccttcgtcttaggctaagtctgaaatggtactgaaatatgcttttctatgggtcttgtttattttataaaattttacatctaaatttttgctaaggatgtattttgattattgaaaagaaaatttctatttaaactgtaaatatattgtcatacaatgttaaataacctatttttttaaaaaagttcaacttaaggtagaagttccaagctactagtgttaaattggaaaatatcaataattaagagtattttacccaaggaatcctctcatggaagtttactgtgatgttccttttctcacacaagttttagcctttttcacaagggaactcatactgtctacacatcagaccatagttgcttaggaaacctttaaaaattccagttaagcaatgttgaaatcagtttgcatctcttcaaaagaaacctctcaggttagctttgaactgcctcttcctgagatgactaggacagtctgtacccagaggccacccagaagccctcagatgtacatacacagatgccagtcagctcctggggttgcgccaggcgcccccgctctagctcactgttgcctcgctgtctgccaggaggccctgccatccttgggccctggcagtggctgtgtcccagtgagctttactcacgtggcccttgcttcatccagcacagctctcaggtgggcactgcagggacactggtgtcttccatgtagcgtcccagttttgggctcctgtaacagacctctttttggttatggatggctcacaaaatagggcccccaatgctattttttttttttaagtttgtttaattatttgttaagattgtctaaggccaaaggcaattgcgaaatcaagtctgtcaagtacaataacatttttaaaagaaaatggatcccactgttcctctttgccacagagaaagcacccagacgccacaggctctgtcgcatttcaaaacaaaccatgatggagtggcggccagtccagccttttaaagaacgtcaggtggagcagccaggtgaaaggcctggcggggaggaaagtgaaacgcctgaatcaaaagcagttttctaattttgactttaaatttttcatccaccggagacactgctcccatttgtggggggacattagcaacatcactcagaagcctgtgttcttcaagagcaggtgttctcagcctcacatgccctgccgtgctggactcaggactgaagtgctgtaaagcaaggagctgctgagaaggagcactccactgtgtgcctggagaatggctctcactactcaccttgtctttcagcttccagtgtcttgggttttttatactttgacagcttttttttaattgcatacatgagactgtgttgactttttttagttatgtgaaacactttgccgcaggccgcctggcagaggcaggaaatgctccagcagtggctcagtgctccctggtgtctgctgcatggcatcctggatgcttagcatgcaagttccctccatcattgccaccttggtagagagggatggctccccaccctcagcgttggggattcacgctccagcctccttcttggttgtcatagtgatagggtagccttattgccccctcttcttataccctaaaaccttctacactagtgccatgggaaccaggtctgaaaaagtagagagaagtgaaagtagagtctgggaagtagctgcctataactgagactagacggaaaagtaatactcgtgtattttaagatatgaatgtgactcaagactcgaggccgatacgaggctgtgattctgcctttggatggatgttgctgtacacagatgctacagacttgtactaacacaccgtaatttggcatttgtttaacctcatttataaaagcttcaaaaaaaccc

SEQ ID NO: 649 - DNA, 3649 bp, Homo sapiens
ggtttttaattgccaacagatcctacaaagtcagtgcagcaagctcttttttcttcagtggtgtatttgttggagttatctcttttggtcagctttcagatcgcttcggaaggaaaaagtctatctcacaggttttgctcttgacatcttatttgcaattgcaaatggattttccccctcatatgagttctttgcagtaactcgcttcctggtgggcatgatgaatggagggatgtcgctggtggcctttgtcttgcttaatgaatgtgtgggcaccgcctactgggcacttgcaggatcgattggcggcctcttctttgcagttggcattgcccaatatgccctgttaggatacttcatccgctcctggaggaccctagccattctggttaacctgcagggaacggtggtctttctcttatctttattcattcctgaatcacctcgttggttatactcccagggtcgactgagtgaggctgaagaggcgctgtacctcattgccaagaggaaccgcaaactcaagtgcacgttctcactaacacacccagccaacaggagctgcagggagactggaagtttcctggatctctttcgttaccgggtcctgttaggacacactttgatcctgatgttcatctggtttgtgtgcagcttggtgtattatggcctaactctgagtgcgggtgatctaggtggaagtatttatgccaacctggccctgtctggcctcatagagattccatcttaccctctctgtatctacttgattaaccaaaaatggtttggtcggaagcgaacattatcagcatttctgtgcctaggaggactggcttgtcttattgtaatgtttcttccagaaaagaaagacacaggtgtgtttgcagtggtgaacagccattccttgtccttgctggggaagctgaccatcagtgctgcctttaacattgtttatatctacacctctgagctttaccctacagtcatcaggaatgttgggcttggaacttgttccatgttctcccgagttggtgggattattgctcccttcatcccctcactgaaatatgtgcaatggtctttaccattcattgtcttcggagccacgggtctgacctccggcctcctgagtttgttattgccggagacccttaacagtccgctgctagaaacattctccgaccttcaggtgtattcgtatcgcaggctgggagaagaagcattatctttacaggctttggacccccaacagtgtgtggacaaggagagctctttagggagtgagagtgaggaagaggaagaattttatgatgcagatgaagagactcagatgatcaagtgaagagccccagattccccctaagaagcaaaggatcgtcttttatgcctctggctaaggcgggttcttccatgactcctaagagagttgtaaaaatagaggcttggcttgaatgtacatagatggtacctggcatggactgatgtttttaggcacagaagttggagaagagatttcatgaaagacaacatcactgcattgagagaatagttgttaatttgtttagaatttaagttctactcagaatcataacatctggcagaacagcccaaacccacattccaaagtggtaggctcatttgtttctagagatttcatcatgtcgcttttccttcatcatgatctaaataaaggcagatatgtaaaatttctcaccattttggtggggtaagataagctattattaagatttaatccttataccatgttggacatttgcccctatcagttgctcctcaggaatcatctggtacaggttaacatcagcattttcattttgtatccagggaaaagcacccagaggtcatctgtgtgtcccgagaccctccagctttttcttagctgatgaaatatgagtcctcagcttggttcccagcctgctgattgacttgggctgctggtgccttgagtcccacagatgattcattaggaaaagccagatgtaccaaagcggtttactcagagtcaggggtgtagctctggctgcctgtcagctcccttggatactatattgtatgatttcttcctttcccactaatatgcacatccagaaaaatttccatctgagattctagtacttcaaaatcatgcatagtaaatgagaaagctttaagtagagggcagttaaacagtgacatgttgagcacctggaggaaaaaaaaaggtgcagtttttaataagagagaaaatgaaattatctttgataaatttttgtttgttttgctttcagcattgtgccatgagggatttggacaatatttaagaacttcttgtcctagatcagccccaatctgtttaatcaaaatggaaggttcagtaatttcatgggaaaccttggtttttcattaagtgctaccaactttcaagtgaatcttgtatttgatttcctaaaatcatgtcttgaaaacatgttttctcatgaaacttgaatactatctcaaataggaatataaacctggagtcaacaagcttaggcagcattgatttaggtcactttcccagtgaggaaaatttctgtgttttcagaatttccatttctactaacctcttggagaaaaagaaattgaattagaggtaaatagaagacgtcactgtggctgcttctggaagtgctggaagcatcaccccaattggctccaaatactgtcatgttttcttgcacactgacttctggtttccactgtatcagtatgtacctttgtaattgttatttttatgtcttttatgcccttgattattagttgggctcttcataaacagaggccatctctactactgtttatttttccctgctgtgcccagaacattggcgtagacacagtaagaacctagtaaatattactgtttctagccatcagggagattgtggaactcctcccagtataatttttacaaactccaagcaaatctgacccaaactcccaaattgtcaagtcctgcttaactttctctggaaaatagaccccttctcaacatcagaataggaagagaggaagaacttacaaagacacttaaaagttattcttaaatggtggttgggcatttaaaacagtgaactaacatatatataatttttgattagttggagctttctttgtattatgagagtaatatatctcattacagaaaatttggaaactataaatttagaaacgtatcacccatacgtccaacatcgaaagaaaaccagtgttatgactttgttccatttgaagactaattgggagtccatctctctattggcactgggttcgattgcccctggctaatagagttcaattagttctatccctgggtttcctttcttagctatggggtggaagataggagggggagatctacaatttgaatatgtgttacttaataaggctaggctggccatcagttgcttatttcagatgtgtcactaaattttccttctagatggtccttgagcaaaacttaataattactgttttttatttccactgcctttataaaatcaaaattttctccttttgataaaaactgttgaatactattgatgtagagaatgtgtatatgtgtatatttgcattgattaaattattggaaaacttttcattgacaggt

SEQ ID NO: 650 - DNA, 3977 bp, Homo sapiens
atcccccccacccccgccaacgctcgccggggtcgcccgaggcctgagccaagggggacgctgtgggcgcggctcaggccaggccctcagtgctctggctattgctgaaaacaccttctagttccaccttgtaactggactcccaaaagatgaatgctgacatcttctgatgcttaacaaggaataaaaatagtcaccttaatcatcaaaaagttccggtggtgaggagacctttccaaatataagaggaataaagaagtcacctccccagctgtcatcatcttccagcagattgagcaagaatattttgagcactacaggaaagacagtccatcaaacccgagatgatgatcagccacgtgattttttcaagaagaggaatagggtgaatgaatctcatcagaaaagcagcaatatgaatgctggcccatcttggaataaagtgcaacattcaaagaattcttcaggaaaaaggcagagtaaatcccaagtaccccacgcttcttcccagccgagaagcagcctcacagctgtcacccagcctactgaagaaaaacttaaagaaagcatttccccggaagcaagacgcaaaaggaatccactcggttccaggtgtcagggggcctcagggaataaactgtttcttgattttcagtcaatgaaaattattaaagagaatgctgatgaagacagtgcaagtgatctctctgattcggaaagaattcccattcctccttctcccctcacacctccagatctcaatcttcgagctgaagaaattgatccagtttactttgatcttcaccctggtcagggccatacaaaacctgaatactattatcctaatttccttccatcccctttcagctcctgggacctacgagatatggccctgcttctgaacgcagagaacaaaacggaagccgtgccccgagtgggaggacttcttgggaagtatatcgatagacttattcagcttgagtggctgcaagtccagactgtacagtgtgaaaaagcaaaggggggcaaagcaaggccccccactgcccctgggacctcaggggcactgaaaagccctgggagaagtaagctaattgctagtgctctgtccaagccactacctcaccaggaaggggcttcaaagtcaggcccttcccgaaagaaagcttttcaccatgaagaaatccacccatcacattatgcatttgagacttcccctagacccattgatgtgcttggtggtaccaggttttgttctcagaggcaaacccttgaaatgaggacagaagaaaagaaaaagaaatcaagtaagagtacgaagctgcagcgctgggatctgtccggcagtggaagcagctctaaggtggaaaccagcggtcacattcgagttcccaaacaggcagctgtgattctggactcagcagattcctgtaaggcctccaaaacacaagcacatgcacatcctaggaaaaagggaaaggcagagagctgtggtcatgccactgtatcgagtgagaaaaaactgaaaacaaacggagtaaagcaaaacacatataaactaaaataaatatctaaaatgctgaattgccaagacctgcaggtacctcaatgttagagcgcttccaaaagtcaaaatactgtgaattttaaggaattttacaaatactgacatttaagtagttgactggcatttttgtccacctttatttctaccctgagtggggttattttcaaagggaagtgtctttcaataagcctttctttgtattgtcagtcttaggcaaatgagagccctttagataaaaattatgtaaaatatgtgccatataaaggaataaaatggcacctctccagggaaagtgtcagtgaaacctcagctacagtagccggtctgtgtagagcagctagtggtgttacctccccattttcacatgcacgtaagtatatgaaatagtgcagactgtttcaaatggtgtggaatcctaaatgtttaaaataaggtccttcttgcccactccctcgcttacttttttataaactcctcaagcaaaatttctgttcattttacccttaggagaagctttagttcttcctcaagtcagggagtagtgagtttgtattttgagtagtcatttctcactaagctggttgctttctagagagacagtggaatctagtactttaatacattttctctgacatggtttttttttttcttttttgaggggcattttaaacttagaggtggtggtaaaacctacttttgagttctccgaactgaggttaaaataacttgcagaattttccaaagtcaatgggcttagcatgattactgctgtttggtggggctgagaatgaaatatttgacattctggaattgctggcatgtaaagcttctccagagaggcaccccagggaaatcactctttacaatttgtaaaggaagggcctgtaaaaggatcaaaacacatggacctacattcagtgtaatagttacaaagttactgatttgggttccacaccctgtggtccttagtcaaaaataatgatctgtttcagtttgcaagagcaggattttattattttgcttggggtgaggggcgggagagtggaatatgagtaaggttgctgaatgaattctaaactcgcttatctggtcttcaggcttcccaactctctccaagccttcttatttcactgcagttaaataacatcttcttgttcctatagttgtgctgtgagttttctgttcatatttgcgcagtgtattttaatacggcccatgtcattatagttgattttatccctttaaacaattactgtatttgtttttgacgtagaggtttcaattttttcaccttgggggcaaatgaaaaacttggcatttttcatttgggaacatataatagcttgtaaacttttcagacagcagtaaatgtctgaaaaaatatcaaaaacagcataaagacaagattatgtagctctaattatacgtatataattataaaaaacaatgtgcaagggttatattttaaggtcttttaaaatctgattttgatcataccaaatgacataatattttttatggtagccttttactttcaagacttaattttcagacttgtacaagttccttcttacattctttccctctcacaccatcctactggagaaagcatacttttatgctaagatcttactttaagctttttatgtgaacaaaagatgtacatatagtaagtattacttccgtagtcctcaaatttactataacttttgtacttagtatatgttttatatttggaaaacagcactacgcttagttttcctgtagttcctgagtgatgtctgtgtgttccttgcctgcccttttttgtgagcacagattagtctgttatccatggctggcacttcacttatgatcctttctctgctagatttttatgcagctctctatgaagtttcatggcccatagatattcaaaagcaagatattctatacatatgtgtatatgtatatatactccttatgttaatactaaagtgtttatgctgagttgctgcctttccccgtcatgtatccatgtgcatgctcttagagaccttgaatggttgagggtaaagtgatttattagtaattctacttgccttgtgtatgtctgagctgaaaacaaacgtgattaagaaatttagaggtggctgggcgtggtggctcacgcctgtaatcccagcactttgggaggccgaggcaggcggatcacctgaggtcgggagttcaagaccagcctgaccaacatggagaaaccctgtctccactaaaaatacaaaattagccgggtgtggtggtgcatgcctgtaatcccagctactcggaagtttgagacgagaatctcttgaacccgggaggcggaggttgtggtgagccaagatcgtgccattgcactccagcctgggcaacaagagggaaactccgtttc

SEQ ID NO: 651 - DNA, 3099 bp, Homo sapiens
agcttcggccgccggcactggcaggagatgaaaggctgctgccgcccggtcggaaggacatcggcgccccccaggcccggtccccgccccagttcctcgggcctttcctgctgcccctgcctgcgagggccgacgacacggagaacaggatcctgcgcccaacccaggtccccgccttctttcagaggcccaggcctggaccccgctgagccgcagatgtgcgagcaggagcgccagagccccgatgcccgcccagcaggaagcgggcgggagatggttccttccttctgtcctgagggggaaccctgcacagagggaccattgagggcctggcattgtctgcctaactcacccagtgcctccctccctgggtgggccatgcggggccttgacaggattgccctggtgccgtcttggcagtgggtctgggtgggatcctgggggcagggcttccctgagtgcagacagctaggcctccacctgccccggcctcccacccaggctcagatttccagggcataaggctccattgtcccagcactggtggaggcggcctgtcaattcagccttgtgtttggtggttgggaaattcccagccatggggggctgcaggcaggaaggggctgcccaggtgtcctgcaccccaactgaagggactccatgaggttggttcctgggcatcccctgctgcctggagctgtcccaggctggacctcaaccattcatcaaccctcaggagcagttgggtgaggagcaccagaaattcaatgctccctggcgctgcatccccagagccctcccagcctaagaagccccatctttctgtctccacgcatggagaactgcagctgtgaggcccaggacccttagcaggacatgcagagctgggcagggacccaggctcatgctcccagcgtggggtgagttgtctccagcctgtggagactgccatgaagttgatctgcctcccagagggcctggcccacttgaaataattgctccggctactgatgtggtgggaactttggtatttttaacccatttggggggtgggggagcagctaggaagagagaggcaagctttcagagtcagagaggcctgagagaggagagtagagggaaactcagtgaggaggagccaggcaggctgcctcggtagttccccaggcctagacaccccccctgtaccaccccctgtcccagcaggtaggtgcagacctagatgccaggtgcagaagggggaaagggccctctccagggttacagcagggatcaccgaggctgcaggggctgccaaggcctggaagaagtcccatgttccagggagccccatggcttctgatgtcaggaaaacttagtcctctcagttccccagaatcatttcaccccaccccacccaaactgagtggcaaaccagttgagtagagaatacaagccctgactccagctgcctggtcagtggcatagccagccaagtcctagcaaccctaggagtcagggagtcagggaggaggcaaggacaagactacagtattgtttggctgagttctgggtctggccccactccccaaaactgaccccaatctctgtgtctgctgccctaaaaagagaccctggggctgggtgtggtggctcacgcctgtaatcctagcactttgggaggccaaggtgggcggatcacttgagatcaggagttcaagaccagcctggccaacatggtgaaaccccgtctctactaaaatacaaaaattagctgggcatgatgacgggtgcctgtaatcccagctactcaggaggctgaaacaggagaatcacttgaacccaggagacggtggttgcagtgagccaagattgtgccactgcactctagcctaggtggctgagcgagactccatctcaaaaaaataaataaaaggagaccctgactggatgtagtggctcatgccttaatcccagcacttttggaggccaaggcaggaggatcacttgaggccaaaagtttgagaccagcctgggcaacatagcaagaccccgtctcttaaaaacaaaagatcctagcggtcctcatctctaccatggactaccagagggaaggcagcacctctcatcacccagggggatggcctccagtcagctggggtatgtatgcagctgtgtggcagcaaatatgtccatgcctgcaagccactcagccctcagtcacacggtgatgggcactaatatccaagaggagcagaagtcaaggccatgggtccttttctccccttgccagagatgcagccccacagtccctggtgatcttggctgggagaaaaatcagagtttgacatctcatcccactgccttctgctttctgaccttactgaggtcagggtcatcaaggcctgggggactgggacagggttaaggggtgtcctttctccatccgtcttccaaccccgtggagactcagcatgcctaggaaggtggaagggcttcctgcgggcacaccatctcccgcctccctgtgcctgtcctctgctgggtcctgggttctccagtgattatagcccttgctgcttcccccacagtggggaacacagagccctgcccagaggcttgaacctggcaccacaggggtctggaattacacagaagacgggtgacagccaaggtggatcatgaacggtgagaagtccagcaggtgacaaggggaagggtctaaagggtggagggcacagcgcaagcaaagtcttggcaacaaaagagctaatgcatcccagaaatggggcaggtggagtactggaagctacaccaagcttcagagtggtcctgtggcctcggtgtggtagctcaggcctataattccaacactttgggaggctgaggcaggaggataacttgaacccaggagttcaagatcagcctgggcaacatagtgagacctccatttttacaaaaaatacaaaaattaactgtgtgttgtggtgtgtgcctggagtcccagctcctcgggaggctgaggtggggggatcacttgagttctggaggtcaaggctgctgtgggccatgatcttgccactgcactccagcctgggtggcaaagcaagatcctgtctc

SEQ ID NO: 652 - DNA, 3777 bp, Homo sapiens
ctcttcacagctgagacaacagagaaactggactgaaggcaaaggggccagggattgcaatttgaggggggattgcaaaggatttctggggtgtcaggcagcccagggcagctcagctgtgtgggtccccattacccttccccacccacctccaggaaaacagaaaagcactgggaagtcttccagaaggtgacagaggtcttcatcctagtgcctgcgctgctggggctcaaagggaacctggaaatgaccctggcatcaaggctttccactgcagccaacattggacacatggacacacccaaggagctctggcggatgatcactgggaacatggccctcatccaggtgcaggccacggtggtgggcttcctgacgtccatcgcagccgtcgtctttggctggatccctgatggccacttcagtattccgcacgccttcctgctctgtgctagcagcgtggccacagccttcattgcctccctggtactgggtatgatcatgattggagtcatcattggctctcgcaagattgggatcaacccagacaacgtggccacacccattgctgccagcctgggcgacctcatcaccttggcgctgctctcaggcatcagctggggactctacctggaactgaatcactggcgatacatctacccactggtgtgtgctttctttgtggccctgctgcctgtctgggtggtgctggcccgacgaagtccagccacaagggaggtgttgtactcgggctgggagcctgttatcattgccatggccatcagcagtgtgggaggcctcatcttggacaagactgtctcagaccccaactttgctgggatggctgtcttcacgcctgtgattaatggtgttgggggcaatctggtggcagtgcaggccagccgcatctccaccttcctgcacatgaatggaatgcccggagagaactctgagcaagctcctcgccgctgtcccagtccttgtaccaccttcttcagccctgatgtgaattctcgctcagcccgggtcctcttcctcctcgtggtcccaggacacctggtgttcctctacaccatcagctgtatgcagggcgggcacaccaccctcacactcatcttcatcatcttctatatgacagctgcactgctccaggtgctgattctcctgtacatcgcagactggatggtgcactggatgtggggccggggcctggacccggacaacttctccatcccatacttgactgctctgggggacctgcttggcactgggctcctagcactcagcttccatgttctctggctcataggggaccgagacacggatgtcggggactagcttggtcactcaacattttccccatccctctgcactttctatttgaaatttttcttttgttcccctgtccctcctccaccccacactcccacctctttctaggacttcactttgataccaaattctcattattttcaatgggaatttttatacattgagccaagtttgtatagcaagaatttgggaaacacagatggcctgagataagcagtacaagtaggtttttgagacaatcaccaagtgcagtttcatggtgggtgcctccaggtgatgtggactggagcaggggagttttgtctggaatctggggacatggggtttggctttagcaacctgtcttggccctaatgagaaaccctttgtaagtgggctctggatttttggttttgttttcttttcatctgttttgttttatttttggttttggttgaacagagggacagaagaataagtaacactcccaaacacagacatacttttgtagaagtggaccaacttcaaagctctggacaggagacacctgctccaggcccctgtgatcccagttctgttctcttgccctctggacctaagcgttcccactcgcagaaagagtaaggtggactgacttttcaatttgtgcacatgcctcttgttcaatggcctggtcaacatcaacaacccctccctctgatcatttccagttgattgtcatatccaggaaaaaatggaacagtgcactcttctccctgttgacccatgtccacctattggttccccaaaatccacattctccctgggcccagatgactttgtctccctgggcccggattctttgtctctcttcaaccttcatctcaaattgtctctaagcactaccttccccagagcttgccaggttgggttttgagattagggtcaggtcatgggtatgtggagaatggtttggaggttgaggacaaccacaggtgtctcattgctgccatttctcctgaggacataatcacttggtcaccttggaccctgtcacttcctaaaattactcgttctgtcatgccatagaggtcagttttcctctttcttggcttctacccacaaacattcaccaatcatttattcgttcatttagcaaatatgcagcctccgcaagatgagctctcctgcagacaagcatggtctgaaacattctttgagcaatatttattgagtgcctactatgtgttaggtactgtgccaggcactgataagccagtggtaagggaaacacagctctaacctcacctcattctccaggttacaaaggccatgtgcccctttgaatctggcagagaaagtttcctcgttgtaagtatttgcatctacttcaagccagattcttctgcctctttctcctttccagacccctactctgtgcagtgctgaccacagctagagccaccgccccattgctcaaccagtatttatttccctaaacgacccttcctcacattcccttccctccacctctccttaccaagcacccaaaagaggatttagaactagcagggtggacatcatctggttgtttctacttttctctgcctagcacaaaattgggagaaaactggagcctccatccgcagtcacacgtgtacagatctggggatttggatgtaggctttttctaacttctctctcagaagcttctacagaaacccttccatctgtagcctcaagggcccacctccaagggaaggcttaggcaatgatcctgtttctaccaacactgcaccttatcccaggaacctgccctagacctccagagaccatattttctctccctccatttctacccagacctccaggcctccttctggaatcatagaaccgtagaattggaaggaattttagaggttttctagttggagttgtgtccaacagaattcattaacaccagcctgggcttgtttttcctcctccctctggacttttttcatcttttcctccacctcaaaaaatacttacacacagattcttcttgtacaggcatcaaaaccaactcctctgcccctaaggctgtgtccctgtggtctccagccacccctaccccagtcactcgccccttcctcatctctggaatttggccaggcagtcccagaagactctggagtgacctcctttgcctaaaaagcagacagataggcatgccccaggccctgagtgagcagaggaggactgtagggtgagagggaaagaaaatgaaggtgactttcatggaagtttcatttcttttccccgattgtaccaactgcatgtacttttggcctggctgcaaggagcaatattggtttactctcgtatccttaaaaagttacagaactgtgtcttaagagaattatttatagttactataactgaattgacaaatgtcaacttaactgataaattatatttggtaaaataaagaggacgtttatttag

SEQ ID NO: 653 - DNA, 3827 bp, Homo sapiens
tacctggacaggtttttttccatattggcacttattaattgaaaaggtcagggtaccacttccaatgagtgtagggaagcaagcagtagtggtgtttagaatatcaaggttagctgctggatgcggtggctcacgcctgtaatcccagcactctgggaggctgaggtggacggatcacgaggtcaggagatcgagacaatcctggctaacacagtgaaaccctgtctctactataaaatacaaaaaatcagctgggtgtgacggcatgcgcctgtggtcccacctactagggaggctgaggcatgagaatcacttggacttgggaggcagaggttgcagtgagctgagatcacgtcactgcactctagcctgggagacagagcgagactccgtctcaaaaaaaaaaaaaaaaaaaaaggttagcattccactcttcctttggggtttcagggtgacttattgggaaaatggagagatactggcattaatggaatcgtttcctgatttgagcgttaagtcacaaacccaacaggaactccagtttcttgctagagcattagcctttgctaaagccggccccagattatggtcccacggattttcccataaagaaagggaaaggatttgcggacagaaaataggaaagagagggagaaagataagatttttgcgattgcagtgaagtcttcatccacatctagggaaagctgttcatgtctaggacgtgatctgcttctggggaaaaacttccctggttagctttaccttaaagtctccaacaggtgtgtagttccaggagtctggagaggtccttttgagttgtgagatgtggacccaaggttcgaagccctgaagttttaccacagtgtgggtaatagaagaacttggtattgtctctttctgtgaggtttaagggcactttttctctgataccatctccagaagacctagtctcaggttacagattgtgaaggctttgatggtcctctgtgggtcacagaaagtttattttattttgtcaaaatacagtgtgacataatgcattacagctttgtagtatttagtggcatcagcatttaggagagtaggaactacgtgaagttctgttaggagcacaggctttctagtaactatttcataggggtcaatctgtgtctgtcgtaggaatggatctgatctgctgaccaaaggcaatggttggctttcttcttcagagatcagaaaaaaatgaaattcaaagccaatggtggtatctttggccaagataatccaatcgattcagttaattttgccaattttagttttaaaatatttgtccttttgacctttccagaagactgagggtgaaagggacaatggtagtaccactgtgtttctaacactttatttagctgcttcatagtttgtccaataaaatgagttcctctgtcactggagatttttccagagatgccccataaaggaaacacatgttcttataactccttagctactgccatagcatcagctctcctacacaggaaagcttctatccaaccagaaaacatgccaactattacaagaacatactggtacttaattgagggtggcagttgaatgaagtccatctgtaagcgttcaaatggtccatcaggtgttggtggaaatacaccacttggagtttttattatcttccctggattatgggtttgacaaaccagatattggttataacccatttcagcattttacagtggtcacactatcagtattttttataatctggatcatcttgctcatttgtgaggtgcagaggttgttttttgtttttttgttttgagacgggatctcgctctgtcacccaggctggagtgcagtggtgcagtcatggctcactgcaacctccacctccagagatcgagcagtcctcccacctcagtctcctgagtagctgggactaccagtgtgcgccaccatccccagctgattttttgtaatttttatagagagggttttatcctcttgcccaggctggtcttgaactcctgggctcaagctgtcagtccagctcagcttcccaaagtgctggggttatagggaagagccaccgtgcctggccaagtgcaaagcttttaacaatagaagtttcaagggctcaggaaggaccagggggccatctaggctctccatgagttcacgcttaacattatgtttacgtctgtcagataacaattttggttttccacatcaggtgcattgcactgttagatgggtcatcataaaggtcatcaatctagtggcattcattcaatttgcacatcctaactgtttcagcactatctgatttagcatgaaaatctgccagggcagtcccttgatattcaggttcagctttccatgtatgggcttcaatcttataagaatttgttatttatttttcacctttactcaagatagcttggaacttataccaatttgtgatggcaacaggatagtagcaagttcatccacttgagtctgtttttaataggggctccactagaagtgagaaaccctctttgtttccataacatgccaaaattgtggactgcaaaggcatgtatatatacatagcatgtctgctatgtatatagcattttctgatttccctttagctatatgataagctcaagtgggagcaaaagttctgcagtttgagctgactgaaactgggaagagtccgctttttattaactcattttgggttttaatgacatattttgccaaagaataatttcaaatgggggccgccaccacgcccagcttattttttgtatttagtagagatggggtttcaccgtgttcgtcagggctggtctcgatctcctgacctcaggtgatccacccgcctcggcctcccaaagtgctgggtcaactatgttcttgagtaagaactcctgatgcctgattgttatgtttatgaacaaacaaggtgaagggttcagtataagttggaaatcctagagcaaccatatctgttactttccatcctggttatatttcttaattagactgcgaagttctgaatgaagtcctttttaaatagagcagttaatgccatttctgtctctgcaggtttcacaagtagtgtttctaaatgagctctataatctgaaaccggttcatctttcttttgcccacaagattatgtgattgaccaatcaattttttgtggaaaagccctagggattgaatttaaaagatcttcagcaattcttccagttcctttttgcctcctcttggggttttggagtggtctttagtatcctcaggctgttgccattctgctcctgctgtcaattttcaagcttcaccagtatcatgtgaataaattggtaaagattagagagtcctgaatcataagctcttatgaggattctcaattttccagtacgtttttgagtattttctcttggattagttaagtctttatgatggctctaagctcagctttagaccatggagtaaaagtggttacagcaggcaggctggttgactagagagtctcactttgtaaggcatttgtccaacttcccctttttcattagcctcaaggagaaaaggtaactgagcaaaagggttactgtactcaaagcatcgaggcaaagaagagacagagaaggagcaatccaggttcatgtgctgcatgagcctttcatttgcgttttgtaaagaatcttttaggcaattttagatttgtataatcctttagatgcctctgcataccgatttaaaatgcatcccgttgtttttgtggcgttttcgatcctttcttttctaatgtgtcccataaataaacagttttattt

SEQ ID NO: 654 - DNA, 1790 bp, Homo sapiens
acatgaaaaatcttacactggagaggaaccctatgagtgtaagcaatgtggtaaagcctttgtttctttcacttcctttccatatcatgaaaggactcacactggagagaaaccctatgagtgtaagcaatgtggaaaagccttcagatctacctcacacctttgaaaacatggtaggactcacactggagagaaaccctatgaatgtaagcaatgtgggaaagccttcagatctgtcaaaaattgttgaattcatgaaaggacacacactggagagaaaccctgtgaatgtaagaaatgtgggaaagcgttccataatttctcttctttgcaaatacatgaaaggatgcacagaggagagaagctctgtgaatgtaagcattgtgggaaagcattcatacctgccaagatcctttgaatacatgcaagaacacacaatggagagaaaccctatgaatgtaaagaatgcagaaaagcattcagcttgcctacttcctttcatagacatgaaaagacattggaaggaaaccctatgaaggcaagcaatgtggcaaagctttcacttcttccagttcttttcaatatcatgaaagaattcacactggggagaaaccctatcagtgtaagcaatgtgcgaaagcctttatttcttccacttcttttcaatatcatgaaaggactcacatgggagagaaaccctatgagtgtatgccatgtgggaaagccttcatttttctagttgctttcgatgtcatgaaaggactcacactggagagaagccctatgaatgtaagcaatgcaggaaagccttcagatcagcctcacaccttcaaatgtatggaaggactcacactggagagaaaccctatgaatgtaagcagtatgggaaagcattcagacctgacaagattctttgaatacagataatgaatgtaaacaattaactgtttgtaataactgtatactaacaaatgttatctttaaataattaagaagctataatagtaaggccgggtgcggtggcttatgcccgtaatcccaccagtttgggaggccaaggcagatcacgaggccaggctggtcttgaactccagacctcatgattcgcctgcctcggcctcccaaaatgctgggattgcggatatgagccatcatgcccagccgcaaccctaatttttcattcagtcataataccaacagttatctcatgtacctctgagtgccttcttcccaaaagccagcagtaccatacctgctgtcagcaagtgtgtaatataccatagtgataaatatgaccaaaagccataaatgactgtgagatgtatgagaatgacacgtcacattagtaagaagagaaaaattttggccatgtttatgatttgaaatatgttttcctctatcacatttagaaatatagttacaaaatgcccttagttttatcctgattcaccatggtcactgaggagcatcgtctcatatgcctggtatgtgacatgtgtctcttcaacagtaaaagacttggcattggctgggcatggtggctcgcgcctgtagtcccagcactttgggaggccgaggtcaggagttagagaccattctgaccaatatgatcaaaccccgtctctactagaaatacaaaaattagcggggtgtggtggcatgctcctgtagtcctagctattcaggaggctgacgcaggagacttgcttgaatataggaggcagacgttacagtgagccgaggtcacaccattcactccagcctgggcaacaagagcgaaactccgtttc

SEQ ID NO: 655 - DNA, 1920 bp, Homo sapiens
ttttgcagatgcttattgaacactttcttggagtcaagagtgtggtgctctttgagtgtattgtgttattaaccctcatgccattcccatgacacctgtgcataggaggaatctgggacccagagaggcgggacgggataggcagggtctgatgagcagctgtgggtggtcctggtgggagctaaggagcaggcagcctgaggccagggcccattcccaatcacatgttgtactgagccagccaccaccttagattttagagtctcctggagcacgtgaaaacaactgaaaaagggtaaccacacatcatttcacttgtgatgtagcttgcctgtctccacaccatgcccctgaagaatagtatatcacctacagccccttccccagtcaggaatggaagtgcatgacacatgtgctcctctaccccttccatgctcatggcagacatcattaatcaattatagcactctttctgtagagccagagacagcatcacactctttcccctcctgcattccaggccaccactaccaactgaaatcgtgttagtaccataatgaatgctatgtaccattctctaccctaagcgattgcaaactgtaaatgaattgttgctgatttctgagcccctcctagatttggggtaaattcatttcttgttttcagaacacaggggatagggacaccctgtgcagttctttctccaggacaaggagactccccactgggggatggggcggggtttctgccttaatttgggcgctcatagtttcaaggaggagctctttctggctttggccagctagaaggaaaggtgccctgtttgttaactttaaaatcactacgggtgtagtgtatggagtgggctgtgccatgctggagttcagagcaaaggttcttcaggttttcttgcgaaggaccttaacttgtcaatggcagagccacacccccgggacatacttggcagaggaatgcctcttcaggcacataaacatttttgcatattccatgttagtcaataaaccgtttcataagggttctttgaggacatctgacttcaaagggaaaaaattcataattcagacaggctctcggggcttcaccatacaacgcctttcttgtatttggttagttttatgggcctggagtgttgaccatgtattaattttctctataaaaatcagaaccgctctgggcagacccagaatttatagtatctgtggcagtctggcagagagtagggaccctcagccatgagtcctcgcctcacttgtaacgagtaccccctaagtgatcccaggtgtctggggatgctttaacgcacccagatcccaccttgctcttggcgcctcctaattacacaccatgagcggcggcggcagaggagaactgctgggaggaccgaggaggatccgcctctcgtgtagaagaacagactgtattaaacagtgattatggccatgccaggcacaggaagacctgacctcatggaatcctaacaacacaggcggtgggcgagagagagctttgacatttactcactgaatgcgccctgatgcttaatgagtggcacgggtcagcagcaccgttgtggagctggggctctcagctggtgtgggggggggggtcatgtctctggctaaggagcgtacctagcctgcctaagccatgagcctgttggggtggcatgaacagtgactgctcttcaccccaaatgcagtgtttctccttaaggaggcactcagacatttaggaaacggggggaacgtagccacggtgctgttctgggatttgggggctcccccattctgggtgcatctcttgcaaatatgttatgtgctccctttcacggatgagcaaactgaagctttgagagtctcaaagaatgttctttactagactgaaataaaaactagaaac

SEQ ID NO: 656 - DNA, 1749 bp, Homo sapiens
gagtctgggttggactggcggccgtggagtttgtgacatacgaggtgacacccctcgagtcacttcccttcaactccagctggagcgcctgcttggctttgggttcgttctgcagccttcgccccatccccctgtccctggtcagagtctcagtccaacacccaccactccatgagccccaccccaggcccaaacaagccacagtggacccctgtggcctatgaggtctcgggactagaggccaacaggctaagccatgtccctgccaggccctccaggacagggcctgctatacaggggagctctgggcccagcccactccaaatttccttcaggcagtggacaagagagaagacagaatcatggtgcaacagagctgcatggccctcagaacccctaagaacacagctgggctcagggctctgcaggtggaatcacactcaacctacggcctctttcccacattagcagccacctcagcccatcccgcccggcccagcccaggccagtccagctcagtccagcccagcccagctcagcccaggccagtccagctcagtccagcccagtccagccaggcacagactgtcctcctggggacatggcatgagggccgcgtcctcacagtgcattctgtgttccagcatccccgaccagccccaaggtcttcccgctgagcctctgcagcacccagccagatgggaacgtggtcatcgcctgcctggtccagggcttcttcccccaggagccactcagtgtgacctggagcgaaagcggacagggcgtgaccgccaggaacttcccacccagccaggatgcctccggggacctgtacaccacgagcagccagctgaccctgccggccacacagtgcctagccggcaagtccgtgacatgccacgtgaagcactacacgaatcccagccaggatgtgactgtgccctgcccagttccctcaactccacctaccccatctccctcaactccacctaccccatctccctcatgctgccacccccgactgtcactgcaccgaccggccctcgaggacctgctcttaggttcagaagcgaacctcacgtgcacactgaccggcctgagagatgcctcaggtgtcaccttcacctggacgccctcaagtgggaagagcgctgttcaaggaccacctgaccgtgacctctgtggctgctacagcgtgtccagtgtcctgccgggctgtgccgagccatggaaccatgggaagaccttcacttgcactgctgcctaccccgagtccaagaccccgctaaccgccaccctctcaaaatccggaaacacattccggcccgaggtccacctgctgccgccgccgtcggaggagctggccctgaacgagctggtgacgctgacgtgcctggcacgtggcttcagccccaaggatgtgctggttcgctggctgcaggggtcacaggagctgccccgcgagaagtacctgacttgggcatcccggcaggagcccagccagggcaccaccaccttcgctgtgaccagcatactgcgcgtggcagccgaggactggaagaagggggacaccttctcctgcatggtgggccacgaggccctgccgctggccttcacacagaagaccatcgaccgcttggcgggtaaacccacccatgtcaatgtgtctgttgtcatggcggaggtggacggcacctgctactgagccgcccgcctgtccccacccctgaataaactccatgctccccc

SEQ ID NO: 657 - DNA, 2041 bp, Homo sapiens
acaggagaatgagaggcctccgctggcgttacactcggctgcccagccaggtggaggacaccctgtctggggaggagggtaacgaagaggaagaggaggaggaggcagctccagacccagctgctgctcctgaggatcccacggtgccccagctgacagaagccagccaggttttgagtgcctcagagattcggcagctcagctttcacttcccaccaagagtcaccggccatccctggagtctggtcttctgcacgtcaagggacggtttcagcctgcagagcctgtaccggcggatggagggctgcagcgggccagtgctgctggtgctcagggaccaggacgggcagatatttggagccttctcctcctcggctatccgactcagcaaaggcttctatggtactggcgagacattcctcttctccttctccccacagctgaaggtctttaagtggactggaagcaactctttctttgtgaagggagacttggattcactgatgatgggcagtggcagtggccggtttgggctgtggttggatggagacttgttccgcgggggaagctccccttgcccgaccttcaacaacgaggtgctggcccggcaggagcagttctgcatccaggagctggaggcttggcttctcagctgacagccctgcggcaacagaattctatgattgaagcctctaaatgaattgtgcaggagagggagtttgtaaacaactgactacagacattcacattgggtcatctttaaaaagctggactctgcttttggatgcttctcggaggcgagttggattttggactgaagtactgtcgttccattcctttttttgaggtgttatgagtggggctataacatcgccatcctattaagaagagagagaaaaacaggcaatagagaaaagccagtttccatcatcttatttctgagtgaaagtctcaagtgcgcacatcctcatcttgcatatagattgcttctagctgtcctcaatccagggaaactccaaattacatatgccctgtgcttggggcaaattagaaacactacagtcttacgcaggaagagccttcatgaaaacagccactggcctctgcagagatgactgggagcagcataccactgcccacctctatggcctccttcacacaccttcacggagcacaaactctgtcctgttttcccaggagaaagacgggatgcactgaacccctagcttctctctcgcctggtcccctctgcaataaaaggcccaggtctacaagatggcaaagaaggggaggaagaacagtatgtacctgcagaatttaaatttttctctgcatcaaagctctaacgttggtcccatcagcataggctccagccaaagaagctcctccacccaaaataagggagagatccaaagggaggcgatacaatgacgtgaaaccatagaggtaagaagcaaggcctcctaatacttgactctatgctaaactgttctgaacttgtgggtagatcttctttggttacaagatgatgcacgatcttggagagcctctgttgtaccaggaatacaatgctggtgggaggattcgtgctcctcatctgcttatttgctctcagatccattcttcactcttcctctccctactctgtctcacaggagctactccggtaaattacatttctcagctcccatgcctgttggtttccagttagatttggtcagtgggaggctctggtgggagactggaggtgagaagagggcagagaagtcaggttttttctctccctacctcctctggcacgagcggcagtggcagtgactattctgtggttctagcttttgcaggtggccccagctcctggactcccacctgctcccttggtctctcctatcctagaggtggtagcagcttcctgctgttgaatcactgtcctctatgctcatttagctctgccaaaacttttgtatctcacccccatgttaaattttttctgttgaactacactggatctgacttgatagaactattaaaaatagttttt

SEQ ID NO: 658 - DNA, 1554 bp, Homo sapiens
atttccttaaattcaggttccagctcacctgggaaatactttctgagagtcctggacctcctgtgcaagaacatgaagcatctgtggttcttccttctcctggtggcagctcccagatgggtcctgtcccagatgcagctgcaggagtcgggcccaggagtggtgaagccttcggagaccctgtctctcaagtgctccgtctctggtggctccctcagtggcctccactgggtctgggtccggcagcccccggggaagggactggagtggattggacatacgtatttcggtcggcctaacacctatagtccctccctcaggagtcgagtcaccatttcagttgacacggccgagaaccagatctccctggagctgacgtctgtgaccgctgcggacacggccgtgtatttctgtgtgggcctttttgaaggtctcggtgggcgaggcttctggggccagggagtcctggtcaccgtctccccagcatccccgaccagccccaaggtcttcccgctgagcctcgacagcaccccccaagatgggaacgtggtcgtcgcatgcctggtccagggcttcttcccccaggagccactcagtgtgacctggagcgaaagcggacagaacgtgaccgccagaaacttcccacctagccaggatgcctccggggacctgtacaccacgagcagccagctgaccctgccggccacacagtgcccagacggcaagtccgtgacatgccacgtgaagcactacacgaatcccagccaggatgtgactgtgccctgcccagttcccccacctcccccatgctgccacccccgactgtcgctgcaccgaccggccctcgaggacctgctcttaggttcagaagcgaacctcacgtgcacactgaccggcctgagagatgcctctggtgccaccttcacctggacgccctcaagtgggaagagcgctgttcaaggaccacctgagcgtgacctctgtggctgctacagcgtgtccagtgtcctgcctggctgtgcccagccatggaaccatggggagaccttcacctgcactgctgcccaccccgagttgaagaccccactaaccgccaacatcacaaaatccggaaacacattccggcccgaggtccacctgctgccgccgccgtcggaggagctggccctgaacgagctggtgacgctgacgtgcctggcacgcggcttcagccccaaggatgtgctggttcgctggctgcaggggtcacaggagctgccccgcgagaagtacctgacttgggcatcccggcaggagcccagccagggcaccaccaccttcgctgtgaccagcatactgcgcgtggcagccgaggactggaagaagggggacaccttctcctgcatggtgggccacgaggccctgccgctggccttcacacagaagaccatcgaccgcttggcgggtaaacccacccatgtcaatgtgtctgttgtcatggcggaggtggacggcacctgctactgagccgcccgcctgtccccacccctgaataaactccatgctcccccaagc

SEQ ID NO: 659 - DNA, 2674 bp, Homo sapiens
ggtgcatttccaggcgctgctctccgtcgcagagaaccctgagctcggcgcgccgagagtcccagcagggcaagggggcgcggcgtcctggtcctcgagcttgggagacagatgcgcatgggcgtgggggcatgcggacctaagctcgggtgaagctctcgggaagggcaagactgcggcgacgagatgcgagcagaggagccctgcgcccccggggcccccagcgccctgggagcccagcgcacgccgggccccgagctgcgcctgtccagccagctgctgcccgagctctgtaccttcgtggtgcgcgtgctgttctacctggggcctgtctacctagctggctacctggggctcagcataacctggttgctgctcggcgccctgctgtggatgtggtggcgcaggaaccgccgcgggaagcttgggcgcctggccgccgccttcggattccttgacaatgaacgcgagttcatcagccgcgagctgcggggccagcacctgccagcctggatccacttcccggacgtggagcgggtcgagtgggccaacaagatcatctctcagacctggccctacctaagcatgatcatggaaagcaagttccgggagaaacttgagcccaagatccgagagaagagcatccacctgaggacctttacctttaccaagctctactttggacagaagtgtcccagggtcaacggtgtcaaggcacacactaatacgtgcaaccgaagacgtgtgactgtggacctgcatctgctacatcggggactgtgagatcagtgtggagctgcagaagattcaggctggtgtgaacgggatccagttgcagggcaccctgcgggtcatcctggagcccctcctagtggacaagccctttgtgggagccgtgactgtgttcttccttcagaagccgcacctacagatcaactggactggcctgaccaacctgctggatgcgccgggaatcaatgatgtgtcagacagcttactggaggacctcattgccacccacctggtgctgcccaaccgtgtgactgtgcctgtgaagaaggggctggatctgaccaacctgcgcttccctctgccctgtggggtgatcagagtgcacttgctggaggcagagcagctggcccagaaggacaactttctggggctccgaggcaagtcagatccctacgccaaggtgagcatcggcctacagcatttccggagtaggaccatctacaggaacctgaaccccacctggaacgaagtgtttgagttcatggtgtacgaagtccctggacaggacctggaggtagacctgtatgatgaggataccgacagggatgacttcctgggcagcctgcagatctgccttggagatgtcatgaccaacagagtggtggatgagtggtttgtcctgaatgacacaaccagcgggcggctgcacctgcggctggagtggctttcattgcttactgaccaagaagttctgactgaggaccatggtggcctttccactgccattctcgtggtcttcttggagagtgcctgcaacttgccgagaaacccttttgactacctgaatggtgaatatcgagccaaaaaactctccaggtttgccagaaacaaggtcagcaaagacccttcttcctatgtcaaactatctgtaggcaagaagacacatacaagtaagacctgtccccacaacaaggaccctgtgtggagccaggtgttctccttctttgtgcacaatgtggccactgagcggctccatctgaaggtgcttgatgatgaccaggagtgtgctctgggaatgctggaggtccccctgtgccagatcctcccctatgctgacctcactcttgagcagcgctttcagctggaccactcaggcctggacagcctcatctccatgaggctggtgcttcggttcctgcaagggaggaacgagagctggggagcccatacacaggacctgaagccctaaagaaaggccctctgctcatcaagaaagtggctaccaaccagggtcccaaagcccaacctcaggaagaaggccctacagatttgccatgtcccccagaccctgcttctgatactaaggacgtatccaggagtaccacaaccaccaccagtgctaccaccgttgccactgagcccacatcccaagagtcaggcccagagcctaaaggcaaggacagtgccaaaaggttctgtgagcccatcggggagaagaagagtccagccaccatcttcctgactgtcccaggtccccactctccagggcccatcaagtcacccagacccatgaaatgccctgcctccccattcgcatggccgcccaagaggctggctcccagcatgtcctcgctcaactccttggcctcttcttgctttgacctggcagatatcagcctcaacattgaaggtggggacctcaggcgacggcagctgggtgagattcagctcacagtgcgctatgtgtgtctgcggcgctgcctcagcgtgctaatcaatggctgcagaaacctaacaccatgtaccagcagtggagctgatccctacgtccgtgtctacttgttgccagaaaggaagtgggcatgtcgtaagaagacttcagtgaagcggaagaccttggaacccctgtttgatgagacatttgaattttttgttcccatgg

SEQ ID NO: 660 - DNA, 2091 bp, Homo sapiens
gcacccgccgtcatgctccgggccgcgctgcccgcgctcctgctgccgttgctgggcctcgccgctgctgccgtcgcgggtaagcccttacgtagtccctcgccgggaccgtgcgcgaccgccttcgcccccttcccaacgcacgctcttcgtccccgcgcacccgagggcggcccgcagacgcaacacccggccggacatcccgcccttccctgcacgcccgtcccccgtgggtcctggctccgggtcacctctcacccgcctgccctcggggaggggaggtggccgagaataagggagggctctgtcttcctcggagtccacatcctcaccgcagaccccactccgcggggagggaacccccaaattaggccagttggccggagaactgagggacttggagtcgcacgacgggcgccgtttcagggcaatttcgggctgaaatgagaagcggggacgttggtggcgatttcccctgctggtgcgcggccggagtggggttgctgggatgggggtgggggccggaggaagtaggccctcttttgcaagcagcgctgtttgtctagttggttggtgttcaagttgtttaaacaggaaaacagttcagccaaataacccctggatggaagaggaacgggaataggcaaagcttggatttcactgaaatcaaggagttttaaagttctagtctgctgttgtgcaagtgacatctgaaaaatcacacacgtgatcattcatttacaaaacgactcgtgaggaaaatgcacaattctattgaccgtggtctttatttttaaaaaatttccatacaagcatgtcaaaaatatgtggatggggagactctggagaacacagacttccaaaaacaccactgactgaataattccaggaattaaagagcaaaataaacaagaactaaatgagtacttgtgtgggcttaaataaagtgcaagagatttaaataaaatgcaagagattccccccccccaccccttgccccagatttcactgcgtttttataataactgcctgctcgaagtctactgacaggaatatttcagtggacctcagtgttggaggcagcagcagctcagaacttggatacaaacccaaggttcctttcttgaaaacttctgtggacctgcatttatgactggttgtgacatctgctgcctatcaaaggggcagaaacaagatgtgcccatgttcacattgttcagactgggaacattaattttgtctaagacaaagctgggctgtctctgaaccctccttctgcacaccctcattttgcgagccagtaacatctcaactctcatgtaaaccaccctctgcgaggctgtgcatttgtactttaggctagtcgaattttcttgtcagatttttctttcttgtcagacttttaaagaaaatcagtttctagattttggtatgtctcttcttcagtgaagctgttttgaccagcaatagagggcaaatttccctttggaaatttttgtgcatttcctttgataagtccagtgtggatcaataggcttttcaagagctttagaaaagtgcatgatgaataaattaatgttaattaatcagctcctcccagtcaggaagctttaaggattaatttggaaatgagtgtgagctttgacctagctagttaaccaacttatctgcacttcagtaaaacagagataatacttactcatggggctattgggagcattaagtgggaactccacgtctagtccctattacaggcgtggttcatcttggtttccttccctttattctcttcatacaaaatgaagggtaattgttgcaaccagaaaacgtatgaataccaccttatgtatattggatgtttatggttactgaacacattcatatgtatgctaatgttatagggctgaaaaactaagtatgtttttcataatactttacaaatctcccatccaagcaagatcaggggtcatatttggcttagaactaagtcaagaaagagtttgttgctgaataccaagatcttaatagaaaagctcttatgatgttgcataataaatatgggtattgcatataaatgtgatgttgaaacgg

SEQ ID NO: 661 - DNA, 3130 bp, Homo sapiens
agacagatgtccctgaaggcccgagggacaccagccgctatgccaggctccaaagaacccgaggcaaaccaacgctggtcccggtctttgaggactccccggcccagtgagggagaccgacagaccatggcagccgtgaccatgtcggtgcccgggcggaaggcgccccccaggccgggcccagtgcccgaggcggcccagccgttcctgttcacgccccgcgggcccagcgcgggtggcgggcctggctcgggcacctccccgcaggtggagtggacggcccggcgtctcgtgtgggtgccttcggagcttcacgggttcgaggcggcggcgctgcgggacgaaggcgaggaggaggcggaggtggagctggcggagagcgggaggcggctgcgactgccgcgggaccagatccagcgcatgaacccgcccaagttcagcaaggccgaggacatggccgagctgacctgcctcaacgaggcctcggtcctgcacaacctccgggagcggtactactccggcctcatctacacgtactccggccttttctgtgtggtcatcaacccgtacaagcagcttcccatctacacagaagccattgtggagatgtaccggggcaagaagcgccacgaggtgccaccccacgtgtacgcagtgaccgagggggcctatcggagcatgctgcaggatcgtgaggaccagtccattctctgcactggagagtctggagctgggaagacggaaaacaccaagaaggtcatccagtacctcgcccacgtggcgtcgtctccaaagggcaggaaggagccgggtgtccccgcctccgtcagcaccgtgtcttatggtgagctggagcggcagctgcttcaggccaaccccatcctagaggcctttggcaatgccaagacagtgaagaatgacaactcctcccgattcggcaaattcatccgcatcaactttgatgttgccgggtacatcgtgggcgccaacattgagacctacctgctggagaagtcgcgggccatccgctaggccaaggacgagtgcagcttccacatcttctaccagctgctggggggcgctggagagcagctcaaagccgacctcctcctcgagccctgctcccactaccggttcctgaccaacgggccgtcatcctctcccggccaggagcgggaactcttccaggagacgctggagtcgctgcgggtcctgggattcagccacgaggaaatcgtctccatgctgcggatggtctcagcagttctccagtttggcaacattgccttgaagagagaacggaacaccgatcaagccaccatgcctgacaacacagctgcacagaagctctgccgcctcttgggactgggggtgacggatttctcccgagccttgctcacccctcgcatcaaagttggccgagactatgtgcagaaagcccagactaaggaacaggctgacttcgcgctggaggccctggccaaggccacctacgagcgcctcttccgctggctggttctgcgcctcaaccgggccttggaccgcagcccccgccaaggcgcctccttcctgggcatcctggacatcgcgggctttgagatcttccagctgaactccttcgagcagctctgcatcaactacgccaacgagaagctgcagcagctcttcaaccacaccatgttcgtgctggagcaggaggagtaccagcgtgagggcatcccctggaccttcctcgactttggcctcgacctgcagccctgcatcgacctcatcgagcggccggccaacccccctggactcctggccctgctggatgaggagtgctggttcccgaaggccacagacaagtcgtttgtggagaaggtagcccaggagcagggcggccaccccaagttccagcggccgaggcacctgcgggatcaggccgacttcagtgttctccactacgcgggcaaggtcgactacaaggccaacgagtggctgatgaaaaacatggaccctctgaatgacaacgttgcagccttgctccaccagagcacagaccggctgacggcagagatctggaaagacgtggagggcatcgtggggctggaacaggtgagcagcctgggcgacggcccaccaggtggccgcccccgtcggggtatgttccggacagtgggacagctctacaaggagtccctgagccgcctcatggccacactcagcaacaccaaccccagttttgtccggtgcattgtccccaaccacgagaagagggccgggaagctggagccacggctggtgctggaccagcttcgctgcaacggggtcctggagggcatccgcatctgtcgccagggcttccccaaccgcatcctcttccaggagttccggcagcgatacgagatcctgacacccaatgccatccccaagggcttcatggatgggaagcaggcctgtgaaaagatgatccaggcgctggaactggaccccaacctctaccgcgtgggacagagcaagatcttcttccgggctggggtcctggcccagctggaagaggagcgagacctgaaggtcaccgacatcatcgtctccttccaggcagctgcccggggatacctggctcgcagggccttccagaagcgccagcagcagcagagcgccctgagggtgatgcagcggaactgcgcggcctacctcaagctgagacactggcagtggtggcggctgtttaccaaggtgaagccactgctgcaggtgacgcggcaggatgaggtgctgcaggcacgggcccaggagctgcagaaagtgcaggagctacagcagcagagcgcccgcgaagttggggagctccagggccgagtggcacagctggaagaggagcgcgcccgcctggcagagcaattgcgagcagaggcagaactgtgtgcagaggccgaggagacgcgggggaggctggcagcccgcaagcaggagctggagctggtggtgtcagagctggaggctcgcgtgggcgaggaggaggagtgcagccgtcaaatgcaaaccgagaagaagaggctgcagcagcacatacaggagctagaggcccaccttgaggctgaggagggtgcgcggcagaagctgcagctggagaaggtgacgacag

SEQ ID NO: 662 - DNA, 1717 bp, Homo sapiens
atatgggaagtgactgtgaatcacataaacatagcccactaaacccaaacatcactcaacttccctttagctgggtcccaaaaatgcccatggatacttcattccttccatatgtgaaggtgactgaggtggaggggaaggaatttggcatagaaaatgacaaggatctcagacgacttccattaaaatatcttcctttagaaatgtataagaatgggccaggcacagtggctcacacctgtaatcccaacactttgggaggccgaggcaggtggatcacgaggtcaggagagcaagaccatcctggctaacacagtaaaaccccctctgtattaaaaatacaaaagattagccgggcatggaggtgggtgcctgtagtcccagctactcgggagactgaggcaggagaatcgcttgaacccaggaggcagagcttgcagtgagccgagattgctccgctgaatgcactccagcctgggagacagagcaagactccatctcaaaaacaagaaaaaaaaagaaagaaagaaaagtataagaacatggtatcaggggatcacaattctggggaaggggccagtgcaagttaggagttaggggttctgatgcctcgtgaacctaaaataaatctgttggtttgtcccataagcgcacactgtcatatcatgggccctagatgaaggttgactgaagcaatgtgaaagcgagggaaaggaaggagaggatgagcaggaacaagggcactgctgcctgtaaagaagcagctgcctgacactgttggtagttggtgaggtatcatcagtaccccagcctgacctcagcctgaggaatttgctctgcttgtctgttggggctttggacctcctggatgagctgcctgtgttcctccctcctcttcacccctagctgttctagctacacaaagggctatattctcatcaccatggcaggaagtttgccagtcaccaagcctccctgtgtgcctctttgatttgcaacatttaaagggcatgaagagacgcattcagaggcaggcttttaaacccgaagttaccctagtgtgagtcccaactgcaacatccttgctggcagtaactgctgagcacagctggacggatgtagcatttgccctataaaacatttgatactttgccaataaactgtaaagagggaaaaaaaggcccctgttttctttgcagttacagggcagctttggaatgtgctaaccaaagcaaaatgtgacccttgctccatcagagtatactctcccagccctgctgatgaataagagtatagttaggcctctcactcaaaccctcacttggcagagccactgggatttcagagcctgtccccagatcattcccttccctactgctcttgggtggctaagggtgtcctcaggagccactgaagccatctggcatgggtaccacagtcactctccactccacctctttgtggtcttgtcaactggtgtagctactgtggcaaaagaatggtgacctgcacctccactgtcattactgtacctctttagagctgtccctttgcttgtacccatgcttctctgttctccatacaacaagggtcttgaggctgggtgcaatggctcatgcctgtaatcccagctctttgggagggggatgtggtaggcttaattgaggccgggagttcgatattagcctgggcaacatggagagaccctgtctctacc

SEQ ID NO: 663 - DNA, 1609 bp, Homo sapiens
agctctgggagaggagcccctgccctgaggttcccaggtgttcccactcagtgatcagcactgaacacagactcctcaccatggagttgagcctgagttggtttttccttttgactataatacaaggggtccagtgtgaacagcagctagtccagtctgcgggaggcctggttcagcctggcgggtccctccgactgtcctgttcagcctctggattcaccttcgaaaatcatgccatgcactgggtccgccaagttcccgggaagagactggagtgggtctccggtatcgattggaatggcggtgacgctgggtacgcggactctgtgaagggccgattcacaatctccagagacaactccaagaagtccctctatctgcaaatgagcagtctgagacctgacgactcggccttctacttttgtgctagagatacggtcagtggttggatggactggtccttcgatctctggggccgtggtacccttgtctctgtctcctcagcatccccgaccagccccaaggtcttcccgctgagcctctgcagcacccagccagatgggaacgtggtcatcgcctgcctggtccagggcttcttcccccaggagccactcagtgtgacctggagcgaaagcggacagggcgtgaccgccagaaacttcccacccagccaggatgcctccggggacctgtacaccacgagcagccagctgaccctgccggccacacagtgcctagccggcaagtccgtgacatgccacgtgaagcactacacgaatcccagccaggatgtgactgtgccctgcccagttccctcaactccacctaccccatctccctcaactccacctaccccatctccctcatgctgccacccccgactgtcactgcaccgaccggccctcgaggacctgctcttaggttcagaagcgaacctcacgtgcacactgaccggcctgagagatgcctcaggtgtcaccttcacctggacgccctcaagtgggaagagcgctgttcaaggaccacctgaccgtgacctctgtggctgctacagcgtgtccagtgtcctgccgggctgtgccgagccatggaaccatgggaagaccttcacttgcactgctgcctaccccgagtccaagaccccgctaaccgccaccctctcaaaatccggaaacacattccggcccgaggtccacctgctgccgccgccgtcggaggagctggccctgaacgagctggtgacgctgacgtgcctggcacgtggcttcagccccaaggatgtgctggttcgctggctgcaggggtcacaggagctgccccgcgagaagtacctgacttgggcatcccggcaggagcccagccagggcaccaccaccttcgctgtgaccagcatactgcgcgtggcagccgaggactggaagaagggggacaccttctcctgcatggtgggccacgaggccctgccgctggccttcacacagaagaccatcgaccgcttggcgggtaaacccacccatgtcaatgtgtctgttgtcatggcggaggtggacggcacctgctactgagccgcccgcctgtccccacccctgaataaactccatgctccccc

SEQ ID NO: 664 - DNA, 1576 bp, Homo sapiens
aggagggcggagcggccgggacgccaggagggaactagcctaagtggggacggtccccgtgcaggagacaaagagcgtccctggagcgatcagggctcaggagcccgacccggagcccggggcgtccgcgctgacttcgggtccccggagcctggggcacggcagggagaagacgacggcggagaaggcgacagcggagaaggaaggcaggctgcaggggcgccgtcggcgcggcgggccgggatgcggacgccggtggtgatgacgctgggcatggtgttggcgccctgcgggctcctgctcaacctgaccggcaccccggtcacggtgcaggtcagctacagcctggtcctgggctacctgggcagctgcctcctgctgctgggcggcttctcgctggcgctcagcttcgcgccctggtgcgacgagcgttgtcgccgccgccgcaagggaccctccgccgggcctcgccgcagcagcgtcagcaccatccaagtggagtggcccgagcccgacctggcgcccgccatcaagtactacagcgacggccagcaccgaccgccgcctgcccagcaccgcaagcccaagcccaagcccaaggtcggcttccccatgccgcggccgcggcccaaggcctacaccaactcggtggacgtcctcgacggggaggggtgggagtcccaggacgctccctcgtgcagcacccacccctgcgacagctcgctgccctgcgactccgacctctagacgcttgtagagcctggggggcgccgggtggcaaaggactcacccccgcacaggcccgcctggcttcgagttggaacccggacacttgcccctcactggtgtggatggaaatctgcctttcgtgggaccaaacaggactccttggacgattagttcaggttgggtttggttttcttcttaaagagtttagttttcctctccagagggatcagggtcctcttagggagtgacgggcttttcatatatttttgctgaagaatatatggaaagggtggcatttgcgtcacgtggaccagggacagtgctgaaatcagcagtgctcagaaacaatttaacatgttgaaacgacaatattctaaaatactgatgaatcttgcatcaatataattattgggttttttttctttttcctgctgtataactccttgccatgcaaactctcaagaggccaatatattcctggccatgtttgaatgagcctcttaaaataaacttagagccatgcaaatgccagcagcttaatggatttcatggaatgaaataccgtgattaactcatagctacatatcattgcataaatgggatttatcttttttctcacttatttttgcggtgaaagtcgagggcatgcaagagtttctcttccagaagccaagaggagaacaaaggtcctaatgctgtactattccaccctttggacgcctcatccaggacgcagaggactctaggtttaacattttgtacaaaatggaacctgttaatcatattaaagcacatatgtatatatcttttatttataaataaaattttaaaacaatagtttcagtat

SEQ ID NO: 665 - DNA, 1662 bp, Homo sapiens
agtcatggctctaaatatgtacctgcaatcggatgttgaggatcaccgagcccgcgacgtagaagtacgggaagttcatgcgcagctgccaggccagctcgaagaaggcgagcagggtgcgggagagccccttgcagaagacgccgtacgaggttctccagcatttggctcaaggccccaagggcacatgtgacaagaaggcgccggctttttaaacattggaagttcttctgtgtcagttctgtgacagaacatttacttaacacatcatgaaggctagtttggatgtggaggggaatagactccatctatccatatgagagttggagtctcactctgttatccaggctggagttcagtggtaggatcatggcttactgcagtctggaactcctgggctcaaaccatcctcccacctcagccttctgctgcagaagaatattttgcctgctggaacctgctgtatctactcaagagtggaagttttcacagaagatgcagcacactgtcaaaatatccggagacgccagcaccaaagcccacagaggagttaaaagtgtgatcactttcttcctactctatgccattttctctctgtcttttttcatatcagtttggacctctgaaaggttggaggaaaatctaattattctttcccaggtgatgggaatggcttatccttcatgtcactcatgtgttctgattcttggaaacaagaagctgagacaggcctctctgtcagtgctactgtggctgaggtacatgttcaaagatggggagccctcaggtcacaaagaatttagagaatcatcttgaatatattagaaaaaaaatagctcctaagaaattcttgtatgttatataaatttatacttccttaagattctttcattgtgtataactttgtgaattttacaaagatatgcttggaatcaacaccatccaaacatatcacaaattaggatatatgaaagtatgtatattaccatacagagaagaatgcgaatactataaagagttcttatacaaacagataatatagattttgtatcaatcattcaccttttttgagatttttaaatgagaaaacctataatgtataaaatacatgtgtgtatgtatgtatgtgacacagttactaaaaataggcttcttaaacttacatctcaatctggtagataaagtacataaaagaatatggaattttagtacctatattaagtgtttttaatttttgtataatatttagtacctgattagcgtgtatgcaaaaaagtaatttgcttcgtttgttgaattagaagccagctgccttactaaactaccacatttgctttgctcattctcttggctttgcagatagaaaattatatcatctgcatatagtgacttataatgattattttacttctccattttactacttgtaattcttttttggtatcagttgtataatgaaatggtttgaacattcaaagtgttaagtaatcctgatcgtaactgctgtctttgcaaatggagtgttttctagtgttttaacaataaacgtaatactgactctagctttgagataaattcttttaaaaatattcttcagggagaatatttgtttcctatcttcctgtgtatagtattgtaataaaatctctgttaaaaactatc

SEQ ID NO: 666 - DNA, 1745 bp, Homo sapiens
aagaaggcagacgtgaagggcccggctgtgggcagagcacagacagccctggtccccagccctgcctgacgcccctctgcaggccaggacctgatccccgccaccgaatccacagctgcgtggagaaggcgctgagcctgggcgtctgcagtgggagatagctgggctgggaccatccagagctccggaccccgaggggatgggacatgagccctgtgggccctgcgatgggccgtctgtcaccctgcagcatggatcctgtccactgggtctgcacccaagcactgggacaccagccatggccatacggggtacagcacgtgggacctgctggatgtccccctcacagccctttccctctcccccaggactgactccagcacccgaggcccttcccccaacctggcccaaagctcccctttctctgagacttagatttccttttgtttttggaaacccagttgggtcccacctggcgtctccctggcacagctggggagactgagaccaggagggaatggacctgcctgagggcacagaggaggcagcagctcgcaaaacaaggggcgattttgtttcagttttgacctttccagttctggggttcagaatttcctccagttagggaaggtgtctggtcgcctccaaggaggaggggaggccccaggctcttcgactcccacaggaagattgcctgtccccctccccaacccgtccactgacctctccccagaaggcagagaaaccccggttccagtagggctgtggctgccttcggttgcctgttccctgtgcaagtgccctgccctctcagagtagcagaggaaccttctggaagccatagaagcctggcctctgcacagggaaaagccaggttttcccttgtgggatcctgtggagaatgagctcagacggattcctcatattctaatccgacaccactggagaccttgactcctccttccagaacgggaacccccttgtccagcgtcacggataccgggccccacagtctccctgcatctgcattgaccctccacggagctcacagcagggagggtctgcgtggtccacctctaccccacgcacaggcaaacctgagaaggaacgtttaatcaccattcacagcccttgcttctttctagagaaataaaacaaacttacaccagaatatgaaaacaacgtgaaacacacaaaagttaagtgtgagcccgtgcactgtgacaggtgtcagcagcgtgagtctcgccagcgtcaggagctggaacgtcttcatcatccccgagtcctctggtcctccctgcccttccgcagcgggagggtccactcttgtgggttcccagtcctccctgaacttccccagagggagggtccactcttgtgggttcctggtcctccctgaacttccccagcaggagggtccactctcgtgggttcccggtcctccccgcccttccccagcgggagggtccactcttgtgggttatgtgattctagcttcccgctttctgtccggagcctgcagaggaatgggaccacgagctacacgtgggttggacctgcctgttttgagagagggccctgtccctgagggttcatatcccttgaacatggttgagagttttgttccttttcattgctgacttgaagccatgtcatgaagagccacagcttggccgtttttctgatgatgcccatgtgggtggattttagttcttactactatgaataaagctgctgttagc

SEQ ID NO: 667 - DNA, 1677 bp, Homo sapiens
agtttctctgttatgttccattgctttatttggctctcccttcatcaataccagattttcctaattatcgtagctttacattgttctggtatccagtggagcaaatcatcctacttgaagagtcagactccatgccaaattcctatgtgtcatttttcaggcccaaccataggcagttacaaaggccgtacacctcatgaaggaaagctaccctccccatgccagacttggggcacagccaatgcattgcagtctctgaagaaagttgcagtcaaggacccagacccccggcccagccatgctcttaggcatatctgcattcctagtccaagcacctctgtttagaggtctctttattggtggcctcctctaaacaattctgagaccattttactgggatcaggaaccttgatgccacttgtcttcactttcagtatttagtacttttccactcctagcacttttccctctttcccctcccagcccttaggcccataaaatggctggagccttttatttaggtttctcatagtagcgagatgatccccatatctttgctgattgttttgacacttgtttgactctgttccatgggtaagaatgtaacactgcaggagccagcagtttttcctgctgagcctcttgctaatgctactgctgatctaaggcttgactgataccttatcattttggcatgttttaactgaccaccacgacacctggcagctcagttctttctgcatcagcttagttcttaacaccaccttcttctcctacttcataagtgtcttggctgttcctggttctttgcatttacatataaattttaggatcagctgtcaaatttgacccactcccttctaaaaaattattgggattttgattgagagtgtattgaatctatagattattggggagaatcaacattcttacatgaattttctaattcatgaacatggtatagcattccatttctttagggtcttaatttttcccaataatattttatggttttctgtgtcggtcttgatcatctttattagatttatttctagacatctgacatttcttccatgtaattgttagtagtgtcatttttaaaaatttactttctgtttacagagacttagcattgatttttatatattgactttgtagccagcattctaataacatatagatattttaggtctttacatataccattcgcaaatgatgacagttgtatttcttcctttcaaatctttatactttttttccctcttattacattagtatgacatctactaccatgataaaaagaagtggtaatagctggcatctttgtctggaaggcctgctgtgaccttaactgtaggttcctttctccagtgactcatcttgagattacccttctctcatacctccaacatttttgagacttggatattccaagcctgtgctaaccattcacttctttggctacactcagcagaagagaaatagaaagctgccaacctcttagactcaaacgaaatcattttcccatttgttaccctcagaaattggctctttccatccacaggttccacatccatggattcaaccaactgtgtattgtcagtattcaaaaaaataataaagtaaaaataaacaaacaaataaataaataaaagttatcttgatcctgatcttcag

SEQ ID NO: 668 - DNA, 1790 bp, Homo sapiens
agcagtcaccccaccaccaggtcccagagcccagggctgtgtgttccactgggagcctttgagagggccaacgcaccatggagactggacagagaacatctcgaaaagtccggaagctgggctccaaccggcggcggcagacaagagagccagctgatggtgaaggcgctgcagtggccccagagccagagtcttggtcctctcaggcagcggcagaactgcaggccttcttccaggactgtggtgccaaggagaggggctttgtcacccgcgaggacctggcggtggccaagttcagcttcctgggcagcaaggaagagtcagagatgatcttcgactgggtggatgtggagcggaagggacacctgtcccttgaagaattcagctctggactcaaaaacatctttggctccagccagagcccccacaggctccgcagaaggaagccactgccctctaagcgggtatctgctaccaccagcttcccagctctggaggaggcggatgctgaggagaaggaggcgttccttgccttcatggagcagctggggagtgcagtgccgccttgggtcacaacatcctggagcctgtagtaaacctggccaggtcactcaggatgcaagaagaaggcctgaaggactcgctggtgaaggtggcccccaagaggccgcccaagagattcggctgttgctcctgatcacctgtcctgtcctgggtaggatggacacccatggggtttcctgtccctcagctcctgtcctttgttcctggacagcaacgacacagaggaccagcttggaggttcaggaaaacccttctcaactcaggactcggatcccagagcagggccgcatcacctctgcctttcacactccaaaggagggctttgctgagtgaacaaggcttgaggggcaggggtatggcaaaactctccaaacaaagaaagtctagaaaaacgacttaaggaaaatacaccaaaatattggccgcacatctgtgggtgtaaaattttagggagaatgtggggggggtggggtgttactttccattttacacatatttgtattttcagattttcaacaataacagtattcaatacataatcagaaaaaagagatgtggaggaggaggagagaaacttcccaaggagctcccttgggtgctgctggctcctaattagtgtaacctgttaatcacatgttgctcggtgttagagcggtccctctgtgctctgcctggcagggcgctgttggcctggtctccctcgctatttctatttgcaagcatgggctttcttcccagcagaatctggttcctgggaagagtaatgttccaaaggcctctgatatgcctcgatgccctcctgtcttccagagccccaacctcactccctttccccaccatacaaaacacacctcccaggggtcacatttgggggtcccgccccctgctccaatgccatggtgtccccaagcacagggctttggcctgagttgtcagtctctggatgcatttgaggggcagctagggtgtggctggggggtccaagcagctggggagccgagactcagaatcattcacacacttctatttggagcttttgtggaagtttccagaattccataatattcacctcctgaatggtggctgccccttatcagccagggctggggtttccagtgccctcggagagcttgctttagagtcttggagagacggccatggtctgcgtttgtatgtctgtcacatcttaccatcatcacaaattgaatatacaacatgtgccaggc

SEQ ID NO: 669 - DNA, 1842 bp, Homo sapiens
gaaccagctagatgatacatgcaagacaccttggtctcaagagaactgtaacctcatctgaggctcttttatactcctctgatcaggtagccaacactagcttgcataccagggctcaaaaccagaaacaagctggtatagtcaagctggggcagtggcatgcacctgtaatcccagctacttgggaggctgaagtgggaggatcacttgagcccagaagttcaaagccaatgagatttcatctccaaaaagaaagaaagaagcaagaaacaggctgctccctggtctgtctcccaccccagcacaggactctattaatcactggctagtacatttcatttaggtttggccaaggaacagcaccaaggcttcaggcctccccagagataaatgagtacagagttgcagcagaccagcagacattgatcctgtctgacacaacgaagtttggtggtcaatcatgccagtctagaggctgtttctgggggaggagaagtaatttccaaggccctttccaggtctaatattctttgactacagtgctaagagtgccattgaggcaactgtgccatggagctaggatttaaacccaagtctgtgtgactccagtgtctgtcctctttcctccataccatcctgcctccaaagagagaaacaatagcaagacaacgaagggaccataggtttaggtgtggaagaaaagcacctttgccagggatagtaatttacttacctgaggtttatccacagttctagtctaatagaggagaatgctggccagtggaaggaaagtatgtggctgaagaacaaatgctctgtccgtcctttagtaggaagcagtgagaaaatatttaaggaactaaaatgcaaaaaaaaatcgcgcagtcagagactttaccagtaaatgctctaaggtcttgagtcaacaggatttaatcaggacccaaaaggagtaatgaaacctacagagtctcacaccagaagtattttattctagtttttttgtttctgttgtttttgagacagtgtctcactctgtcgcccaggctggagtgcagtggcgcgatcctagctcactgcagcctcaggcttccaggctgaagcgatcctcccatctcgacctcccaaagtgctgggattataggcatgaaccaccacatccggcctttattctagtttgttaagattggttaatagttaaggtgctagtgtcttatttctgttatagtaacagtttctatctttctggtagcttttaggatcttttctcctaagtgtagacctctctacattcattgggctgggtattcaatgggcattttcagtctgagctcttgggtctcccatcaagcctgggaaattaccttctattatttatttgataacttcctactgtctgttactctctttttactcttttggtattcccactattcaggtgagtaattaattgatcacttatttttttttcatatattcttttcctactttctaagggtctcgctctgtcatccaggctggagtgcaatggcacaatcacagctcactgcagccaccgcctcctggactcaagtgatcctcccacctagcctcccaagttttgggactgcagacgtgtgctaccatgcacagctgattttatattttattttgtgtagagatgggggtctcaccttgttgcccgggctggtctcgaactcccgggctcaagtgatctgccggcctcagcctcccaaggtgctgggatgacaggtgtgagccaccgcacccagctgtcctctcctttatattccggctctccaatctagtttaaaatttcagcaattataatttcccacagct

SEQ ID NO: 670 - DNA, 2068 bp, Homo sapiens
gtggaagcgccgggccctgctgcgggggggagagccactgacgccgggaccgggaccgccgccgccgccgccaccatgctccatgcctgaccgtgactcgcatctcgccaggccagtgcatttcctcttctggctgtcatcggaattttcaagtgtcaagaccccactttgttcctgttgtcctggttccggctttgggaagcatgacctttcaggcctgctcagagacaccgcagtgcactttgtgcgttatcagccttacagagactctacggtcaggagtttttgtggcaatggaactgctggggtttcatctgcaaatgaaaaccatctggccagctgcttgggtcagatggaaaccagatgggagaagtcaggagcgggcagcgagcagcctggggcagcgtccctagtcacgtcatgtttccacttcctcttgccccctcgcctcccctgcctgcaaaacgattgttattaacccatcacctcctccaatgcccaggcagttccaggatacagggttctctcgcccaggccttggccagcccagaagatgtgacccagaacctagaaagagtgatcagcagctggactgtgccttggacctaatgaggcgcctgcctccccagcaaatcgagaaaaacctcagcgacctgatcgacctggtccccagtctatgtgaggatctcctgtcttctgttgaccagccactgaaaattgccagagacaaggtggtgggaaaggattaccttttgtgtgactacaacagagatggggactcctataggtcaccatggagtaacaagtatgaccctcccttggaggatggggccatgccgtcagctcggctgagaaagctggaggtggaagccaacaatgcctttgaccagtatcgagacctgtattttgaaggtggcgtctcatctgtctacctctgggatctggatcatggctttgctggagtgatcctcataaagaaggctggagatggatcaaagaagatcaaaggctgctgggattccatccacgtggtagaagtgcaggagaaatccagcggtcgcaccgcccattacaagttgacctccacggtgatgctgtggctgcagaccaacaaatctggctctggcaccatgaacctcggaggcagccttaccagacagatggagaaggatgaaactgtgagtgactgctccccacacatagccaacatcgggcgcctggtagaggtctgtgcagacttttgcagacaaatcaaaacaagaagctctgaagaatgacctggtggaggctttgaagagaaagcagcaatgctaaacctctgtttcatgctaaccagacacgccgtgcactcgttagattcctttcttagaaaactcgttttctgctcccttccctcgtcccttccctccccgacaggtcacataacagctgcatcattgaccgcacagcgccatctctccctgagaataaagccgatagccaccctcctccggctccgagcctgcttctgccacacctcgctctcagttctctccacatttccatagagaccgtgtggtttttgttcacccgggccccccgtcttcctccctgtccccccatttataggcataaaatccactgtctgccagcctcccttccctcccacctttttggtacattggtgtaaaaaatgtaaaacaaaaaaattttatgaactaactgtggtgtgtgaaagagagaagaaaaactggaaatcttattccgtgtgtgtttgggagttgcttggggtcgggggtcgtggggacaggggacagctctgggagcagaggtggccctcggtgccgtcctgcgcagactctcccgtcccacggaggccgcggggtgggggctggggggggtgccgccgaccgttccgctcttccggccaggtgcttttctgtcaatttctatggaatgcaaaaggaggtttttgttttattttgtttttttgtaaagcttaagaaaaaaatctacatcttatacttgagcctctatacttaaaaaaagaaaagaaaagaaatcaataaaaagaaactggggcgcagtt

SEQ ID NO: 671 - DNA, 3239 bp, Homo sapiens
gtctcttagcaactaagcccccggctcctccagaagcccctcttcgcacatgcgcaaactgcggacggggaactgggctccctagccctggcgtttttggtgttgctgtcccagccagaatcgcgtctggccggtgggaagccgggaactccagccccctgtaggagaggagaaaggagcgagatcatgatacatggtgatggcttgcagagtcgtaaacaaaagaagacacatgggacttcaacaactttcatcattcgcggaaacaggaagaactttcctaggcccactaaaatcatccaaatttattatagatgaagaatgtcatgaaagtgtattaatcagttcaacagtaaggcttcttgaaagtttggatttaaccagtgcagtgggacaacttctcaatgaagcagttcaagcacaaaacaacacatatagaactggaatcagtactcttttgtttcttgttggtgcttggagcagtgcggttgaagaatgtcttcatcttggtgtccccatttccataatagtatcagtaatgtcagaaggcttaaacttttgtagtgaagaggtagtttctcttcatgtacctgttcacaatatatttgactgtatggacagcacaaaaacattttctcaacttgaaacatttagtgtaagtttgtgtccttttctacaggtcccttcagatactgatttgatagaggaattgcatggtctcaaagatgttgcctctcaaacactgaccatttccaacctttctgggagacctcttaaatcatatgaattatttaaacctcagacaaaggttgaagcagataacaacacatcacgaactctgaaaaacagcctgcttgcagatacctgctgcagacagtcaatactaatccacagtaggcattttaataggacagataatactgaaggggtaagcaaaccagatggatttcaagaacatgttacagctactcacaaaacttacagatgtaatgatttggtagagttggcagtaggcttgagtcatggagatcacagcagcatgaagttagtagaagaagcagtacagctgcaatatcagaatgcttgtgtgcaacaaggcaactgtacaaaaccatttatgtttgacatttcaagaattttcacttgctgtctaccaggcttacctgaaacttcttcttgtgtttgtccaggatatatcactgttgtgtcagtatctaataatcctgtgatcaaggaattgcagaatcagcctgtgcgaatagttctcattgagggtgacctcacagagaattaccgccacctgggatttaataagtctgcaaatattaaaacagtattagatagcatgcagcttcaagaagacagctcagaagaactgtgggcaaatcacgtgttacaggtgttaatccagttcaaggtgaaccttgtcctggtacaaggaaatgtgtccgaacgcttaattgaaaaatgtataaacagtaagcggttggtaatcggctcagtgaatggcagtgtgatgcaggcttttgcagaggctgcaggagcagtacaggtggcctacattacacaagtgaatgaagattgtgtgggtgacggggtctgcgtgaccttctggagaagcagccctttggatgttgtagataggaacaacagaatcgcaatcttattaaaaacagaaggaattaatttggttacggccgtgctcactaacccagttactgcacagatgcaaatcaaagaagataggttctggacatgtgcctatcgtttgtattatgctctaaaagaggaaaaggtcttccttggaggtggtgcagttgaatttttgtgtcttagctgtcttcatattcttgcagagcaatctctaaaaaaagaaaaccatgcctgctcagggtggctgcataatacttcctcttggctggcttcatctttggcaatatacagaccaactgtgcttaaattcctggcaaatggatggcagaaatacctttcaactctcctatataacactgccaattactcatcagaatttgaagccagcacatacattcaacatcatctgcaaaatgccacagactctggctctccttcatcttacatcttgaatgaatatagtaaactaaatagtagaatttttaattcagacatttcaaataaactggagcagattccgagagtttatgacgttgttacaccaaagattgaggcgtggcgccgagcattggatttagtattgttagtacttcagacagacagtgaaataattactggacatggacacacacagataaattcacaggaattaacgggctttctatttttgtagtgttactggctaagtctttggaaaataatttttcataatatgtcatgctaataataaatatattgatagccaagtcatggtgcctaaaatgccagctattgccaagaagaaaatagttgatgtctgtcaataactgtgcatggtctgagattttaccctacttataagctaacaagttagcctgttactgtttcgtgggatgctacagaatgcataagacacctgggtcagaaacaaaggacttatcactcacagcaaaagctgtagccagagcttcatgttggttttattcagttcctcattttgctagttcccacaggaggaacacaaagggcccatgatgaaagcctgcacacagtgggttatgttgtaagcttgggttattaactgcttttatagtaagcaaaaaaatcctggtctttgtccaaagggagttattaccccatacttgaagatagcttagtgtaaacacaagcctaggacatggactaggtaaagacaaagtccttgcattcttgacatacccagtaagtatgcagggacactcagagcccatagtggatagtctcttccaacagtctgctcctcagcctgagatgttcttggccaaacttgaattttcacatgagtatgccactctatcagctactctgattaacctgacagtcgggttgtttagtcagtaccaaatttgttcatttggtctcatatagcaattaatgcaggctattatcagacacagcagcaggatgaagccaacctgcagtattaacctcagtcctgtcccccaaggtcttgactcaatcaactgtaagttccaagggaggaccaataggtctttttattaggcagccagaatgtagtgaaggacaatttattatactttatgacccaataaagggagctttgactg

SEQ ID NO: 672 - DNA, 3727 bp, Homo sapiens
attttactttacatacattttccaacacggagcggcttgcacacatgcagctcttaggcccgggccgcacgtctcagaagccccgtgtgcgactttgaccgccgcacgatcctctgccgggggaggtgggcccgctgcgctttgggagcacccgcgcccgacactgaggtctcggtgctgtgttcggcctcttcgtccctgcgggtcccctctgggagcagaggcggtcggaaaaccctggggctgaagtgcaggcttcgggaggacgcgacctgccaagatcagctcccggcacgtgatgggagcctggctcaccttcccccagcgcacgatgggccgcagcctccccggtcggcctggcctgctggaaaggagcagctctgtttccagaggcttctggcgaagcccacggcctcccattgttggctgatttataaggaaagaggggaaaggccaagtgtggatgccattagcataacctaatccagaccccatgacaagtccaggatcctgcagggagagggcatccttgaacgtgaaggactggctttggaaacttggcctcccggaagaaaggtctccgggcccacccacacccaccttgtggacgcccccgcagtcgaatacactccacaggaagacggaccacaaacagcagcagcctccggtgtcggcccagtgatccgggagctcagagtgtaggtacctgacggcttgactcgtccccaggacaaggcctgtgagagggaggggggcactctgagtgtgcgaatgtgtgagtgtgtgtgtctgggcacgagtgtgtatgcgtgtgtgtgtgcatgtactatattcacatgtgtgagagtgtgaatgtgtgtgtctgtgggtctgcgcacataagtgtgtgtgtgcatatactatattcacgtgtgactgtgcaaatgtgagtgtgtctgtaggtctgggcacgtgtatgcgtgtgtgtgcgagtactatattcacatgtgtgagtgtgcgaatgtgtgtgtctgtgggtctgggcacacgagtgtgtatgcgtgtgtatgcatgtactatattcacgtgtgtgagtgtgcgaatgtgtctgtgggtctgggcacatgagtgtgtgcatatactatattcacatgtgtgagtgtgcaaatgtgagtgtgtctgtaggtctgggcacatgtgtatgcatgtgtgtgcgagtactatattcacgtgtgtgtgagtgcgaatgtgagtgggtgtgggtctggtcacatgtatgtatgcatgtgtgcatgtattatagtcatgtgagtgtgcaaatgtgtgagtgtgggtctgggcacacaagtgtgtatgcatgtgtttctattgtattcatgtgagtataagtgcaaatgtgtgtgtgttctctgcacacacaagtgtataggtatgtttgtgtgtgcatgcattgtattcatgtgagtgtatgtgaatgtgtgactgtgagagtttgagtgtgcctgtgtgtctggctatactagtgcgtgcctgtgttcgtgtgcatcagtctgggtgtgcccgtgtgtgaatgtgagtgtctatgcgtgggtgtcccaatatgtgtgtgcctgtgtatccatgtctaggtgtgcccgtgggtgtgagtgtctgtgcgtgggtgtctggatacgtatgtgcctgtatgagtgtgtatccatgtctgggtgtgcccacgggtgtgagtgtgaatatgtaagtcttgcgtgtgcatgagtgtgttcacatgagtgtgagggtctgtgcataacagcctattgtgtgagtgtgtgcatgtggattgcatttatgtgagtccgtgtctgtgcacgcacgtgtccccgcacaagccagcccgagagggagtgtcccctgaacacaccctggcagcacttgcagcgtgacgaggttgagggaatgtgtcgctgaggtcgtaaatgcctctcgcacgtcccaacacgctggagcaacagcagcccgtgacgccggccgtgcagccgtgaagtccgtggagcgtccctaatcactgggggttctgctttgcggcgacagcggtgctactcacagctccagaactctgcagcttcccccctgaaacgggaacgggaaggtggcgcgggcgtccacacctcgagccacagccggcgggaggcacaggctggcaaaactgcctctcagtagtgagaagagacaaacaaaccgaacgccaggagcagaggaaacgaagacgatgtggccaagaaaaattgcatttttctttccagttttgctaaaatagccttctcattggctgcgactttggaggtggcagaaatcatacgtttaatcacggcgccctcctgcttgccaaggttagcaggggctgcactgctgtgccctcctgtccctggaggctctggtggccccaagccccacactgccaggctgggtgccaagctgccgtgaccccggaattcggcctgtggtgatcggccttccctggcacggagctgagttaggggctctagaatcagtcccagccacgtgaggctctccctgggatgtgagggtcgtctcgtctgtttacacgggggccacagtgcagatcccagcccgggcaggggaggggcaaatctatgcccacttcaagcttccacttctgcccgcctcaaagtgccggagactccggcacctctgcgttcctccttcccggtagggacagaaacctgggaaagggctggggtggcaaggaagagccccaggaagacgcgagtggctctccccactccctacaggacctccctcccccaagcccatgggccgccttctccagggacgcttccctgtcccacccaccgggcaaggtgggcccagcagggtctccttttcaccgtgcgccccctcctgtggccgggtcctgggctgatgacttcacatggtgcttttacaagtcaggtttattgcggtatcacgtacacacataaggctcaccccttttcgatgcacagccgacgacttggtaagtgtccagagtggggcacttctgccccgacagaggcagcccacattttgcccctctgcagtcaggccccttcccggcctccaaccaccacctgtctctcctcggtcctacagctttgcgtcctccagaattgtcctgtgagtgactcccacaggatggagacttttgtgtctggcttccttcacttcgcagcaggcttcgcgggacccgtgtggtggcaccagcgtcccgcccttggtgctgctgagctgtaggttgtgggacaggtggaggtacacagttgctcacgggttcacctgtggatgggcatgtgggctgttgtgagtgaagccactttagacatttgcgtgcaggtttggtggggacgtgcagtttcatttcttttgagagtgggattgctggagcccatgttaagggtacgttcaactcatcagctcaactgtcttccaaatggcagccccgttttccacccccgccagcaacgcccgcgactccaggcgcgcggcattttcatcagcacctggcagtggtgattcataatgctttcaatgttaatttccctcatgactagtgatgttaaacatcttaggtattatttcatgggttatttccaatcttttacctactttttagtggattatatttgtcttcttagtattgagttataagagttaaatattgtgggtacaagtcccctgtcagaaatgtgttttgtaaataatttcttct

SEQ ID NO: 673 - DNA, 2592 bp, Homo sapiens
ttaaagcataaccacaaactgcaaaaagctaggtaagctattttgttgcagctcataaggtggtgaaaaggactctcctgtgtttcttactcataggcaaggacaacatgtgctttttggtgagctgctcataattcctgaaatgtgtggtgccagggcaagggggccatcactgcagtcaggccctcagaggagtcctgcaggcttcctaccagtggtctccaagggtgcaggagtaactggggctgggccagcctccccccttacaaggctgctttccaggaagggaggtctggtgtatctcatgggagaatctggggtgtctgtagtgtcacccctccagcagcgccacaaggactgaggttgggtaggtgtgaggttccagaggacagcaggacactctcgcatactttgccaaatgaggcctgctcagaggagtaggagctgaaagatggtgccttccaccctcttgggctgtgtgcccatcagagcaggctcagcctgcaaaggccctgcattcagaggtcttgtaatctacttgttgcaggagaaagaaggtaaaaaatgatttttttaagaaaagctattttattgcagctctttcccaagagctgttctgggaatggctggtcttcatattcccagtggagaggggaacaagtggggctgggcatatacctattccggcttctagtgggatggagttggggtatagaaattaaccaggaagatgtttccaccaagcctgctgtgagtcaattgagggagtgtttggggtcccaggagacttggacggggggagtttgggtagactaggaaaggaaagtgccatatcagggtaccggtaccggcaagctcacatctcagccaggggccatgccccacttcccctgaccccagctgtcttgtctccactctgtgaaacccacaggggatgtgataaacagggctattaggggtatcagccacgtcgagcccccagactctgtgcacttcagaccagcagcagcaggagggctcccgagggccttatgagaaaacctgtgtggacatcccttggtgtacactaagacagagcagagcccagcgctcccaagccttcctccttccagcttctacctccatgctagcattgctggtgttagagaggaattaacttcctggtctgtgcccttctctagaagaatataagatgctcctcctcctcaccccttctcagcctcctcccaagtcttcctcttctgcaccacccccgagtccaaacccacctcttgccccagcattcaggctggaaaacactgatgtggactcagtatgacaactgagatgggggaagccagacatgtgaggacgctgtcctccgagaggtgtccccggctgttagccagctgtgctgtggtgctgtgggtctgtcataccctcccttgcttctgttcacactgggaggcccactcctggctcacctctccctctcagggacccacgtgggagcctggatccctggactgtcctgggcataggtttcagggacctcctttgttgtcatcagaacccagaggaattcttctcctaaaaaatacgtatggcataccaatctgtgcggggcagtgtcctaagcacttagactacatcagggaagaacacagaccacatccctgtcctcatgcggcttatgttttctggaggaaggtggagacacaagtccttggctttagggctcccccggctgggggctgtgcagtccggtcagggcgggaggggaaatgcaccgctgcatgtgaaccttaccagcccaggcggatgccccttccccttagcactaccctggcctcctgcatcccctcgcctcatgttcctcccaccttcaaagaatgaagagccccatgggcccagcccctgccctgggaaccaggcagccttccagacctcaggggctgaggcagactattagggcagggctgactttggtgacactgcccattccctctcaggccagctcaggtcacccgggcctctgacccaggcctgtcactttgagaggggcaaaactgagaggggcttttcctagagaaagagaacaaggagcttgccaggcttcatgtagccgacacacgtctcaggattttaagtccacattggcctcacactaccagggccaatgcccaaaataaggagttccaatttggggccaaatgaggaaggacacagactctgccctgggatctcctgtgctagcggccaatgacaaatccagtcattggccaccagccacctctgcagtggggaccacactagcagccctgactccacactcctcctggggacccaagaggcagtgttgctgtctgcatgtccaccttggaatctggctgaactggctggcaggaccaagactgcggctggggtgggcagggaagggaagccgggggctgctgtgagggatcttggagcttccctgtagcccaccttccccttgcttcatgtttgtagaggaaccttgtgccggccaggcccagtttccttgtgtgatacactaatgtatttgctttttttggaaatagagaaaatcaataaattgctagtgtttctttg

SEQ ID NO: 674 - DNA, 3202 bp, Homo sapiens
gttaaacaagtttccttttcattgttttttgctattttacccagcccttaaaatctcaactatcattgcggttagcacatttaccagagaagcactgatcaggacaaaagaagtgcagaacttttctttatatttatttacttcaacagccattatatcagcacattatgtatagaccagtcatggcttcctgtacatctgtgtcactatggatgattgcccttcttgtgtttggagtgttggcaatctttggaatagctattggtctccttgttcattttctggcagtagcaaacaggatctacttctaccaaggtagctttaaaatgctggatatcccatataatagcaattatgaaagggagacatcaccagaaaataactatcttagccaaattcttgagactagatggttgatgcatttcaaagttctagcatttacagacaatatatcttttctcaagtcatcacactggtgtaagtaaccaacattaaccatcaaaaaagagatcaactgatcatacataccaggacacttcaaatttctctgtgaaaagaatctattgatatgttatagtccttagccaataagctatgaatatcaagcattatcataaatgtcagactaatttttcaatatgaaacctaagattggggccatatagttgagttcactagatgtattgaggatacattaatcctcaaattataaatgtgtcatccttttggtttcctaaatatttatgttcagaaaacattagatagtcccatagaccaatgtttgatgctctaaaatttttatttagcagtagcataaatatagatcctgttttctcctgtcttttgacttgcaagtcagctaaacactttgtggaaatacccctagaattcttagtagatacaggttaggagacagcatatttacactagactttgagatcaagaaaaccttctagtcaccataataagaagtaaaatagctatgctgtgttccctacatgtgggtttggagtggcatgaactagccgaggtaaccatagaatagatttagacaacctgagcctagcctttgccatttaatagccctagagtctttggcaagttactgtatcgctttgaatctgttccactatctcattacatgttagtagtaatacttgctttgcctcactcacagaacagtactaaggataaaaaagaaaagaaaatatgtgtggaaacactcacaaataaacacatttcagatgaaggcaattattgcttttatttccatcagtgtcgcaggactatgtctgctcttcttccctgctcatgggactcctggaattgtagaacagattaagctctcaactagcattaacattggaggtcaattttggtattgaacataaatgtgagattaaagttgaagggcccagatatctctcagagatgactacaaccacgggagatgtctctgttttgttttcccatgcatgtaaattcaagtatctataaacagcatgggccaaaaggcagtcatgaagaggtcacaggacaaagcttttcactttagcatacactgctataataatcaaacttatgtgacctgagtgcttcccaggaattattattgatttatgtgccaaaatattgaacatccctgaggaagcctcaaagcataataatgttacttcagacacaagcttcaggactccttaacaattcctgcgtgtctaattggctagctcctcaggctgactgcccttttcctgtttccagacaaatcttccctaaaactcatggtcagattaattttcctcaaatacagtttacctcaacaactttccatcaccgctacccctcagctagcattaaagatcctcttctggttgagcccaatctcctagacactgccattactgtatgactaggcacagagtgacagtgtacagcatacagacagctctgtaaagagcccaggttatgcagtcaactgcactaaatctaaatcctagtgtagtgtgtacttactcttgaatacattatataacttcccagagcctcaatttttccttgtctataaaatgaagataacacctatgctgcaggattgttgtggagactgtgctaataaatgtgatagcaaagtacattggctacgtaatacaaagtacattggaatatagcagatgcccaatccatgctaattaatattattgccatcaattattctgaagaaatattccttctcatctctgctttatgcaattttctgcttgataatgaagcagaaacaaaaatacattaagtttcattgtgtatgtcacttcctccatgcaaatttctctgatcttttatgtaaaaaatgacttgaccttcctgggaatatctccagataagataaataaattattgcttccacctcatttattttagtaatttgtatatatgttttatcttccctaaaaatctacaatttccttgagagtagaaattgtgtcttagtcacccttgcatcacctaatagcacctagctcagttgcttgtctatagcagttgttcaacaaatgattgatgaatgtattaataaatcatcccaattcttaggtgatacctttaccctatgcctcaggcaactctttttttttcttgagacagacttttgttcatgttgcccaggctggtgtgcagaggtgcggtctcgacgcactgcaacctccacctcccaggtccaagcaattctccttcctcagcctcccaagtagctgggattacatgcacccaccaccatgcctggctaattttttgtatttttagtaaagatggggtttcaccttgttggccaggctgatctcaaactcccgacctcaagtgatctgcccgccttggcctcccaatgtgttgggattacaggcgtgagccaccactcccggcctccctttttttagatttgtgtaactgcttgtcctctatattgaataatacagctgcatgcatactgtcatcaagcaaatataagaggatggatggtcctgtgcttaacctaagggtactccacaaacccacaaaagagcagaagaaaccaagctatgaaagatcagacaaagaggaagaaaatgctgttttcagcaacatatgaaaactttatgttgtttccagtcctgataacaacagagtgacagcacatatatggctggtattcaagggtccaagattaatg

SEQ ID NO: 675 - DNA, 3481 bp, Homo sapiens
atataaactcgagccctggccgatccgcatgtcagaggctgcctcgcaggggctgcgcgcagcggcaagaagtgtctgggctgggacggacaggagaggctgtcgccatcggcgtcctgtgcccctctgctccggcacggccctgtcgcagtgcccgcgctttccccggcgcctgcacgcggcgcgcctgggtaacatgcttggggtcctggtccttggcgcgctggccctggccggcctggggttccccgcacccggctgcggcgaccccaagcgcctcgggcccctgcgcggcttccagtgggttacgggagacaacaacaccagctatagcaggtgggcacggctcgacctcaatggggctcccctctgcggcccgttgtgcgtcgctgtctccgctgctgaggccactgtgcccagcgagccgatctgggaggagcagcagtgcgaagtgaaggccgatggcttcctctgcgagttccacttcccagccacctgcaggccactggctgtggagcccggcgccgcggctgccgccgtctcgatcacctacggcaccccgttcgcggcccgcggagcggacttccaggcgctgccggtgggcagctccgccgcggtggctcccctcggcttacagctaatgtgcaccgcgccgcccggagcggtccaggggcactgggccagggaggcgccgggcgcttgggactgcagcgtggagaacggcggctgcgagcacgcgtgcaatgcgatccctggggctccccgctgccagtgcccagccggcgccgccctgcaggcagacgggcgctcctgcaccgcatccgcgacgcagtcctgcaacgacctctgcgagcacttctgcgttcccaaccccgaccagccgggctcctactcgtgcatgtgcgagaccggctaccggctggcggccgaccaacaccggtgcgaggacgtggatgactgcatactggagcccagtccgtgtccgcagcgctgtgtcaacacacagggtggcttcgagtgccactgctaccctaactacgacctggtggacggcgagtgtgtggagcccgtggacccgtgcttcagagccaactgcgagtaccagtgccagcccctgaaccaaactagctacctctgcgtctgcgccgagggcttcgcgcccattccccacgagccgcacaggtgccagatgttttgcaaccagactgcctgtccagccgactgcgaccccaacacccaggctagctgtgagtgccctgaaggctacatcctggacgacggtttcatctgcatggacatcgacgagtgcgaaaacggcggcttctgctccggggtgtgccacaacctccccggtaccttcgagtgcatctgcgggcccgactcggcccttgcccgccacattggcaccgactgtgactccggcaaggtggacggtggcgacagcggctctggcgagcccccgcccagcccgacgcccggctccaccttgactcctccggccgtggggctcgtgcattcgggcttgctcataggcatctccatcgcgagcctgtgcctggtggtggcgcttttggcgctcctctgccacctgcgcaagaagcagggcgccgccagggccaagatggagtacaagtgcgcggccccttccaaggaggtagtgctgcagcacgtgcggaccgagcggacgccgcagagactctgagcggcctccgtccaggagcctggctccgtccaggagcctgtgcctcctcacccccagctttgctaccaaagcaccttagctggcattacagctggagaagaccctccccgcaccccccaagctgttttcttctattccatggctaactggcgagggggtgattagagggaggagaatgagcctcggcctcttccgtgacgtcactggaccactgggcaatgatggcaattttgtaacgaagacacagactgcgatttgtcccaggtcctcactaccgggcgcaggagggtgagcgttattggtcggcagccttctgggcagaccttgacctcgtgggctagggatgactaaaatatttattttttttaagtatttaggtttttgtttgtttcctttgttcttacctgtatgtctccagtatccactttgcacagctctccggtctctctctctctacaaactcccacttgtcatgtgacaggtaaactatcttggtgaatttttttttcctagccctctcacatttatgaagcaagccccacttattccccattcttcctagttttctcctcccaggaactgggccaactcacctgagtcgccctacctgtgcctgaccctacttcttttgctcttagctgtctgctcagacagaacccctacatgaaacagaaacaaaaacactaaaaataaaaatggccatttgctttttcaccagatttgctaatttatcctgaaatttcagattcccagagcaaaataattttaaacaaaggttgagatgtaaaaggtgttaaattgatgttgctggactgtcatagaaattacacccaaagaggtatttatctttacttttaaacagtgagcctgaattttgttgctgttttgatttgtactgaaaaatggtaattgttgctaatcctcttatgcaatttccttttttgttattattacttatttttgacagtgttgaaaatgttcagaaggttgctctagattgagagaagagacaaacacctcccaggagacagttcaagaaagcttcaaactgcatgattcatgccaattagcaattgactgtcactgttccttgtcactggtagaccaaaataaaaccagctctactggtcttgtggaattgggagcttgggaatggatcctggaggatgcccaattagggcctagccttaatcaggtcctcagagaatttctaccatttcagagaggccttttggaatgtggcccctgaacaagaattggaagctgccctgcccatgggagctggttagaaatgcagaatcctaggctccaccccatccagttcatgagaatctatatttaacaagatctgcagggggtgtgtctgctcagtaatttgaggacaaccattccagactgcttccaattttctggaatacatgaaatatagatcagttataagtagcaggccaagtcaggcccttattttcaagaaactgaggaattttctttgtgtagctttgctctttggtagaaaaggctaggtacacagctctagacactgccacacagggtctgcaaggtctttggttcagctaagctaggaatgaaatcctgcttcagtgtatggaaataaatgtatcatagaaatgtaacttttgtaagacaaaggttttcctcttctattttgtaaactcaaaatatttgtacatagttatttatttattggagataatctagaacacaggcaaaatccttgcttatgacatcacttgtacaaaataaacaaataacaatgtg

SEQ ID NO: 676 - DNA, 5763 bp, Homo sapiens
gaaactttgcgcccagtccgcagggcgggccgcgcctttaccgcccagctgcctcccggagcccccgcgccctcccgacgcgcagagccatggcctcccacctgcgcccgccgtccccgctcctcgtgcgggtgtacaagtcaggcccccgagtacgaaggaagctggagagctacttccagagctctaagtcctcgggcggcggggagtgcacggtcagcacccaggaacacgaagccccgggcaccttccgggtggagttcagtgaaagggcagctaaggagagagtgttgaaaaaaggagagcaccaaatacttgttgacgaaaaacctgtgcccattttcctggtacccactgaaaattcaataaagaagaacacgagacctcaaatttcttcactgacacaatcacaagcagaaacaccgtctggtgatatgcatcaacatgaaggacatattcctaatgctgtggattcctgtctccaaaagatctttcttactgtaacagctgacctgaactgtaacctgttctccaaagagcagagggcatacataaccacactgtgccctagtatcagaaaaatggaaggtcacgatggaattgagaaggtgtgtggtgacttccaagacattgaaagaatacatcaatttttgagtgagcagttcctggaaagtgagcagaaacaacaattttccccttcaatgacagagaggaagccactcagtcagcaggagagggacagctgcatttctccttctgaaccagaaaccaaggcagaacaaaaaagcaactattttgaagttcccttgccttactttgaatactttaaatatatctgccctgataaaatcaactcaatagagaaaagatttggtgtaaacattgaaatccaggagagttctccaaatatggtctgtttagatttcacctcaagtcgatcaggtgacctggaagcagctcgtgagtcttttgctagtgaatttcagaagaacacagaacctctgaagcaagaatgtgtctctttagcagacagtaagcaggcaaataaattcaaacaggaattgaatcaccagtttacaaagctccttataaaggagaaaggaggcgaattaactctccttgggacccaagatgacatttcagctgccaaacaaaaaatctctgaagcttttgtcaagatacctgtgaaactatttgctgccaattacatgatgaatgtaattgaggttgatagtgcccactataaacttttagaaactgaattactacaggagatatcagagatcgaaaaaaggtatgacatttgcagcaaggtttctgagaaaggtcagaaaacctgcattctgtttgaatccaaggacaagcaggtagatctatctgtgcatgcttatgcaagtttcatcgatgcctttcaacatgcctcatgtcagttgatgagagaagttcttttactgaagtctttgggcaaggagagaaagcacttacatcagaccaagtttgctgatgactttagaaaaagacatccaaatgtacactttgtgctaaatcaagagtcaatgactttgactggtttgccaaatcaccttgcaaaggcgaagcagtatgttctaaaaggaggaggaatgtcttcattggctggaaagaaattgaaagagggtcatgaaacaccgatggacattgatagcgatgattccaaagcagcttctccgccactcaagggctctgtgagttctgaggcctcagaactggacaagaaggaaaagggcatctgtgtcatctgtatggacaccattagtaacaaaaaagtgctaccaaagtgcaagcatgaattctgcgccccttgtatcaacaaagccatgtcatataagccaatctgtcccacatgccagacttcctatggtattcagaaaggaaatcagccagagggaagcatggttttcactgtttcaagagactcacttccaggttatgagtcctttggcaccattgtgattacttattctatgaaagcaggcatacaaacagaagaacacccaaacccaggaaagagataccctggaatacagcgaactgcatacttgcctgataataaggaaggaaggaaggttttgaaactgctttatagggcctttgaccaaaagctgatttttacagtggggtactctcgcgtattaggagtctcagatgtcatcacttggaatgatattcaccacaaaacatcccggtttggaggaccagaaatgtatggctatcctgatccttcttacctgaaacgtgtcaaagaggagctgaaagccaaaggaattgagtaagacaactgctggaagatgtcttaaatcaagctttcaaaaaaatatattttaggaggctgatttaatgccagtctaaatccttatgtagaaaggactttgaaatttttcttctcaagaaatggtttgtataagaataacaatctgctagtctgtcatttctggagtgatacttttttttttgagacggagtctgctctgtcgctcgcgctggagtgcagtggcatgatctcggctcactgcaagctccgcctcccaggttcatgccattctcctacctcagcctcccgagtagctgggactacaggcgcccaccaccatgcccggctaatttttgtttttgtatttttagtagagacagggtttcactgtgttagccaggatggtctcgatctcctgacctcgtgatccgcccgcctcggccttccaaagtgttgggattataggcgtgagccaccgcgcccagccctggagtgatactttttatggaagacaaaagccccccaaatctgtgtaaaatctgctgcaaaggtgtcatccctcttgtgtcatcactggggttagaggtgggtccgaaataatcttctgtgtccttcagttggactctcggctgccaattgatctctttttcattgccatctctggggtggttctttggttttttgtgtgttttccccttcatctctacctgtgaaagtgaaattctattgtaaatgggaggaaaaagggttggttgtgaaaaattaaagacccacattctgttttcttactcatggtaagaaaagtggccatgagtagagattgggcaagcattggtaataaatggaataagactattattattattatttgagatggagtctcactctgtcacccaggctggaatgcagtggtgtgatcttggctcactgcaacctccacttcccgggttcaagcgattctcctgcctcagcctcctgagtagctgggattacaggtgtgtgcctccacacccggctaattttttgtatttttagtagagacggggttttgccatgttggccaggctggtttcaaactcctgagctcaaatgatcctcctgccttggcctcccaaagtgctggaattacaggcatgagccaccacacccacacaagactatcatttttaatgaccaagagcctagtatatagttggtgcctgtcttagtctgtttgtgttgctataaaagaacacctgagactgggtaattgataaagaaaaaggtttgtttggctcacaattttgctggctagaaggttgggcatccggtgaaagcctcaggctgcttccattcatagcaaagggcagccagtgtgtgcagaaatcaaatgacagagaggaagtgagagagagaggtgtcggggaggtgccaggctctttttaacaagcagttcttcaggaactaagagtgagtcactcccatgagaacagcaccaagccattcatgggggaatctgcccccatgacccagacccctcccgttaggcttcacctccaacactgaggatcaaatttcaacatgagatttggaggaggtcaaacaaactaaactgtagcagtgtttcataaaattgtttgcctgactcaggttgctagtaagccagcagagggatatttgcctcctaaatctttggcagaggcaggagtaaggaagccatttctggagtccttgctactaatttggaaaactgagcttctttctttcattgctttttcccttaagagacaagtccttactatattgccctgtctctcaagggaagacatcaagactggacttgaactcctgggctcaagccatcccccaaccttggcctctcgagtagatgggattataggcatgtgccacggtgcctgacttgagtttcttattctagaacacttggagcctgaactctgaccaggcccctcacttgagcctttgctttctgctccttgtaaactgccatattgggtgcacttgccctgccacagtaatgctatatatttctgagcattgtttttctctagataattttatatttttgagtataccccacttccaagtgttttttgttttgttttgctttgtttttgttgttgttgttttgagacagggtctcactgtgtcccccaggctggagtgcagtggcacaatgacgactcactgcagcctcaacctcctggggccaagtgatcctcccacctcagcctctcaagtggctgggaccacagaagtgcaccaccatgcctggctttttttttttttttttggtcgagatggggtgtccctgtgttgcccagactggtcttgaactcctggactcaagggatcctcctgtcttgggctcccaaagtgttgggattacaggcgtgagtgaccatgcctagctcacttccaggtttaacagacaaaataaacttactctagtttccatctctatcattttataataaccgtagcccacattgtagtagtttttcagctctttactaagtcccaccaattcatgttttcacccttaaaatctttctcactgatactctctctggacagaaaaaaggtgaaataagcctactataaggaatatatgacatgctaaattttatttttaaatggttcttcaagtcagattaaagtaataatagcaaattatgtgattatccatgtcccagcctctctccaaaaaaatagtaaacaagatgtcttcttcttttcccaaagatacacatacacacatgtacaaatttttttatcagataataatagctaatatttaatgagtacttaccttagtttgtcccctttacaacagctttacatctgtgtgattgatacagttcatattcccattttataactgagaaaactggtgcacagagaggataagcaacttgccaaaggtcacacagttaataagtggaaatgctggggtatgaaccaggtagtctgcccccatagctctgccccccagagctgtactgtctcccatgagggtacttctccatggagcagcctgaggcgatccctttattctgggcttctctcagaaatggattcccacacagtattcaaagcaaatttccccagaggaaatcctattggaagaacttaaaaactcagaatctttttctttgtccagagagttgaggaagcttaagctaaatgatacatgtttttaaaaaaaaatcagattataaatttagtttttggtgattcattaaattctttactattatagttattttctagctgttcatcttttagctaaatttgttccaaagaagcaaaagtttggtttctactaagttctggattctggatgggagattgcactgtgtgtgacatgcaagtttcatggtgtgggagattgcagagcatttgggttactgcttttactctttggaagctgttatcatctgtatctgctttaaataaagttaaagatttgg

SEQ ID NO: 677 - DNA, 3580 bp, Homo sapiens
attttgctgccctcgttccatccctattaggcgcattagccagcccggcggctctggttacagacgtctgaatgacaaagtgcctccattaccggcgcggcccgccagccgacccgccgggacgcgctctggtttcagccctctctctctcaccgcggcccaggaagaaactcggaccgcgcacagccatcccagaccgagcagccgcgcgccgaggcggaggcgggagccgcaggggctgcagacggcaggttcctgtcggggtacaccttcccaagcgcccaggtcctccacgcccagctcccctccttccttgggtcttcgcgcggggaccctcgctcttgcccagacccggagcccaagtcgttgcccctctgggatccggtccctcctccccgctctcctggtctacgctcgcccacccgcgtctgagcagcgtctctaaccagcggcgttagtcagcagacgtgcccgcggtcgctcccaaatccccggacgcagccacaggtcctgacagctccagggaactggggctgagctttcgggctggggcccgcacccggacagaatctctgcccacctcacccgcaggctctaccgccgacggactctggggacagtgtcaaccccccccgccctgctgggaaacgcagccgtgaccccgagctgggacagcggctgccccctgaaaaggtgggggagtaccgagctgggaatcaggtcggggagtctagccacgactctggcccaacttgctgtgagatcttggccaagtcgtttaaactctcagagcctcagtctccgtatctgtaaagccggaatttggggcgcagtgctctgatgaaagatgctggcggggagagtgaagacgcctcctccgttgccagaccttccagggcattcggttcatggccataaagcaggccacatctgacaatctcgtcggaccacccggaggacccgccgacctttgccgagtcggtggcccgggataccgcgctacagaatccgaggcgtccgggcgcccccgtctcgttaggtgcccagcggcttgcaccgagagccaggagaggctcagaccggatcccgacccttcgaggcgcgggagcccacggagcgcggtgggcgcggcgctcgggtcgcgcagctaggtggggagcggcgcgcagccccagactcgcaggcaggcagcggcggactgcacttgcctcgccccgcagcgccccctgcctgccgcctcccgcctgcgtagccagagctgcgcgcggccaggaagggtccccgcctagtgcgccccggcgctctgcaccccgagacgtagccaccgccagcccgggtaggggcacacccgctccgtccctcgcgatccgctgcgctgcttcaagccgtgagaacacgcgcgtcggaggagcccgccggccgtgggggaaccccgggagcgggttcgccccggcgaagtgggcactcccctcccagccttagatccgcagccccaattccgggactgggagaggccgcgagcaggagcgcggggacaggcgctggaaatgtccaagcctctgctctctcttctcgtctcactgtccctcagcgggcaggcgggaccccgaccacttcagggtccgcgccccgctctgtctcctttccttctgcttccatctctctgccgccctcgccgtcgcccctcttctgccctccctaacccacttctcaacctctctcccgctccccaacctctccctccgacgcccctcccccccattgtctggccggtccccattgtccttgccgggtcccctctgcctccagtccctccgacctcctccattgttccatcccgtcgtcccgggctccccgccccagcccagctcgcccctctcatctctagtccccgtccagttccccctccttctctcgccttggttctgtcccacgactctccagagaccgagatgctgaggggaaagtcccttcgggatcccggcattcgagtgtcctcttccgaagaacctgggcatcggagagccccatgccccctcttgaaagacccctcccagctcccccaccgccctctgcggtacctgaggaccggcatccgtgctccggtcttgccctcatctccaccctggagagtcgcctctgcgctccgggaaccctagaccctccttcgtggtcccggcatcagaggtcctttcccaccacccaccctcagtatctgggaccccaatgctctgttctgtttccttggtggcggcgcccggctcttctcggagttctgatcccgggaaagggagcgggccccctccggctaacactcacccccagaagcagcaacagcagcaggcgcggcccgtccatggcgcggccggtggcacctgcccccatcgcccgcctcccgcggcagcgctcgacttccagctcggtccgctttgcggactgatggggctgcgctgcgctgcgctccagcgccccccctgcccgccggagctggccgcggctcggctcgctctggctgcgggcgggagaggctgggtgaagccagtgctgcggccccgcctccgccccgcccagcccgcccacccccggaaccgcgcccgcccgctctgccgcctcggggtgggaagcagaggcaaagggagggcgtgcggttccccgcaccccgctgcgcttctccctgccttgtcccttagagcctctcacccatcccgccctggtacccagttcccggcccgcgctactgcgcgtccgtcccggatgctgtgggcccggggaccagggcgtccccactgcggttcctgttcctctccggctgcggcccgccacagggttcactctcttacccatcttcctccgcctctggcttcaccttctccctggagccttgctccctaactgccccctatcagtaagaatgcccgcttgccctccctgcccttcatctcagtccatcaccccacctccaccccatccccacccctccccttcccagtgcaggagatccctgggcagaggcctagggggaggggaggggcgcaggcgcccttacctcggccatcgacattcaaggtggagtccattccgacatcatttgattctcaaatgaggggtttgaaggggtcacaggtgtgcacacagtgcacaggaatacacactctcaagctcacttgtatgtgtgatcgtgcacttacgtgtgcccacaccgttctcatgcactcctgccgacctgactgtcccacacatgcacctctccaggcatgcacacgggcacatatgtgatccggacattcaaacgtgcatatgtacacattcacacatgcatgtatacagtcgtgtctgcataagccctcacatgtatacagtcacacaaacacacacattcatgagtgcacacacacactgacacccatcaacaaacaaacagatgcatcttcaacaatatagacttcaccagactgtgagtgtctccatgggcttatgagctctgcaggcagggattatggtttcttctctgaattcctggtatacagtagggttcaagaaagttttgtagaagggaataaatagaaaagtggtgaaatgg

SEQ ID NO: 678 - DNA, 4580 bp, Homo sapiens
caggggcccgaggacaatggggtcggcgacggcgaggaagccagcggggcggatggggtccccatcgaggccgagccgctgccctccctggagtactggccccagaagtcggaccgctccatcccgcagctggacctgggctggcccgacaccatcgcctaccgcggcgtgacccgggctagcgtctacatgcagccccccatagacgggcaggcccacatcaaagaggtggtgcggaagatgatcagccaggcacagaaggtgatagctgtggtcatggacatgttcaccgacgtggacatcttcaaggacctgctggacgccggcttcaagaggaaagtggccgtgtacatcatcgtggatgagagtaacgtcaagtacttcctgcacatgtgtgagcgggcctgcatgcacctggggcacctcaagaatctcagagtgcggagcagcgggggaactgagttcttcacgcggtcggcaaccaagttcaagggtgccctggcccagaagttcatgtttgtggatggagaccgggctgtgtgcggctcctacaggtgactctccagctttcagggaagttgtgcgagaggtacctctggctcccaactggcttctgcccttaatcctaaccctggttattccggttcattggtcccaaggctgctgaggtgtgcgcagggctggagcacatctgcccgcctgtctgtctctggaggcaggcagagaagggctttgtctgaggacgctgttgttccagcttggagatgtcaccggcctggaagtggggtgtggccaggccgtgccttcgcaagcctatgggggtcactctgagagccgtccttagggatggggccagctctgtgggcaccaccacatggggcatggggtgggcgctgcccatggttacatgggggttggtggcagcatagacgcatggcagcagcggccaccacatgcagaaccccccacagtgtccagggccttcctgagctgcttagtgaatcctgtaccagcctgagaggagcacagtgccctgtcatttgcagaggtgggaatgggcttggtgcaaccaacttgcttgacatccgactcagtctgaccccacagtatgcacctgctctctgcccccattcacttcttgatcccagggccctgtggccacagtctgaggcccagcggctatgggtgcacgggggctgggcggaggaagcagggtcatgtgcctgaccagcgccccctccctctgttgcagcttcacgtggtcggccgcgcggacggaccggaatgtgatctctgtgctgtctggccaggtggtggagatgtttgaccggcagttccaggagctgtacctcatgtcacacagtgtgagcctcaagggcatccctatggagaaggaaccggagccggagcctattgtgctgccctctgtggtccccctggtgcccgcgggcactgtggccaagaagctcgtcaaccccaagtacgcacttgtcaaggccaagagcgtcgacgagattgccaagatctcctctgagaagcaggaggccaagaagcccctggggctgaaaggcccagcgctggctgagcatccaggggaactccccgagctgctgccacccatccacccaggactgcttcacctggagagggccaacatgtttgagtacctgcccacgtgggtggagccagacccggagcctggcagcgacatcctgggctacatcaatatcatcgaccccaacatctggaacccccagcccagccagatgaaccgcatcaagatccgtgacacctcccaggccagcgcccagcaccagctgtggaagcagagccaggacagcaggccccgtccagagccttgccctcccccagagcccagtgccccccaggacggtgtcccagctgagaacggcctcccccagggggaccctgagccattgccccccgtgcccaagccccggacagtccctgtggcagatgtactagcccgggacagcagtgatattggctgggtcctggagctccccaaagaggaagctccccagaatgggacagaccataggctacccaggatggcaggcccaggccacgccccactccagcggcagctatctgtgacccaggatgaccccgagagcctcggggtggggctccccaatgggctggatggggtggaagaagaagatgatgacgactacgtaaccctcagtgaccaggacagccactcaggcagctccggccgtggccctggcccccgacggccctcagtggcttcctctgtgtcagaggagtacttcgaggtgagagagcactcagtccctctccggaggcgccactcagagcaagtggccaacgggccaaccccaccaccgcgccggcagctgagtgccccccatataacccgagggacctttgttggaccccagggtggctccccatgggcccagagtcggggaagagaagaagcagatgcgttgaagaggatgcaggcccagcgctccacagacaaggaggcacaggtgggtcagggtccctgcacaccaggggtcacgagtccctccctgccagccacccaagagctcgagctgttgtcttctgggctaccatgtccctgactctgatgacttcaattcccttgttacagatggggaaacttgatgaacaggcaggggtgggaaccggccagggccatatggaaggccatcattaatgctggggactcttggtcccagcatcctgaaaaggcaacctaagaaaatgcacgtttccccacctagaggtctccaaagcctgtggttagaggatcttgatggcacctgccagatgggtggcacagtccctagtttgcagatgaggaaaaggcggggcacagggacgttcatttacagccttgaggtcacacagcagtaagtgatacctgtccagaccttgtgccaagccacatccatgttaatccctttgattgtggccctgaggaccactctccccactccccaggttggggaacagttcacatctatcctttgcctcttcttctggtgacgtttgcaggacaaggtcccagaaccctgggtgccctgcagcctgggttcagtgcccggagcccgtcctacctgggaacaatgcgcggctgatcatgcccggcatgatgatcaggcccatggggagcatcttgaggtagctggccaggatggagcccgccttggcatggttcaggtcccgggctgacagtgatcgctgcacgatgacctgggggtggagtgcgagacggggtgagtccaagcctgagggacacttgtgtcaggattggtccttggtgggcctcagggaatgggcatgaggcacgatgatgtcccattagcctctgacctgcccaaaacagccacactcaaagccccaatactgtcagggtcccaccaggagagctcacttcagcaggccaagcagcgagagccgaggtacactcattcccagggactcagtcccctgacctgtcaataggggaggtgtggatcctgcccagcccaccacccctggcaattgtcagggctggaggagaccctgggtggggtggtatggggacatacacccctaccctcacctcctggaccctcatgacagcagctggcacatttatagtgccaggagcagacactggcgccaactgtgtttgcatggctggcagagttcaggtgctttaagacctggggttttgaaagcttgcagttcagtagcagagggaggctagaagctatctgaggacaccggcccttctgggagccttcagcaaatcctaaccaggcctttccagatttgcagaatgggaggagggagcggtaatttggacccataatgtctgagatctctcccagcactgacattacgattctacttcaaaagagttactttttttttgagtcggagtcttgctctgtcgcccaggctggagtgcagtggtgcggtctcggctcactgcaagctccgcctccgggttcacgccattctcctgcctcagcctcccaagtagctgggacaacaggcgcctgccaccacgcccggctaattttttgtatttttaaaatagagacgaggtttcaccttgttggccaggatggtcttgatctcctgacctcgtgatcgcccgcctcgacctcccaaagtgctgggattacaagcgtgagccaccgtgcccagcccaaaagagttactttttaaacagctttattgagatattcacagaccatataattcacccaaagtgtacactgttcccatggtttttagtacgttcacaaagttgtacgacctatgactctgaaacgtaactagttttcctttgcggttccacagtttaagtcaccagctgcaactcaggagcaggaagcctctatgatttttttttctttgagatggagtttcactcttgttgcccaggctggagtgcaatggcgcaatctcgggtcaccgcaacctctgccttccaggagaattgctcaaacccaggaggcggaggttgcagtgagctgagatcacaccactgcactccagcctgggtgacagaacaagactatgtctctggg

SEQ ID NO: 679 - DNA, 3708 bp, Homo sapiens
ggccttttttttttttttttttcaaaggctttatttcagtttctgaggttaggatgcccctgtgcccctcgctccacacctgggcaggtctaaacttccttccaggatggcctccacacacagcctcccacctggggtcacctggcttcctgggggacccgcaaaggaggggcagggagcagcagtccgggtgcggggatcgggggacctcggcgggggcatccacaggggctgcaagacctctggtcagcatggcgtgggtggggagagcgtttctccctggggtcctgagccagtgactcctgttaggacctttgtcccacctccgcctggtggaccggcagggacctggtctagccagtcctgcagcctccattcccccacctgcccctccccgctctgtggtgtggctgcccaggagagaaggggcccagggaagggaggtctccggcaggggtggggagtgacaggccagggcagcagggctgagccggagctgctcacagctgccaggcactggtcatcatggccacgaactcctcatccgtgttcatggaggcactcacgccgctgtagtagtcctggaattccgccagtgtgacctgcccgtccttctcagaggagtcgaagttgtccaggaagcggcgcagcacctcgtcctcggtccactccccactgcgcaccttggggtgggcacggccactgtacaccccgcggaggtcgtccaccgtcacgacgccgtccccactgcggtccagcttggcaaatgcagctgcgatgacagcctcccgggcctgggacatggggggccgcagcgcccgaaggaactcctccagatccagcgtcccgctgccattgcggtcccacttcctgcacacaccctctgcctccgcctggtccagcaccagcccgagtttggccagaccctgccggaactcatcagcgtccagggatctgctcccgtcccggtctagttggcggaaaaacctggccaggccctggatgcccgaggccccgcgggacaggcactgtgcccggagtttctccatggtggcatccacggcgtccatgcttggtctgggctctgggcagctggcctgcgtctgtcccagagtcctgcctgcggggccttgtgttagctgtgttgtgcctggggagactgttgctagtggaaggtgcctctggagatggggtggggcccagctgcatgaatgcactgtgctgggcagtggggagtgggggagggatgggtgcgcccagcctgactgcttactcaactgccagccccacagggcctgggacagagccagatccctgtggcactgcatcccttcctggctccaaggaggaggggcaggccactgccctgcaggggctgaaatgccctggatggagacaagtccgtggctggggaggcttgacgcatgattcctgtgtgaccctggacaggtccctttccctctctggcttcacaggggcttctcagcccgagccagggctgacaaaattgctgaggaatcaaagttcaaaagggccccaggttctgaccggccactgcggctcatgcctgaaatcccagcactttgggaggtctaggtgggaggatcacttgagcccaggagtttggaccagcctggggaacatatagagaacttgtttctattgtacagcaacaaaaatgccccaggtgggctgggcgcggtggctcatgcctgtaatcccagcactttgggaggccgaggtgggcagatcacaaggtgaggagtttgagaccagcctgaccaacatggtgaaaccccgcctctactaaaaatacaaaaattagccgtgcatgatggtgggcgcctgtaatcccagctacttaggaagctgaggcaggagaatcgcttgaacccaggaggtggagcttgcagtgagccaagattgcaccactgcactccagtctgggcgacagagcaagactccatctcaaaaagaaaaaaaaaaaaaaagccccaggtggcccaggtcctggggccctaagacctcccacccaggcccacctccaagggcaggtcctgcaacccacagagactgagctgagcctgagggacacctctgctcactgccacaaagcttgtcactggccgttgttaggagccagtcccaggatttctgtctttacggatcttttgttgttggttttcaggcctgaaacgtgacttagtgggctggctcctgacaaggtggtgagccagaggttgtgaccccgagtggaagagcagccctgatcctggacataaacctcaagagacgaagccacctcactgaaggccttcaacggagacatcggatatacctgcccgctaagataggtgggttttccaggacttgaaacgtgggccctgtttgaggacccactgttcgccccgacccaaggatcatcaatcggagccttctccaagcctggctttacctcgctcacagcacaattatattgtcagaagttgccttgcctgagcgcggtggctcatgcctgcaatcccaacactttgggaagccagggcaggaagatcacttgagcccaggagctcgagacccgcctgtgcaacatagtgagacccccccatctctacaaaaactacaaaaaattagccaggcatggtggtgtgttcctgcaatcccacctacttggaaggctgaggcaggaggatcacttgagcccgggagttggaggctgcagtgagctatgatcgcaccactgcactccagcctgggttacagagcaagacgcccgcctcttaaaaataagtaaataaactggccgggcacggtggcccacgcctgtaatcccagcactttgggaggccgaggcgggcagatcatgaggtcagcagttcgagaccagcctggccaacatggtgaaaccccgtctctactataaatacaaaaattagtcagccgggtgcggtggctcacgcctgtaatcacagcaccctgggaggccgaggcagacagatcacctgaggtcaggagttcgagaccagcccggccaacatggtgaaaccccgtctccactcaaaacacgaaaaaccagctgggcgtggtggtatgtgcctgcaatcccagccactcgggaggctgaggcaggagaattgcacgaacccgggaagcggaggctgcagtgagccgagatcgcgccactgcactccagactgggggacaagagcaagactttgtctcaaaaaaaaaagaaaattagccaggtatggtggcgggtgcctgtaatcccacctactccagaggctgaggcaggagaatcacttgaacccaggaggcagaggttgcagtgaaccaagaccatgccactgcaccacagcctgggcgacagagtgagactctgtctcaaaaataaataaataacttaaaaaaagaggccagggctgggcgcggtggctcacacctgtaatcccagcactttgggaggccgaggtgggcggatcacttgaggtcaggagttcaagaccagcctggccaacattttgaaaccccatctctactaaaaaaaataaatagctgggcatggtggtgcatgcctgtaatcccagctactcaggaggccaaggcaggagaatcacttgaaccctggaggcagaggctgcagtgagcccagatcacaccactgcacttcagcctgggtggcagggtggcagagccagactccgtctc

SEQ ID NO: 680 - DNA, 3990 bp, Homo sapiens
ctggaattagtatataaagctacgcggagcgatctctgcccctgaccctggaaaaatctgtctcacccacaaagatgtgggctcagctccttctaggaatgttggccctatcaccagccattgcagaagaacttccaaactacctggtgacattaccagcccggctaaatttcccctccgttcagaaggtttgtttggacctgagccctgggtacagtgatgttaaattcacggttactctggagaccaaggacaagacccagaagttgctagaatactctggactgaagaagaggcacttacattgtatctcctttcttgtaccacctcctgctggtggcacagaagaagtggccacaatccgggtgtcgggagttggaaataacatcagctttgaggagaagaaaaaggttctaattcagaggcaggggaacggcacctttgtacagactgacaaacctctctacacctcagggcagcaagtgtatttccgcattgtcaccatggatagcaacttcgttccagtgaatgacaagtactccatggtggaactacaggatccaaatagcaacaggattgcacagtggctggaagtggtacctgagcaaggcattgtagacctgtccttccaactggcaccagaggcaatgctgggcacctacactgtggcagtggctgagggcaagacctttggtactttcagtgtggaggaatatgtgctgccgaagtttaaggtggaagtggtggaacccaaggagttatcaacggtgcaggaatctttcttagtaaaaatttgttgtaggtacacctatggaaagcccatgctaggggcagtgcaggtatctgtgtgtcagaaggcaaatacttactggtatcgagaggtggaacgggaacagcttcctgacaaatgcaggaacctctctggacagactgacaaaacaggatgtttctcagcacctgtggacatggccacctttgacctcattggatatgcgtacagccatcaaatcaatgttgtggctactgttgtggaggaagggacaggtgtggaggccaatgccactcagaatatctacatttctccacaaatgggatcaatgacctttgaagacaccagcaatttttaccatccaaatttccccttcagtgggaagataagagttaggggccatgatgactccttcctcaagaaccatctagtgtttctggtgatttatggcacaaatggaaccttcaaccagaccctggttactgataacaatggcctagctccctttaccttggagacatccggttggaatgggacagacgtttctctggagggaaagtttcaaatggaagacttagtatataatccggaacaagtgccacgttactaccaaaatgcctacctgcacctgcgacccttctacagcacaacccgcagcttccttggcatccaccggctaaacggccccttgaaatgtggccagccccaggaagtgctggcggattattacatcgacccggccgatgcaagccctgaccaagagatcagcttctcctactatttaatagggaaaggaagtttggtgatggaggggcagaaacacctgaactctaagaagaaaggactgaaagcctccttctctctctcactgaccttcacttcgagactggcccctgatccttccctggtgatctatgccatttttcccagtggaggtgttgtagctgacaaaattcagttctcagtcgagatgtgctttgacaatcaggtttcccttggcttctccccctcccagcagcttccaggagcagaagtggagctgcagctgcaggcagctcccggatccctgtgtgcgctccgggcggtggatgagagtgtcttactgcttaggccagacagagagctgagcaaccgctctgtctatgggatgtttccattctggtatggtcactacccctatcaagtggctgagtatgatcagtgtccagtgtctggcccatgggactttcctcagcccctcattgacccaatgccccaagggcattcgagccagcgttccattatctggaggccctcgttctctgaaggcacggaccttttcagctttttccgggacgtgggcctgaaaatactgtccaatgccaaaatcaagaagccagtagattgcagtcacagatctccagaatacagcactgctatgggtgcaggcggtggtcatccagaggcttttgagtcatcaactcctttacatcaagcagaggattctcaggtccgccagtacctcccagagacctggctctgggatctgtttcctattggtaactcggggaaggaggcggtccacgtcacagttcctgacgccatcaccgagtggaaggcgatgagtttctgcacttcccagtcaagaggcttcgggctttcacccactgttggactaactgctttcaagccattctttgttgacctgactctcccttactcagtagtccgtggggaatcctttcgtcttactgccaccatcttcaattacctaaaggattgcatcagggttcagactgacctggctaaatcgcatgagtaccagctgcattgctggagatgggaaaggatgtagatgacccaatggtgagtcagggtctatggtgtctcaagaattcggccacctccacgaccaacctctacacacaggccctgttggcttacattttctccctggctggggaaatggacatcagaaacattctccttaaacagttagatcaacaggctatcatctcaggagaatccatttactggagccagaaacctactccatcatcgaacgccagcccttggtctgagcctgcggctgtagatgtggaactcacagcatatgcattgttggcccagcttaccaagcccagcctgactcaaaaggagatagcgaaggccactagcatagtggcttgattggccaagcaacgcaatgcatatgggggcttctcttctactcaggatactgtagttgctctccaagctcttgccaaatatgccactaccgcctacgtgccatctgaggagatcaacctggttgtaaaatccactgagaatttccagcgcacattcaacatacagtcagttaacagattggtatttcagcaggataccctgcccaatgtccctggaatgtacacgttggaggcctcaggccagggctgtgtctatgtgcagacggtgttgagatacaatattctccctcccacaaatatgaagacctttagtcttagtgtggaaataggaaaagctagatgtgagcaaccgacttcacctcgatccttgactctcactattcacaccagttatgtggggagccgtagctcttccaatatggctattgtggaagtgaagatgctatctgggttcagtcccatggagggcaccaatcagttacttctccagcaacccctggtgaagaaggttgaatttggaactgacacacttaacatttacttggatgagctcattaagaacactcagacttacaccttcaccatcagccaaagtgtgctggtcaccaacttgaaaccagcaaccatcaaggtctatgactactacctaccagatgaacaggcaacaattcagtattctgatccctgtgaatgaggatctggctctgttgcccaggctgcagtgcagtggcgtgatctcagctcactgcagcctctgcctcccaagttcaagcgattcttgtgcctcagcctcctgagtagctgggatgacaggcacgtgccatcacgcccagctaattttttttgtatttttaatggagatggggtttcgccatgttggtcaggctggtctcaaactcctggcctcaggtgatccgcctacttcagcctcccaaagtgctgggattacaggtgtaagccactgtgcccggcctgtcctaaactcttgaaaatagtttacagaagaaaaagctaatgcttggtattaaaacaatacttttttctatcagattg

SEQ ID NO: 681 - DNA, 728 bp, Homo sapiens
aggacttgacatgctgcccgactgcctgtcggccgagggcgagctgcgctgccgccggctgctggcaggggccacggcccggctccgcgcgcggcccgcgtcggccgcggtgctcgtgccgctctgctcagtgcgtggggtcccggcgctgctgtacacgctgcggtccagccgcctgaccgggaggcacaagggcgacgtcagtttcccaggcggcaagtgcgacccggctgaccaagatgtggtgcacacggccctgcgggaaacccgggaggagctgggcctggcagtgcccgaggagcacgtgtggggcctgctgcggcctgtgtatgatccgcaaaaggccaccgtggtgccagtgcttgctggtgtaggcccactggatccccagagcctcaggcccaactcggaggaggtagatgaggtgtttgcactgccgctggcccacctgctgcagacgcagaatcagggctatacccacttctgccggggtggccacttccgctacacactacccgtcttcctgcatggaccacaccgggtctggggcctcacagctgtcatcactgagtttgccctgcagctgctggcacctggtacctaccagccccgcctggccggcctgacctgctcaggggctgagggtctggcccgccctaagcagcccctggcttcaccctgtcaggccagctccactccaggactgaataaaggtctttgacagctct

SEQ ID NO: 682 - DNA, 2981 bp, Homo sapiens
aaaaaagcgcctgggaagagcaatcacaagttgtgacgattccaagttcacagaagcccaagggattttgacatttctccaaggagttagccagaagagatcctcaccggttgagttcagatggaagagaacagtaagaaggaccatcgggctttgctcaaccagggagaggaggatgaactggaggtgtttggttaccgggaccacaatgtacggaaagccttctgccttgtcgcatccgtgctgacctgtgggggccttctgctggtgttctactggagaccccagtggagagtgtgggccaactgcatcccatgccccttgcaagaagcagacactgttttgctgaggacaacagacgaatttcaaagatatatgaggaagaaggtattctgcctctacttatacacactgaagtttcctgtaagcaagaagtgggaagaatccctggtggctgaccgccactctgtcataaaccaagccttaataaagccagaattaaaactgcggtgcatggaagtgcagaaaatcaggtatgtttggaacgacctggagaagcggtttcagaaagttgggttgctagaagacagcaattcctgctctgacatccatcagacatttggattgggtctgaccagtgaagagcaagaggtcagaagattagtgtgtgggcccaacgccattgaggttgaaatccaacccatatggaagctgcttgttaaacaggttttaaatccattctatgtgttccaagccttcaccctaactttgtggctgtctcaaggttacatagaatactctgtggccatcatcattttgactgttatctccattgtcttaagtgtgtatgatttgcgacagcaatcagttaagctgcataacctcgtggaggaccacaacaaagtccaggttacaatcattgtaaaagacaaaggtttggaggagctggaatcccgtctcttggttcccggagacattcttattcttccaggaaaattttcattgccatgtgatgctgttttgattgatggaagctgcgtggtgaatgaaggcatgcttacaggagaaagtatacctgttacaaagacaccattgccccagatggagaacactatgccttggaaatgtcacagtttggaggattataggaaacacgtccttttctgtggaacagaagttatccaggtcgagccctctgggcaggggcctgtacgagcagtcgttttgcaaacaggttacaatacagccaaaggggacttagtgagatccatcctgtacccccggcctctgaacttcaaactatacagcgatgccttcaagttcatcgtgttcctggcctgccttggtgtcatgggttttttctatgccctaggggtatatatgtaccatggagttcctccaaaagataccgtgaccatggccctgatcctcctcaccgtgactgtccctccagtgctgccagctgccctgaccataggcaacgtgtatgctcagaagagactgaagaaaaagaaaatcttctgtatctccccacagagaatcaacatgtgtgggcaaataaacctcgtgtgctttgacaaaactggcactctcactgaagatgggctggacctctgggggactgtccctactgctgacaactgcttccaggaagcccacagctttgcctcgggccaggctgtgccatggagcccactgtgtgcggccatggccagctgccactctctgatccttctcaatgggaccatccagggagaccctctggacctcaaaatgtttgagggcactgcctggaaaatggaagattgcattgtagactcctgcaaatttgggacgtcagtttcaaacatcataaaaccaggaccaaaagccagtaagagtccagtggaagccatcatcaccttgtgccagtttccattttcctcgagcctgcagaggatgtccgtgatcgctcagctagctggggagaatcatttccatgtctacatgaaaggtgccccagaaatggtggccaggttctgcagatctgaaacagtgcccaagaatttcccacaggaactgaggagttacacggtgcaaggcttccgtgtcattgctcttgcccacaaaaccttaaagatggggaatctttcagaagtggagcacttagccagagaaaaagtggagtcagagttaacatttctgggacttctctatgtgaagcagcagccttggtattgtgaggtctaccaatacagtgagtgttttctggccaaccaaagcccataaaaataaaaaattataacaaaccctgagaaccaaaatgaacgaaaatctgttcgcttcgttcattgcccccacaatcctaggcctacccgccgcagtactgatcattctatttccccctctattgatccccacctccaaatatctcatcaacaaccgactaatcaccacccaacaatgactaatcaaactaacctcaaaacaaatgatagccatacacaacactaaaggacgaacctgatctcttatactagtatccttaatcatttttattgccacaactaacctcctcggactcctgcctcactcatttacaccaaccacccaactatctataaacctagccatggccatccccttatgagcgggcgcagtgattataggctttcgctctaagattaaaaatgccctagcccacttcttaccacaaggcacacctacaccccttatccccatactagttattatcgaaaccatcagcctactcattcaaccaatagccctggccgtacgcctaaccgctaacattactgcaggccacctactcatgcacctaattggaagcgccaccctagcaatatcaaccattaaccttccctctacacttatcatcttcacaattctaattctactgactaacctagaaatcgctgtcgccttaatccaagcctacgttttcacacttctagtaagcctctacctgcacgacaacacat

SEQ ID NO: 683 - DNA, 2466 bp, Homo sapiens
atgtgaccggccgccggcaccgaccgacctccctcaccggcggctctctcgcctgggctcccggagccggcgaggagggaatggaggactcgcgcccgggttaggcctcccagggccgctcaggctggtgggtgttgcctggtgacgggcctgccggcggccggccgggcgatcggcggtcggcgcccgcgcaaagcggggctggacgagcagcgagctccggggagcggatccgagagggccgagtcctcgaaagaggccttgaggcgacgggagacccgggatcgaagtcagctgccggagggagagccccccatgccggctcgagagctcgggtttcggtggtggagaacgtagtacctttcggggacattggacactactctaggaccgggtaactataactacccaatattgcagccatggagtccatgcttaataaattgaagagtactgttacaaaagtaacagctgatgtcactagtgctgtaatgggaaatcctgtcactagagaatttgatgttggtcgacacattgccagtggtggcaatgggctagcttggaagatttttaatggcacaaaaaagtcaacaaagcaggaagtggcagtttttgtctttgataaaaaactgattgacaagtatcaaaaatttgaaaaggatcaaatcattgattctctaaaacgaggagtccaacagttaactcggcttcgacaccctcgacttcttactgtccagcatcctttagaagaatccagggattgcttggcattttgtacagaaccagtttttgccagtttagccaatgttcttggtaactgggaaaatctaccttcccctatatctccagacattaaggattataaactttatgatgtagaaaccaaatatggtttgcttcaggtttctgaaggattgtcattcttgcatagcagtgtgaaaatggtgcatggaaatatcactcctgaaaatataattttgaataaaagtggagcctggaaaataatgggttttgatttttgtgtatcatcaaccaatccttctgaacaagagcctaaatttccttgtaaagaatgggacccaaatttaccttcattgtgtcttccaaatcctgaatatttggctcctgaatacatactttctgtgagctgtgaaacagccagtgatatgtattctctaggaactgttatgtatgctgtatttaataaagggaaacctatatttgaagtcaacaagcaagatatttacaagagtttcagtaggcagttggatcagttgagtcgtttaggatctagttcacttacaaatatacctgaggaagttcgtgaacatgtaaagctactgttaaatgtaactccgactgtaagaccagatgcagatcaaatgacaaagattcccttctttgatgatgttggtgcagtaacactgcaatattttgataccttattccaaagagataatcttcagaaatcacagtttttcaaaggactgccaaaggttctaccaaaactgcccaagcgtgtcattgtgcagagaattttgccttgtttgacttcagaatttgtaaaccctgacatggtaccttttgttttgcccaatgttctacttattgctgaggaatgcaccaaagaagaatatgtcaaattaattcttcctgaacttggccctgtgtttaagcagcaggagccaatccagattttgttaattttcctacaaaaaatggatttgctactaaccaaaacccctcctgatgagataaagaacagtgttctacccatggtttacagagcactagaagctccttccattcagatccaggagctctgtctaaacatcattccaacctttgcaaatcttatagactacccatccatgaaaaacgctttgataccaagaattaaaaatgcttgtctacaaacatcttcccttgcggttcgtgtaaattcattagtgtgcttaggaaagattttggaatacttggataagtggtttgtacttgatgatatcctacccttcttacaacaaattccatccaaggaacctgcggtcctcatgggaattttaggtatttacaaatgtacttttactcataagaagttgggaatcaccaaagagcagctggccggaaaagtgttgcctcatcttattcccctgagtattgaaaacaatcttaatcttaatcagctcaattctttcatttccgtcataaaagaaatgcttaatagattggagtctgaacataagactaaactggagcaacttcatataatgcaagaacagcagaaatctttggatataggaaatcaaatgaatgtttctgaggagatgaaagttacaaatattgggaatcagcaaattgacaaagtttttaacaacattggagcagaccttctgactggcagtgagtccgaaaataaagaggacgggttacagaataaacataaaagagcatcacttacacttgaag

SEQ ID NO: 684 - DNA, 2860 bp, Homo sapiens
ccaagccatggccccccagggggtccaggaccacctagagatgcagaggaccctgatcagagtgagacgtcttcagaagaagaatcaggagtggaccaggaactctcaaaagaaaacgagactgggaaccagaaggatgggaactcttttctttccattccatctgcttgcaactgccagggaacacctggaattccagaagggccttactctgagggaggaaatggttcttctagcaacttttgccaccactgtacctctccagctttgggggaagatgagttggaagaggaatatgatgatgaagaatctctcaagttccccagtgatttttcacgtgtgtccagcggaaagaaacccccatcccggagacagcggcaccgctttccaacgaaggaggatactcgggagggtggacgtagggatcccaggtcccctggtcgacatcggctgggtcggaaacgaagtcaggcagataagcgcaaaggcctgggattgtggggagccgaggaactatgtcaacttggacaggcaggcttttggtggctgattgaactgctggtattggtgggagagtacgtagaaacttgtggccatctcatctatgcctgcaggcaactgaaaagcagtgatttggacctttttcgagtttggatgggagtgtggacagggcggttagggggctgggcccaggtcatgtttcagtttctaagccaggggttttactgtggagtaggactgtttactcgttttcttaagctgctgggtgctttgctgctcctggctctggccctctttttgggctttctacagttgggatggcggtttctggtgggactaggtgaccggttaggctggagggataaggctacctggctcttctcttggctggattctccagccttgcagcgttgcttgactctgctgagagatagcaggccatggcagcggctggtaagaatagttcagtggggctggctggagttgccttgggtcaagcagaatattaataggcaggggaatgcacctgtagctagtgggcgctactgccagcctgaagaggaagtggctcgactcttgaccatggctggggttcctgaggatgagctaaaccctttccatgtactgggggttgaggccacagcatcagatgttgaactgaagaaggcctatagacagctggcagtgatggttcatcctgacaaaaatcatcatccccgggctgaggaggccttcaaggttttgcgagcagcttgggacattgtcagcaatgctgaaaagcgaaaggagtatgagatgaaacgaatggcagagaatgagctgagccggtcagtaaatgagtttctgtccaagctgcaagatgacctcaaggaggcaatgaatactatgatgtgtagccgatgccaaggaaagcataggaggtttgaaatggaccgggaacttaagagtgccagatactgtgctgagtgtaataggctgcatcctgctgaggaaggagacttttgggcagagtcaagcatgttgggcctcaagatcacctactttgcactgatggatggaaaggtgtatgacatcacagagtgggctggatgccagcgtgtaggtatctccccagatacccacagagtcccctatcacatctcatttggttctcggattccaggcaccagagggcggcagagagccaccccagatgcccctcctgctgatcttcaggatttcttgagtcggatctttcaagtacccccagggcagatgcccaatgggaacttctttgcagctcctcagcctgcccctggagccgctgcagcctctaagcccaacagcacagtacccaagggagaagccaaacctaagcggcggaagaaagtgaggaggcccttccaacgttgatgccccttctctttcctcaaatcaatgtcagggagtcaaaagggctgtagcacaggatggagtttgatttatccctcctcccccaacacctaggaactgaatctttttctttttattttttgagatggagtcttgctctgttgcccagctggagtgcagtggtgtgatctcagcttactgcaacctctgtctcccgggttcaagcaattctcccatctcagcctcctgagtagctgggattacaggcacacaccaccacacctggcccagctaattcttttttgtatttttagtagagacggggtttcaccatgttgcccaggctggtctcgaactcctgagctcaggtgatccacccgtcttggcctcccaaagtgctggattacaggcataagccactgtgcccggcctgaatcttgtcttttgacaataccaaagaaatagggggtagctagagtaaagaacctagggcctggacctgggctggacagtgtatccctttaggtgtgggaactgggtatttccctggggtctgtatgcctttgtcttgtcatttgcttttagggcagatgacactttttcccacccttttaaagctacaagtctatcttctttcttgacccatttcaggagggagccctctcctttatcctgatataatatttaaaagacagaacaagaaagcatgtagccctaatgataggagattatcgcatagagttcagagactggaaactgaattttcccacccaattttaggctcttttctgcaaggatggccaaaattaatcatttttaaaaagtagattcatgcccactgcccttgggtgagggggaagaatacgggggttcccagaagcccccatgtgatccaagggtttgtattttttttttaagtttgttcatatttgtatgtacatgactatttaaagccaggggattatctttctataaatgtataactggc

SEQ ID NO: 685 - DNA, 2775 bp, Homo sapiens
agcagtccagcagtgcagcagtgcagcagtgcagcagtgcagcagtgcggtgaggcgagggtgcgaggcggctaagcaagggatgggcccgccgtggcgagccgctgggccgtgttccgcctcctttcgggctttccgcgggtgtctggggagggaacccggccgcgggcctcaggccgtccccctccgcagaccccttctcttattctgagtctaacctatccgctggggccctggaaagcgattctcgcctggagtggctttaggcagcggtggtggggaacgtcctctctcaggtgcctgggctccaacctccgagccccgggttgctcacgcttctccggtcctctacccgaaggctcgatcccgctggtacagcggcggccaggctccctgtcttggtagccgtccctctacccccgccccatgacctcttctagaccattgaaagagcatccaaaccactttcctgctgccactctttcctaccatccctctaaatcacagtttccaggtgacttttctaagcatggcttttctcgttcactcctgttcaaaaatcttctcaccaattttgtcaccatttactcagctgagtgcctgctttctgtcaagtattttaccaataaatctctactccacaccaccgacaagaaatattttggagccatttaaaaaggaggaaacggaagcttctgccgctgcctgattctccattgctccgagccgcgcgggtgctgcgggctgtggagccgccggccgagccccgccggagcgcccgagagcccgcgcgtcccgggcgtccgtcggggtccgaggtccctccctcagggagtccccgctcggcagcgctctcgcgtttcacgcagcggccggggatctgggacaggcggggccccgaggccgagcctggcgctgcccagcggccggtgcaggcctcaagctgggccgggcggaggggaaccggcgagttgaagccccggggccgaaagccggagcctgtggcggccgcgggggtggggaggggggtggggcggcttcttgggcagcgccacacggcggcgcagtgatggatgttaacagcagcggccacccggacctctacgggcgcctctgctctttcctcctgccggaggtggggggcaggctgcccgacctgagccccgacggtggcgccgaaccggtcgcggtctccgggacgccgcatctgctgagcggggcccccgaggtgacggccagcccggcgcccacctgggacgcaaccccgggcaatgcctccggccgcggggagcaaatcaagaaagggccgagaaagttgtgatcggctctgtcctgacgctcatctctctgcgatcgcgggcaactgcctggtggtatctccgtgtgcttcgtcaagaagctccgccagccctccaactacctcatcgtgtccatggcgctggccaacctctcggtggccatggcggtcatgcccttcatcagtgtcaccgacctcatcgggggcaagtggatctttggacactttttctgtaacgtcttctccgtgaatgtcatgtgctgcacggcctggatcttgaccttgtacgtgatcagcatcgacaggtaccttgggatcatgaagcctctcacgtaccctatgaggcagaaggggaaatgcatgacgaagatgattctttctgtctgccttctttccgcctttgtcactttacctaccatttttggtcgggctcagaatgtaaacgatgataaggtgtgcttggccagacagcagtagtcaccctgaatggcacagtgaagttccaggaggtggaagagtgtgcaaaactttcgagactcctcaagcatgaaaggaaaaaatatctccatctttaagcggaaacagaaagcagcgactaccttggggatcatcgtctgggcctccaccatgtgctggccgccctttttcctcctgacagccagacccttctgtctatggcactgcctgcagctgcatcccactgtgggtggagaggatatttccatggctgggctatgcaaactctctcattaacccttttatttatgccttcttcaactgggacctgaggaccacctattgcagccggctccagtgccagtaccagaatatcaaccagacactctcagctgcaggcatgcatgaagccctgaagcttgctgagaggccagagagacctgagtttgtcctacaaaactctgactactgtagaaaaaaaaagtcatgattcatgactgaaagagggataatggagatgaaataaacaaggcaaaatagaggtggaaacagaagaaagtcatttgccaagactgcagaatggaatgcagcttctgtcctttcttaggatggctaaaacgtgacaaacagcatgacctgatgtacaacatatcttatgagggagatggtgacctctccttttttctgtggatcagtgttattgtgtgttctcagtttaagatagcagatcatctcagcagtaagcacattgacagaattgagttccagaaaggaagcagtttcaggttcttagcacatgtccaaatccatgcaagtgggagaaagttccaatgcacactttccatgcttccgagtctaggtctcgtggtgaatattcagcaatcattcatgagaaagaatgtattttgttgtatgacagaagggtttaccaagcaaactgtggtaagcatagtatcgaatatgttgcatgtccattttagaaaacagagcccagtcatcagctaatacaaatgatttcccag

SEQ ID NO: 686 - DNA, 3871 bp, Homo sapiens
tgttacctaccgctcaacaccttcctcctgcggccactgcaccggctcatgcactacaagcaggtcctggagcggctgtgcaaacacctcccgccgagccacgccgacttcagggactgccgaggtgagtgctgggagcctgcgccacctggtgcccatgccacagttcaggccgggtgctcccagactgagcccagccagggaggggctccccgggtagagaggtcagctgatgctgggtcccaggttttcatcagggtgggcgccggtttttattcccgctctggtgtttggttacatcttgattttttttttttttttttgagactgagtctcactctgtcgcccaggctggagtgcaatggtgcgatctcggctcactgcaacctccacctcccgggttcaagcgattctcctgcctcagcctctggagcagctaggattacaggcgcccgccaccacgcccggctaatttttgtatttttagtagagacggggtttcaccgtgttggtcaggctggtctcgaactcctgaccttgtgatccgcccgccttggcctcccaaagtgctgggattacaggcgtgagccaccgtgcccggccacatcttgatctttccgtaaagaaggtgctaatgatcgtcaggacccctttcttcctttgcctcttgcatgcattttctcctttggttcctgggtggttttgtgcaaagatccctagagaagctccgcttacagttagcccccgcccaggaagcttgcttctacccacgtgacggaaactcatccctccaccatggccacagaacatagcttgtaacaaatcctgttgctcattgctaccggtcgtttgtaatgtgcccatcagcataatgagcatctctcctgtattaactcttcccaagcctcaggcacaggtgagttcatcttacatatggggactacggagactagagaggttaaggaacctgcccagagtcacacagcttggagggaaatgatttggaaactaaatctagaacccatggtcacaaccgtcctgcccttctatctcatggacagtcctacccgctcgtacttgctcagccccaggccaggtgctgcatacctgatactgtaccaacgttcacaccattactcctttaaggacccctttagatcaattgcattatcccattttacagagcgtgacgctgagactcaggggaagggacttgctgggtcactcagaggtcagagccgcattccagacctgcttttcccacggggccacgcgtgctcttctgaacggaagtcgttctgtctggtgtcacagttggtctgtgggtgtctgccctccctggcctagcatgcggagttggccctgcgtaggtggctcccgcacaggtggcccgaatccacacacccactaggagggcaaggcccttattccttgcctgaaatgtcagaaacacctcccaactctttagccaaaactgtcatcttttttaaaaatccatcttcttacaccttggcttaaaacctgggtgacggctgactgcctcaggctaaaatcggaagtcttcatgacctggcctggccagctctcacaccccagctgcgcagcgagcacctgtactgggcgtgtgagggagaaggaacagtgcggcccctgacctcacaggacccactggagggtctgcaggcaggtacctgggtgctggagggtctgcaggcaggtacctgggtgctggagggtctgcaggcaggtacctgggcagtggcaaccctgcactagggccgtgagagagaagtggacggtgcagttggagccggggcgttagggggtgttggggggatctcgaagggaaatggtgtctaagttcagaactaacatgtaaataggagttttcctgggtgaaaggagggtgtggagaatagagttagaaacagcacaagctcaggttcagaggggacagagaccggaacattgccaaaagcgtgcagggcacagggagagccacaaagtgaggctgcgacagaaagcagcggctacatcccactgcgccccatggaccccgcaaagccgtaacctaagagcagaggccgaacaggaagtgttttaaggagggaaacagtgataccaggcttgttctagaaaaaccgttgttaatatctagaatatatggcggactcctacaaattagttgttaaaaaaaggcaacccaataggtagaagacttggcaaagtaattgagacagtgacagttcacagaaggggaacacaagtgcctcctgacatggtttgtcattgaccatctgtctttaaaacaaaccatgctggccaggggtggtggctcacacctgtaatcccagcactttgggaggccaagatgggaggatcactggaggctgggagttcaagagcagcctgggcaacacagtgagaccttgtctctacaaaaaatttaaaaattacgagcatgcacctatagtgccggctactcaggaggctgaggtgggaggatcgcatgagcccaggagttggaggctgcagtgagctatgattgcaccacagcccaggcgacagacctagacccagtctctaaaaacaaaaccatgctgcctcttgcctccacaccttggtgcattccgttccttctgcttagagtcctggccgccacctccttggcctttcctggccagctctctctcgtcctttaagcctcagcttgtgcctggcacctgatgttgagctgacctcctgtccgccttgtcctgtcacactggcattgcctgtgtgttggccgagcccggaggaaaggacccagggcccctcctggctctgaggactcctcagatctgtcgcccatgggggtgagagcggtgtgtggttttgaaggcgctgttcttggcggactcatccagttccactctgctatttctctaaacagtacccaatggagataggctatccttgatgattgaggaagagagtgctagctagcttaaagcatgaagtggcagcactgtaggagcctaggtttccagagctagagggacactgaatgccaagggctgttcccagcacgcccctgcccctgagcaccgggggccggggtgccatcattccatcattttcctctcagagctccccactaccccccagccctgccactgagcactggatgccaagtaaatgtttattggaccaaactgggtggtcatgtctgaaaatcgagcaaggcctgggatttgtcactatggctgagaccgcattctctgataagcctgggagaatttaactcgcatccttgggggaaaaaacaagaaaactaaatgcttcccttccaacactgaaatgctgggggaaagcagtgaaagaggtatttagagttctgaagactgaagttcagtcaacaagtatttcttgcttttcttgaccaaactacccaagtgctcagccgctggggacttgagtgccacccaaacttgtcagccactggggacttgcgtgccacccaagcttgtattaatcaggcactagcttcttttaaatattggatgcccaccagtataggggagccgtgcctctatcgaaaaataaaggcctgatgtggtggctcatgcctgtaatcccagcactttgggcggccaaggcgtgtggatcgcctgaggtcaggagttcgagaccagcctaaccaacatggtgaaaccttgtctctactgaaaatacaaaattagccgggcgtggtggcatgcacctgtaatcccagctactcgggaggctgaggcaggacaatcacttgaacctgggggcagaggttgcagtgagctgagattatgccattgtactccagcctgggcaacaagagcaaaactctgtctcaaac

SEQ ID NO: 687 - DNA, 4000 bp, Homo sapiens
taaagaggaaatgcggcccgctccccactcagtgccactctgtgccactccgtgccaggccctgagggcacccggttgctgcttccttccgtctttccccaaggactatcagaggcaggtggctgggccagggggtgggtcggggggaggtctggccatgtggtagggtgataggactgaggggccccagggagctggctgcagggcagtttgtttctcctgatggagaatgctccctggtgggtggggcgatgggctggggactggtttgttcatggggacagagatcagaagtgggcttgagaagaacagggccagaaggcctggactctggccccagcctagcccctaatttgtgcagggtggctttgggcaagtcactaagtcactgtctagactgggccctcagccttcctgtctacccaatggagggtctttctgtccacctgggaacagcctgataggactgaagcacagcccttagtttccagatgagaattctggactggaggccctgacattacaattgccaacactgactctggtgtttggcaaaatttggtgtatgtgggaaacacgtgcctctggttgaggtccttaacttcagaatttccctctagatcaatgctttttaaagcactaactccaacaccaccatcttctgtaggagctttcgagctttccagcttttccagcatacgctcctgatctgttactcaggcatgctggttatcccatttcatacgtggacaccttgaggcctaaaggttggtgactggctctacctgacacctctgtgtgattctaggttgccccttgctcctctctgggcctcagcctttctgtctatgcagtggggacttcggatcgctgttgtttcagagtctgaggctatgaggtctgagagggcccttgtgtggagtcacctctgagctgcaggcaggatttccagggcaagaaggccacagcatcagcaggcacctgtctttggcctgtgagccatagcctaaggcgtgcccttcccgaccttggccagatcacgctagagtcctccaaggcctcccctcccttgcccagccaccttctctgctctgcagggctccactttcactttcacactcccaggctgtggctcttacccgtgccgagctttcacatccgctcacatctgtgctcccagatgccagcgtgacccctgacacgtgtgtgcagcagcctgcagctgccccaagccatggctgaacactgactcccagctgtggggcttcaccattacagactccccagggcttcaaagacttctcagcttcgagcatggcttttggctgtcagggcagctgtacaatagtggatgtttgagacggaggcagatgagaagagggagatggccttggaggaagggaaggggcctggtgccgaggattccccacccagcaaggagccctctcctggccaggagcttcctccaggacaagaccttccacccaacaaggactccccttctgggcaggaacccgctcccagccaagaaccactgtccagcaaagactcagctacctctgaaggatcccctccaggcccagatgctccgcccagcaaggatgtgccaccatgccaggaaccccctccagcccaagacctctcaccctgccaggacctacctgctggtcaagaacccctgcctcaccaggaccctctactcaccaaagacctccctgccatccaggaatcccccacccgggaccttccaccctgtcaagatctgcctcctagccaggtctccctgccagccaaggcccttactgaggacaccatgagctccggggacctactagcagctactggggacccacctgcggcccccaggccagccttcgtgatccctgaggtccggctggatagcacctacagccagaaggcaggggcagagcagggctgctcgggagatgaggaggatgcagaagaggccgaggaggtggaggagggggaggaaggggaggaggacgaggatgaggacaccagcgatgacaactacggagagcgcagtgaggccaagcgcagcagcatgatcgagacgggccagggggctgagggtggcctctcactgcgtgtgcagaactcgctgcggcgccggacgcacagcgagggcagcctgctgcaggagccccgagggccctgctttgcctccgacaccaccttgcactgctcagacggtgagggcgccgcctccacctggggcatgccttcgcccagcaccctcaagaaagagctgggccgcaatggtggctccatgcaccacctttccctcttcttcacaggacacaggaagatgagcggggctgacaccgttggggatgatgacgaagcctcccggaagagaaagagcaaaaacctgtacgttgggaagatccctggcttctgcgctcctcttcctcccttgccccagggcttgtctctcctctaggggtccaggtggggagaagaggttgtgcctggtcccgcccacaaccccagacagacaccaaggaaaaactggatcttggaactttgcagtgaccccaaagtggggtcacctgggtcctgagcattctctccaagtgaggcaaagtgctgattcagtacccggaagccacagtgaaccagaagcaaccagcccgtttgccctggctttagcccagcttctgagccaagcagggaccaagtgacttcaacaactcctttgctccctctgggcccaagagtgacctgagaaggggtggaactgacagtcattggctcctctttctcttcctgagctcctgaatgctaatagtctcaggcattgccaggagggggcgctgctggcccagctgccgaatcccgcactcgccaagcctttctggccacactcaggccttcttatactatagggtgtttgttagaggtgtcaatgaaaaagatgtgtgtgtgggttctcaggtcttcttctacccccaggcctaagaccctggagactcgggggaggtatagggaggaggcagtggggtgcatgcacagtgacacctccagaggaagcccctccccaccaggtcctgtagcacccaccactaggcaggaattgggctatagggaggagcctcctgcaaccctcttctctggccttgaccgtgggtggggtccactaccctagaaagccttcctcaccccagctgccttgacctctccagctttctgcagcaactgttggcttctcttactccacagccaattgcattttcttagcaaggtgaaatgcataaaccaaaacagtcccttgcaccaaccatcttcacttaaccttttgtaggatgagagaggatccagggggtgccaggactgttgaatgtggtgctggaagtggggggtgtagggaagcagtgtgtggcgcagagggcaggcatcccgggtgctggagcagccctgtctagcctcctttcaatgtaggtgctgccttttgaattgcctgaagcccacactttttttttttggagacagagtctccttctgtcacccaggctggagtgcgatcttggcttgctgcaacctccgcctcccaagttcaagcagttcttgtccctcagcctcccaagtagctgcgattacaggtgtgtgccatcacacccagcaaattttttttgtacttttagtagagatgggggttttgccatgttggccaggctgttctcaaactcctggcctcaagtgatcttcccgcctcggcctcccaaagtgctgggattacagacatgagccaccatgcctggcctctgaaggtcatactcttaaaagcttagacgaagagtcttagaacatctacggtaataataagaataaccattaatgtttattatgccccgcactgttctgtgtgtatttcatatgtaatctaatttaatctttaccactacttttattttccgttctgttctttcttattgaccttacccttattttacacgtgaataaactactgtgcaaagag

SEQ ID NO: 688 - DNA, 2077 bp, Homo sapiens
gatacagatcagatggtgactgaatagaagctgccccagtcctgggctcatgatgtacgcacctgttgaattttcagaagctgaattctcacgagctgaatatcaaagaaagcagcaattttgggactcagtacggctagctcttttcacattagcaattgtagcaatcataggaattgcaattggtattgttactcattttgttgttgaggatgataagtctttctattaccttgcctcttttaaagtcacaaatatcaaatataaagaaaattatggcataagatcttcaagagagtttatagaaaggagtcatcagattgaaagaatgatgtctaggatatttcgacattcttctgtaggcggtcgatttatcaaatctcatgttatcaaattaagtccagatgaacaaggtgtggatattcttatagtgctcatatttcgatacccatctactgatagtgctgaacaaatcaagaaaaaaattgaaaaggctttatatcaaagtttgaagaccaaacaattgtctttgaccttaaacaaaccatcatttagactcacacctattgacagcaaaaagatgaggaatcttctcaacagtcgctgtggaataaggatgacatcttcaaacatgccattaccagcatcctcttctactcaaagaattgtccaaggaagggaaacagctatggaaggggaatggccatggcaggccagcctccagctcatagggtcaggccatcagtgtggagccagcctcatcagtaacacatggctgctcacagcagctcactgcttttggaaaaataaagacccaactcaatggattgctacttttggtgcaactataacaccacccgcagtgaaacgaaatgtgaggaaaattattcttcatgagaattaccatagagaaacaaatgaaaatgacattgctttggttcagctctctactggagttgagttttcaaatatagtccagagagtttgcctcccagactcatctataaagttgccacctaaaacaagtgtgttcgtcacaggatttggatccattgtagatgatggacctatacaaaatacacttcggcaagccagagtggaaaccataagcactgatgtgtgtaacagaaaggatgtgtatgatggcctgataactccaggaatgttatgtgctggattcatggaaggaaaaatagatgcatgtaagggagattctggtggacctctggtttatgataatcatgacatctggtacattgtgggtatagtaagttggggacaatcatgtgcgcttcccaaaaaacctggagtctacaccagagtaactaagtatcgagattggattgcctcaaagaccggtatgtagtgtggattgtccatgagttatacacatggcacacagagctgatactcctgcgtattttgtattgtttaaattcatttactttggattagtgcttttgctagatgtcaagaagcccttcagacccagacaaatctaatatcctgaggtggcctttacatacgtaggaccaaaccctctctaccatgagggaagaagacacagcaaatgacagacagcacctattccttactcacaagggaaactgcttgtgatacttcctaataagataaatgagtggtttccctcaattgaagacaggaacatcattttccacaggatatgaagagctgccagtaatgccaaaatcttacctcatataatacctggagcatgtgagattcttctagtgaaaaagaacagtcttccctgaagactcagggcttcaacattctagaactgataagtggaccttcagtgtgcaagaatggagaagcatgggatttgcattatgacttgaactgggcttatatctaataatacagagcactatcactaacctcaacagttgacattttaaaagtttttaaatgtatctgaacttgctgttaacacagtgttataactcaagcactagcttcaggaagcatgttgtgttgttaagaagcttttctgatttattctttaacagcatcttgccatctatatgttagtagcagttggcccagaaaggac

SEQ ID NO: 689 - DNA, 2788 bp, Homo sapiens
ttgacgttgggactcagactttttcacttccatctgcaatattagctacaagtacaatggttggggagatagcttcagcttcagcttgtgatcatgccaatccacagctttcaaatccaagtccgtttcagacacttgggctggatttagtattggaatgtgtcgctaggtaccaacccaagcagcgttcaatgtttacctttgtgtgtggacagttatttagaaggaaagaattttcttcccactttaagaatgtgcatggtgacattcatgctggactcaatggctggatggaacagaggtgccctttagcttactatggttgtacctattctcagcgtagattttgtccatcaatacaaggagcaaagattatacatgaccgccaattgaggtcatttggagttcagccatgtgtatctacagtattagtggagcctgctagaaactgtgtgttgggattacataatgaccatctaagtagtcttccttttgaggtcctgcagcatattgcaggctttctcgatggcttcagcttatgtcagctctcatgtgtatccaagttaatgagggatgtgtgtggcagcctgcttcagtctcgtggcatggtcatactgcagtgggggaaaaggaagtatccagaaggaaattcatcatggcagataaaagaaaaggtatggcgatttagtactgcattttgttctgttaatgaatggaaatttgctgacatcctaagcatggcagaccacttgaagaaatgcagttacaatgttgtcgagaaacgggaggaagcaatccctttgccatgtatgtgtgtgacacgagaactcactaaagaaggacgttcactacgctcagttttaaaacctgtactttaaaagttgtaatattactagcacatatatgcaagcacctagtataatttctttgtaatatgtgaaactttattaatgtattaaatattacaactagctaaatttattgtcactgtgtatataatgttttgaagtgacatctatttttataaagtactgtttagttggaaaaagttgccttaatgtttgaaatgtgtgaaatttttggaacttgctggacagggtgatttaatttttagctacataattttaagaattagtattttcagtggtgtgcatattttggttcttaaatttttgcttcttaaactaaaaaaatcctgaccaatttatttgttgttttctgtgggttgcgacccatgcaatcaaaaagcaaaattttgattgagattttttacagcataggtttttcatataaaaatattctgaatttgttaagcactgccataatatcattataatgtttttgtcttttagtgcttccctatacaattgttaatgcacaaatgatctctaatatatacttacatacgtaaaatcataaagtttggtaatgcagtttatcgttttaaaaataatccacaaagatgtttttatctcacatacttacaactcaacacacagagtgaccatgtgcagctttcttttttgttagatgccacatccgaagactcatcgcagtgtgttatatgacaggacaaagcaaaaacaaacaaaaagcaagcctgtgaatataatttaatttgaaactgctcctggtattatatatttgctagttatctaatgttttaaaagaaaatatacctcatttaggtttgaattgggcgtattgtgtaaatttcaaatattcagaatgcaaagggcttgactattaaatgtttgcctttgatgtttataaacattacaactatgttgttttaagacatttaaaaacgtgaaatttgttatctttgtaaaatgacaatcatgtagaaacctgtcttggttgacaatctctttgaaacatttccgagttaatttcccataggcttcaccaccaagaaagtaagaattgcatctttacataatgatcaaggtataatggaaaaatatacctattcttggagtagtttattatagttttcaaattgatttataccattattaacctgatgtggtctgcttaaaaaatgaatatatcagtatttagaaataaattgcaaaggtgggaatatatacttaaataatttgtcttaagtaaattagcatttggtagtctgaaatggtgacagattacttgttaaaattgtgaaaactctgttgtgtcctctcttcctacatttgtccctgagagtactccacgattactaggttcttgattcccttatatggcaatcaggcagaggcgttccttaagcattagagagttctgaagcttaagatttgttttggttggatgaagtccttagtacagttgaaaaacagagcattaaagactaatcaattgttttgcctcaccagtcattttaaatagtagaatacttatttctcagtgcttaaaatttctttttcaactgtgagattgaataaacagtctctatttctgtggaaaaaacaacagaaaagagatattaaataccataaaatgtaactctgccttttaaagttttgctgaagaatgtgtctgtggttaggatagcacaagcattaacttttgttttatagttatgctttttaaaattcattgtttttaaatttagacttcttatttccacactggattatgagatacttaacaatttttccaccttatatttcttttacacattttgctgttctcttttttgttattgttatgccaccataccattttgttaaaatgttttctttgtgaaacatttgttcaagttctaataaaattaatgttttccctt

SEQ ID NO: 690 - DNA, 4018 bp, Homo sapiens
ttctatcatctaaggaaaaaagacaagggaattccagtcaggcattattttcctattactagtgtttgcagaataggtgtaggactatttaagtttagaccttggtttggtagttcttgtttttaataaggggaaaaagataaaataacccctatttttcctgttattgtatttaactaatatattatttctttaaggttactcacttcccctacccctccaaataccttgcattctcaatcaaaaatggaaacaatctgagagacaggaaaagtgcaatattaccaagatggatgccagggctcattggggacaatggagggaataccagtggcgctcagagagcaagaggcagggagcggggtgctgaaggaatcctagctgtggaacaggtgggtgggttggtggagtttgatcttgtggcgttctcctctcccccttctttgggaagatgataggggtccctgccagatccacccagaagaaagggattcaggcatggggcccttgacctctaggccccagtccctggagcagaggcaggccctcgggagctgttccttgttttgatttctgttgtggtgcagccagctgctcagagagacttggcctaaaaatgactcccagcagccctctctcaccccagtgtcctgatatttgggctgtgatccttctggtgtatgtttgaatctttctaaaactgggtgccctcagttcagtttctaggcaggaagcctagaagtcaccagatctttttgggggatgtgagaaccttgagccgcgcacaccctggtgagacaccaattcccacaagcctgcagcagggcctggggctgagcctgggctgcccattcatctcagcgacttcagcctgagaagtgagccctgcctgggctccacacccagagagtccatacaaattctgctccgggaagagtcggggggtctattcaagtttctctgcagacaaaacttcccacaacaggtaccaatctggcctccttcctcagcaccggtagagaaagcaacagaatgggaagtttcctctgggttggagcctcagagctctgcccctcaaggtgacagggacgtccctgtggcttgttccctccacctccagtactgtatgcttgctacttcaaccccctatttggtgaatttctgcacagacacagatctctgtgcctggaatgggactgtgccctgtgcgggtctctcccttggcgtatatccatctagatatttagtctttgagaatctcaaagcagagctctctgggaagagaactgtccacattgctaaataattaagattccctcacttttttgagggccatgtgttgagtgagagagagagagagagagagagagagagagagagagagagtgtgtgtgtgtgtgtgtgtctgtgtgtgtgtctgtgtatgcaagtgttggtaacttcccacttgaactaaataacatggggttagagaaaaaaaaataccaggcaagctgtctccattgaacaagtccttggcaatgggcaggtcccaagggactcacagcttctggcagcaagtgtgtcattcacacacatcattctggctggagagtgcaatgtgtcatttttttttctttttgtaattattttattaagtatttagttggaaatttcacactggcattaacaggtctagcataagtggcctaggcagtcatcccaggctccaaaatgaagatgtgcaaaagagatgccactgggaatagaaacactgagttggttcagttaggtcatcccctgcagacgtgtcatcgagcaggctgactcccacccctcagccatgccatgggtatgagaagccccttataatgaaagctgccagccctttcgtccttgtttcagagggtgggtcaggtggttggggtgagaacttgctcacggtgcacccaacaagacctgcaggtgcatataagtttagtcccaactgcagggccagaccaaacacttcctgggaagtgtgtggagggctgtgctagaccttcctgagtttctggctaaatcatcagccctgtttggtgcagtctcatgtctctgtggttcccaagctgcatgatcagagccagtgagaagacaggatcagtgacccacagctttggggaaaaacagccccactgttaacttccctcctgcaaacctgggtccccaggccataaggtgggcacactggtgcttacagactgggtggagagccctaccttccaaggtcttgatcccagcctgcctataaggttgggattagcatgcaatcccccttccccaatcctgtctttttaaaatctcaagtttgcacttaaccttgacaacagcaccctctcctactccagtcctagaactcagtggccttagagaatggggtcccctgcactgaaggtccccgccttgctcccagttccatcctggccaataggctgcgcctcaagaggtgaaagagaaaaaagggagggagggaggaagaattatttagaacaaaaggatggctcgagcacgttagaggcaagtgagaggcacgctggtgagaagagcatgtgcatgtttggggtagctggggcctactgtcccttcattagggaaggaggcttccagaagcggatgtcttctagaaagaaaaattgtgtgaaggctgaaaaggggcttggagttttgtctttgttgattagaaagaaggaagaagtcagctctgagtgtttcaggaagaagagagcaggtagaaagggaatttagtgatttaacacccaagggtccagccatagcaggttggaaaatcctccaaatttggccacagaagctggctaggaaaaaactgccactcattgggccacacgctgggtccccatcagttctcaatgaatggtcattgatttacttagcagagagaagtcaccagccacaaaccaatctttgagtttgcaggccctgattccagaatatatgcatccagctcccgggttctcagctggttttgcccacttccctttgactgtccaatccaaagccagtctctcaagttgtatggctcaaagagcagtgaccacaatgggtcatacagtagggacccacctccacaaattagaaccagagttcagactccattgggcacatctgggaggaaggcaacctcctttgtcgtcttgttggtaccagtcattctcaagtatctctgacacctgtggtggttcagtttgctgagcctgccacctggtatgaattagactgggtgtgatgaacattcatccatggatataccctaccattttgcgttgccttataaccaaggcacactccccataagagtttactgcagagaaagaacagcaaaacagccaccctccttgaatttacaactcattatctgcaacaggttttctttaaatccaagacacaggatgggaaatgggtttccccaccaggtactcagaggtctgcaggaagtgactcccgggcaaggcagacttcagtaatccctgaagcgtgagcatgtggactgcatggctgggtggggactggtggatgtctctggagctccagaaccttggagaattcctcatggaattcccctcccagctcttagtgggctctgtggggtcaggaggagcccttcctccaggttttccttctttcctcctcagcagagaaactggagaaaggacattaaactcagtgcagtcgatttgagtgctgaaatatttccagaatcaatggtggtgctaaactatctccatgtttctagcatttttaatagtggagttggtttgtttttaatctcatcacaaaaatgcagtgcccttggggaagggaccagccccttggcctgccactttccaggtgtcctttatcactttgacgggactctttggtctgcagaaaatgctctgtcttggcatgcttctagactgtaagatttgggttttgttttgtattttatgtttacatgcatcttatatttccctgaaaactaaataaagttttgggccttttt

SEQ ID NO: 691 - DNA, 2958 bp, Homo sapiens
cagtaagatgtgggaggcactggcctgagtgatcccttttcaagcaaagccccatctcgccgtgctcacaggactactgtcataggaacatggatggtttgttcttccatttttgtggagctcggggatggggggatgtgtctgctgtcagggaggtgccatggtaagttgacagggcctgatattagtgaaactacactgggatagcatcagccatttaaagtaataatggtaagacacagcggtggtggtggtttggtttatatttatgaccttttaaaagtgtttggcattttcagggaggtttgttttttgttttgttttttgaggctcatgttgcccaggctggagtgcaatggtgcagttctcggctcactgcaacctccgcctcctgggttcaggggattctcctgcctcagcttcccaggtagctgggattacaggtgcatgccaccatgcccagctaatttttgtatttttagtagagacgggatttcaccatgttggccaggctggtctcatactcctgacctcagatgatccgcccccctcagccttccaaagtgctggggattacaggcatgagccactgcacctggccaggagagtttttttctgataatagaagtaatactttctcactttagaaaatgtgaaaagttcagatatataaggaagtcaaacaaaacgtctcctatatatgaagaagaaaagaagcaagtttaaaaaaaaagaaaaaaaaaggtcttctatcgtttctccactcaaagacagctgttaacattttattgacttctatggagtttgccctatgcttctgttttatgtaatagagacagtgctgtagtgaatagcttcacgtcaaaatttttctatgattttctgaagttagagtcttaattattggatcaaaggaagtgaacatttttaaacctcttgatacatatattaccaaattgttttcttttccgttttttttaataaatagagatgggggtctctctgtgttgcccaggctggtcttgacctcctggcctcaagcaatcctcttccctccacctcccgagtagctaagattataggtgtgagccaccatgctcagccgctgattttaacttgtatgttttaaacaaaatttctagtaaagtagaacatttctttgatatgtttgtgtcaggatttgactctcccaggtctttggagaggctttctaacaagacatcccccgtgggtggccatctgccctgtgagaaggtcatttctagttccaggtcacgcacagtgtgtcagctggtggggtgtggagtttcaggcccaggcctcctggaaagtgcccgaaagagaaacggcttagaaaataaggactttaacggtggtgtgggttgagtttggaaagtttagaccatgttagtggaatcagagctgggaagaggttctagaagttacctcctctcactggtttccagtccacacttctcagaactctcccattttgcagtcaggtgcagtggctcacatctgtaatcctagcacttggggagaccgaggtgggcagatcacttgaggccaggagtttgagaccagccctggccagcatggcgaaaccccgtttctactgaagatacaaaaattagccgggtgtggtgtggtgcacacctgtggttccggctactcgggaggctgaggcatgggaatcgcttgagcctgggaggcggaggttgcagtgggccggggtcgcgccactgcactccagcctgtgtgatggaaggagactctgtctcaaagaaaagaactcacctattttgcaaaggagcttcatggttctcttgaagaaaaatgggaatggaggccacctctgtgtcaaaaacaacatcccacatttctgtgtttcacttttttttttttttttttgagactgagtttcactcttattgcccaggctggagtgcagtggcgcgatctcggctcgctgcagcctccgcctcccgggttcgggcggttctcctgcctcagcctccctagtgggtgagattacaggcatgtgccaccacgcccggcgaattttgtatttttagtagagatggggtttctccatgttggtcaggctggtctcaaactcccgacctcaggtgatccgtgcctggcctacttttttttttctttttcttttctttctttcttttcttttttttttttaagagatagggtcttgctatgttgcccagactggtctcgaacgcctggcctcaggtggtcctcccaccttggcctcccaagacgctgagattacaggtgtgagccaccacgcttggcctgttttacatgttgacggacagcatataatcacatgtataagggtttctgcttgtaaaagtctggaaacccattctaactgccagaatcacagaacctagagaaggggacataactgccctgtggccacccagtagctttcatcttctctcgcgacggcagaggcaggacagccagcattctggtgaggattgaaggattagttgtaacagatttcagcaggtctgcagtgatcagatgggtttctcacatattgttaagttgaaagtagccgtggctcagtatgagttgagtacctgtttaaaatctgcattcaaagccttcttcccagaggccacaactgcagtgagatccaagtgtgtggctcacccgccccggggctcacagctgggcagggtgatttccactcaaattcttgtgccagtgcagatcttgttctaaagcttttctaaatgcctggagactagaaagacttttggatacttttccctttttcttttggatgaaattgcatctccagtagaacagcagcattccatggtgcctcagccacgatcctctggacagagatttgtggcgaagacctgacgagagactgtaaaggaaaagcagggtttgtttttcctggtcaaagttgttaatact

SEQ ID NO: 692 - DNA, 2604 bp, Homo sapiens
ccccatggagttctacccctgctcctctggtcaccctcctgatggatccccatggtgccaggcaggaatggcctgctaggagatgcagtgagcccccaggacctctccactgcctcctccacccctgtatttcacttggctctccaaattgactcaactccagaccataaagaagatggagaggcacatggtcaggggacaattgtataagcattttgatttggagaggaagaatgccaagcaggctgaagccagactggaccaaagactgcagagactaaaggttatttgcctctaccatgtgaaattgctgacctgggagcagaggcagctccaaaaagaactgcagaggttgcagcaagaaaccatgaagaaaaagttctcctcttatttggggaatggatttcagaagagaccagaagatgttctcgtgttctcaccacagggaaggcagaagcacagagccccacaggctaagaaaatgagagcattggcaacccgtatggcccaagacacatgcaaaagcaagtcccaggtgcctccttcacatgatgctggcctcaaagaccccatgaagagcaaaaagcagccactctctcaaaataacagaactgcctgcttcataaaagagcaaccacaagcccaagagaaagattctgtgaatccatctaaggacgtagaccccagcaagggcatctctgttccatgccaaaatcaagaggtttccaccaacaccatagaacaaggtcctagttccagcccagcctctggccttcaatggggagacaatactttatagtgaaaggaacacaagaaatctgcttcctccaacactttcttccatgaagcaaagcaacagaggaaggcaggccataagtgacagaactgattgattcacaaaaacttaatttatttgcaccagccatgcctgggccaacatgaataggcatacaacaattagagaacccctttgtaaactgcgcaagctctttcctaaaagttctttcttcttgtcttctacgcaagccttgcctatcgtcatcacaattctccctcaaggctgagtcctgagtgaatggtttgtcactgctaagtgggtcttttcactgtactagctctcacagcgggaaggggccatcacaaggcaggagggagccaacttcagcctagttctctgttccaggtccacctcaatcctgccatctacagaagtgaacattctgcatgttcctccttgctatcttgcttgtgtcttcatatacatctgacagacccagatctgtctgcacttctaaaatcaatattttagtacatcctgttttaaataatattccatgcatcgccaaaaaattatacatttaaaaatcttctaaccacctagattttatcttcttatcatttagtctaatacatttgccttcttcgatacaatggatgtaatactctgattagtacaacttaactcaatcaaagagaacgctgctgcatggaacctttcttgtgtaactcattaaattctaaacagtttaaatccttaatcctgacgtggcacacggtgctctaggatggcttgctctcgaccagtccatggccactttacttataccagtggttctcagctaggagcaaatgtgccccctgtccccagaaaacatccagcactgtccagagatatttctggttgtcataactgaggtgagggggctgccactggagtctagtaggtagggaccataaattctataatacatggggcagccctctaaaacaaagaattaacaagcccgaaacatcaatagcgccaagattggaaactccaccctgtgccattacattaaatattcacagaaccttctgagacagaaaatcagggagatacttgctgccattttacagataaagaaattgaggctcatgataagtaaaatagctttctccataccagaatgtggatgaggaacaaagaccagggtactcttttcccatactctcctctcaaagaagatggggaagggcatgtgtccgatggctcctgccctcgttttcagttaagaaatgctttcaaccctcaaatacaaatctttaacattcaaattagtaacacatggttagaagggataatttatacttcaattttgaggaaacattttttattacattcattcattcattcattcattcagagatgtactggggacagatgatcccttccccatttcctcccccatgaggaagaaggggcttttgacttgttgccttaactcattcaatgggaaaagattccatttttcacctacaggcagaggcagctggaaactcccagaagtagaggctcagtctctctggaggctactgaagagcaccctgaagggtgtcacaatcctcagtgttgggggaaagttgggtaagtttttaccatgaacactggagggaccagctcctctcagggtgaaatgagccttgaaggaaggacagagggaatcacgcttgggcaagtgttttgccctcacaccaagagtaccagggaagcagagggtaccagtccaaacagatgtcagcagctctatctcaccaatgacagccagaatagcaagcaaccactgc

SEQ ID NO: 693 - DNA, 3275 bp, Homo sapiens
ctagagagggactcagatgagagcctgtgagcttccagcacttccagtagcttctgggaagcatgtttccgtcctgaggggggttctggccagtgcagtgtccgctacaggagacttgctcatttatggtttacaacacttaaggtttctcttagcaccaacaagagagtgctttcaccttagcttctatagagtgaggagggagaactagctaataaaaacagtgataatagtagctgccattgagtgcttactccatgtccttatgcagattgctttatatatctgatctcttttaatcctcatttaagtcttcattaatcccctcataatccattttgcagatgaggaagttgaggctcagaaagtccagaccctgtagccagaactaagatacaaaacaagatcttgctccaaaggctgtatccttagccacatgttatattcacctggggagctttaaaaacacatacacagtgtgcaggtcccaccacagatgagtttatcagttcctggcatcagctctacttcctagccatcgccccctaattctccaacgcaaggcgaggctcagagccctccagggtggctcagctggccccagagggcagcaggtgggcctttcttagcctatggacccttacaactctccaaacagagtaagggcccagagaaggacctagctgcaaaattgattccatgccattcccccacccgactcctgcatatcctgcttgctgtcctcacctgctaggttcttggtggcctcctgcatggagtcccccaatttgcttccctctgccctgtaccctctccctggctttgctggtcctggccaagtggggccacaggagcccgagccccctgtgagacccactactgcccagcctcttactgtgcttgcatttcaggcagtggcttccaagggacaaagtcctgcccttgggtgtggaagacaccgtggacaagctcaagatgctggaaggccgcaagaccagcatccgcaagtcagtgcaggtggcctatgaccgtgcgatgatccacctgagcagagtccgggggccccactccttcgtcacttccagctacctgtaagggcagggctgggcctgcatccgcttgccctgcctccatcccgcagggcacagagaagcctcttctgcccctgccagatgtatggccggcagcttccccctctcatggtaggccagggactgggctttctccccactaagggcaaggccccagttttgaccaatcgcatggttctcctggcaggcctgctctgtgccaaaaactcccacccaaggtccctcaggggatatttcactgaagaaccagttagaagtagaaacagctgtggggcttgggcccagcttaggagattgcccagatggcaagaggtcctgggctccttcttgaggggctgcctggcccgctccatcctactcccactaactacacctcagggcgggtgaggttccgacactgatcccagagatgccgtggatacgccagggtcccagggggaatctccccaagctcacactctctcccgcttatcgcctattctcacacctcttctcggtcccatcttctgcacccattgcccagtcttgctttctctttcccatattccttttctttttctcttgtgccaaactgacagaaaccgtcaccacactggtctttttctttaatgtctcattccccttgaggccagctgctatgccaggtggtgtctctgccaggctcctcaggcccagacagaggccagcccacaacctatgaccccctcccccaggacaccacctcccacccacagaccttccctttagctgttgacacaacttcccagctctgcaagtgtgccccctggatcaaggcgggtcccctcttgtttttttctttgctgccacgaggtggtccaagccttcagggtgggctcctatcaggctgggtgtgcgagtgtccatctgtccacatggatgtcgagggtggtttgtgtggagctgtgctcgtcagctgggtctgccctcttcccccttttctccttcttctctcctcatggactttttctgcaattgcagtcttaagcttcactctccaccacctggatggcatggcgcctgccaccaaacatcttcctggcctgcgctctgccctgccctgcctagcctctgctactcccacttcccaactccagggaatgcattacttttatttcaaaccctctgcctccttccttctttctcttcaaccccctccccaccttcaccttctcaaaaatggaaggaaaaaaaaactgtgaatggggaatgctgactgacaaaccaacacaactttcagaggcttcagtgtctgttctctggacatttcttttcacctcctgagcaccaaagtcgcagggccagttgcaggccgctgattgccatgttgatttttaacctgatattctttttaattgttttaaatttttcataggggagttttggacaaaacagtcactggggagatcactgccatttttacacacttgactttttaaaaatacaaccaaccaaccaccacaacttcttatacatttgggacatgagccagagtttaaaagggaaccaacaaaacactataacttaaaaggatggggttttggattttgtataataataaaaacaatacagcatatggctagggaaggacatggtgtatataattgtaaaatactgttctaaattattcaggcctatagtttccattactggagtcctccattgtgtggccacacagtgtcgttgatttaaaggagccagtgcttcccctctccccaggtagttggtcagctgtggactctgtgacctttgtctaaacctgtgttgtaagatcttgggacttcctctctttctatgtctatctcttccccccaacactttctcttcttagtctctctctttatttttcaatctctgaatattttagtctctctctgagtctcattttttaaaatgctcttttagaacgggaaacggctcagatcctgctgtggcacggggcctatgtgtctctgtcgcgtctgctgtgaagcacatgatgctctatttattgtagagagtgactttatttgctttctagaattgtttataacagatggtataagagaggtaataaacagagaaaaatctatgcttgtaaagaatacaaaagttaattttacctactataatatgactgtctgaaacttattttctctctgagaaataaatgttctaatgggcagt

SEQ ID NO: 694 - DNA, 2867 bp, Homo sapiens
ctgtccccgccccgctttcccagcaggacgcagccgcctggcgtgcggagagcggcctgtcgcgcgctgggcgcggggactcagggtcccagcagtgggtcgcgcacctgagctatctccatcctcggagaccgacgagctctcagtgtcctcgtcctcggagctgctcccctcattttcggcgtagtccacctccatctcatcgtgatggttggtctccttcttatcccctcgggaatggactggcattttccagccgcgccgtcgctttccactaccggcgcccagcccggccaccgccgcttcaatgaagggcgcgcggaacgccccaacccacccagccaccgagcttgctcgcccccttggctcctccccgcccccggcccgggcctcacaacctaacccgcaggctctgcgatgggagctctgccattggcggaggccttccaccgagccagagggcgggggcttgccctgctctggtacgattggttgcccgcaattacgacgcggccttccgatgcttgccgggagttgtagttcgtaggtctcagacctgcaggggctgcacgcttccatccctcggcagccctgatcacttcttccttctggacttcaagtcccacaaggcacgaaagctgacactctggatcgcagtttataaactaaacagaaacagattgtgcgaatttagtctgtatttatctatttcccgccaagtgattgtttgacctgcctgaccatcagagatgttactgttagatgtgaaaatgtcttttgcctaaaaggatctttgcctgctcattgagcctggggaactggagaaccatctgttttactaagcacctttattacctaccattaataaactgttttatttaattattaactatagacgataacttgcactttctgtgttgtgcaaaaatctttaaattattcttgaaacttttacaatacagaaggtaaggaagttttatcttggcattttcaatctaatatttttggcatttattttttaccaaatgcagtcggaaaatgccatcagtcctgatttaactttagttttcaatgaaaaatacatacttaaccagatgtactttctcaaaaaaagggtacatagctccctctccctctccctcgccctcgccctcgccctcgccctctccacgggctccctctccctctctttccacggtctcccactgatgccgagccgaagctggactgtactgctgccatctcggctcactgcaacctccctgcctgattctcctgcctcagcctgccgagtgcctgcgattgcaggcgcgtgccgccacgcctgactggttttcgtatttttttggtggagacggtttcgctgtgttggccgggctggtctccagctcctaaccgcgaatgatccgccagccccgacctcccgaggtgccgggattgcagacggagtctcgttcactcagtgctcaatggtgcccaggctggagtgcagtggcgtgatctcggctcgctacaaccacctcccagccgcctgccttggcctcccaaagagccgagattgcagcctctgcccggccgccaccccgtctgggaagtgaggagcgtctctgcctggccgcccatcgtctgggatgtgaggagcccctctacctggctgcccagtctggaaagtgaggagcgtctctgcccggccgccatcccatctaggaagtgaggagcgtctctgcctggcagcccatcgtctgggatgtggggagcacctctgccccgccgccccgtctgggatgtgaggagcgcctctgcccagccgcgaccccgtctgggaggtgaggagcgtctctgcccggccaccccgtctgagaagtgaggagaccctctgcccggcaaccgccccgtctgagaagtgaggagcccctccgcccggcagccgccccgtctgagaagaacatctggtggaaccccatgatggcggtcttcatccgccttaagctggcccacaaccatgctgatgatgcagctatgcggcgtgagctgatggtcctgcgcggtgatgctgtgctggattttctggaaccgaaggctagacaacttctccacaatggcagctttcccctggaactgttgtccttcccacgtaaggcatgatgcgtcaatgtaaattgcgcctagttggggtctatcgttatcaaataactggtagtaatgtggaatgaagctggatcctatctgctcccaaattggcttgtctcccactctggaccgtcagccggcctcgcggagacccgaggggctggcacgatggctgcagcggcggcggcaacccagcacggtctcaaaatgctcatatttttaagtggtctcatgcattacgtatgctacaacttgactttctccttagtgacgtttttgagatttacccattgtgattcaggtagctctcatccagttatttttacctgccataacatgttccatttagtaaatatattctattgaatgaatattacagtttacccatttacctattaatggacagggaggctgctcccaattttttcactattaaaaacatttgtctcagacccagcacagtggcttacgcctgtagtgccagcactttggcaggctgaggcaggcggatcgcttgagattgggagttggagaccagcctgggcaacatggcgaaaccccgtctcaacaaaaaatacaaaaattagctgggcgtggtggtgcgtgcctgtagtcccaactacttgggaggttgaggtaggaggatggcttgagcctgggaggtccaggcttcagtgagctgtgattgtgccacttcactccagcctgggtgacagacagagtaagcccctgtcttt

SEQ ID NO: 695 - DNA, 2946 bp, Homo sapiens
aggccataccagtgtgctgcacagctatccagagagcgttggacgagaggtggcaaatgctgtagtccgtcctcttgggcaggtgttaggtaccccttcagtggctggtagtgagaatttgttaaaaactgacaaagaagtaaaatggaccatggaagtaatttgctatggactgacccttccattggatggagagactgtaaaatattgcgttgatgtatatacagactggattatggctttagtgttgccaaaagattctattccattgccagttattaaagagcctaatcaatatgttcaaactatactaaaacacctacagaatctttttgtaccaagacaggaacagggttccagtcagattcgactatgcttacaggtcctgagagccattcagaaactggcccgtgagtcatctctcatggcccgagaaacttgggaagtcttactgttgtttcttctgcagattaacgacatacttctggccccaccaactgttcaaggtggcattgctgagaatctagcagagaagttgattggtgttctctttgaggtgtggttactagcttgtactcggtgcttcccaacacctccttattggaaaacagccaaggagatggtggctaactggaggcatcacccagcagtggtggagcagtggagcaaggtcatttgtgcactcacttccagattgctacgctttacatatggtccttcatttcctgcatttaaagttcccgatgaagatgccagtctgatccctccagaaatggataatgagtgtgttgcacagacatggtttcgctttttacacatgttaagtaatcctgtggatttgagtaacccagctattataagctctactcccaaatttcaggaacagttcttgaatgtgagcggaatgccgcaagaattgaatcagtatccctgccttaaacatctgcctcaaatattttttcgtgccatgcgtggaatcagctgtctggtggatgcattcttaggtatttctagaccccgatcagacagtgctcccccaacacccgtgaatagattaagtatgcctcaaagtgctgctgtcagtaccacccccccacataaccggaggcaccgggctgttactgtgaataaggccaccatgaagacaagcacagttagtactgctcatgcctctaaagttcagcaccagacgtcctccacctcacctctgtcaagtccaaatcagactagttcagaaccccggccactgcctgcccctcggagaccaaaggttaacagcatcttgaatctctttggatcatggttatttgatgcagcatttgttcactgtaaacttcataatgggataaacagagacagcagcatgactgccattacaacacaagctagcatggagtttcgacggaaagggtcacaaatgtccacagacaccatggtttccaatcctatgtttgatgcaagtgaatttcctgataactatgaagcaggaagagctgaggcttgtgggacactgtgtaggattttttgtagcaagaagactggagaagagattctgccagcttatttatccagattttacatgcttttaattcaaggtttgcagataaatgattatgtgtgccatcctgtcttggccagcgttattctaaactctcctcctttgttctgctgtgacttgaaagggattgatgttgtggttccttactttatttcagctcttgaaaccattttgcctgacagagaactctcaaaattcaaaagctatgtaaatccaacagaattgcgaagatcctccattaatatcctgctttctttgttgcccctccctcatcattttggcacagtcaaatctgaggtggtcctggaaggaaagtttagtaacgatgacagctcttcttatgataaaccaataacttttctgtccctgaagttgagacttgtgaatatattaataggtgccttgcaaactgaaacggaccccaacaacacccaaatgatattaggggcaatgttaaatattgttcaagattcagcacttttggaagccattggttgccagatggagatgggtggtggagaaaataacctgaagagtcatagtcgcaccaatagtggtattagttcagcaagtggtggaagcacggagcccacgactcccgatagtgagagacctgctcaagctctcttaagagattatgctcttaatacagattcagctgctgggctcctgattcgcagcattcatctcgtcacccaaagactcaactcccagtggcgccaagacatgagcatatcactggcagctctagagctcctctctggccttgcaaaggtaaaagtgatggttgactcaggagaccggaagcgagccatcagttctgtgtgcacctacattgtttatcagtgtagtcggccagctcctttacactccagggatctgcactccatgatagtggcagcttttcagtgtctctgtgtctggctgacagagcaccctgatatgcttgatgaaaaggactgccttaaggaagtactggagattgtggaactgggtatctcaggaagtaagtccaagaacaatgagcaagaggtcaagtacaaaggagataaggagccaaaccctgcatctatgagggtaaaggatgctgctgaagccaccctaacatgcattatgcagttgctcggcgcatttccttcacctagtggtcctgcctctccttgtagtcttgtgaatgagaccactttgattaaatactccaggctgccaaccataaacaagcagctggagccagagttttatacttcacttttccaggaggttggactcaagaactgcagttcttagaccactgaatttctaagactgttgaactccagtttgggaactataacacagcagaacagtttgataggtggtcactgtaaaaataaaaacaaatcactccc

SEQ ID NO: 696 - DNA, 3126 bp, Homo sapiens
tcatctaaaggtaaaaaactcactgttaagagtaagtacacagaaaaacccaaagtgtgataacattgtaactgtggtgtgtaagtagaaagaataaatgataaaccaatcaaaaatagtaactacaacttttcaagaccagtcagaaaaataagataaaattagaaacaacaaaaagttaaaaagtggggggatgaagttaagatgtagagtttttattagttttttgtttgttaatgcaaacagtgttaccaggttaaaataatgggttacaaaatagtatttgtaatccttatggtaacctcaaacctaaaaacatacactggatacataaaaaataaaaagcaaaaacctaaatcatatcaccagagcaaactaccttccctaaaggaagacaggaagaaaagaaagaagaagaccacaaaacaaccagaaaacaaataaataacaaggcaggagtaagtctttacttatcgataatacattgaatggcaatatggactaaactctccaatcaaaagacatagactggctgaatgaatggagaaaacaagacccattgatctgttgcctacaagaaacacacttaaactataaagacacacataggctgaaagtaaagagttggaaagagttattccatgccaatggaaaccaggaaaaagagaaggagtattgattttgatacaaaaactatgagacaaataaagtcactatacaatgataaaggggttaatatggtttccatttgtgccccacccaaatttcgtgttctattgtaatcctcaatgttggaggtggggcctggtgggacgtgattggatcatgggggtggatctttcatgactaattcagcaccatcttcttagtgctgttctcatgatagtgagttcttctgaaatctggttgcttaaaagtgtgtagcacctctccacaccacccgcttgccttggtctactcctgctatgtagatgcttgctcccactttgcattattccatgagtaaaagctccctcaggccttcccagaatcagatgccgctatgcttcctgaacagcctgtggaactatgagccaattcaacctcttttcttcataaattaacaagtcttgggtatttctttatagcagtgtgagaacagaataatacagaaaattggtaaagaggagtgaggcattgctagaaagatacctgaaaatgtggaaacagcagtggaactgggaaatagacagaggttggaagagtgtggagggctccgaagataggaagatgaggggaagtttggaatttcttagagatttgttaaattgttttgaccaaaatactgatagtgatatggacaatgaagtccaggctgaggaggtctcagatggagatgagggacttattgggacctggagtgaaggtcacttttgttaggacattgtggttggagacattgtgcccctgccctaggaatctgtggaactttgaacttgagagcgaagatttagggtatctggcagaagaaatttctaagcagcaaagcgttcaagacgtggcctggctgcttctggtagtctgtgctcatatttgtgagcaaagacatgacaagaaactggaacttatatttaaaaaggaagcagagtgtaaaagtttggagaatttgcagcctggccatgttgtagaaaagaaaaaaaccattttctggagaggaattcaagctagctgcagaaaattgcaagtaacaaggagcaaaatgttgatagccaagatagtgggaaaaacaccttgaaggcatttcagataccttgggggcagcctctcccatcacaggcccaaaggcctaggagggaaggatggtttcctgggccaggctcagggtcctgctgccctgcacaacctcaggaaactgctctccaaatcccagctgctccagctccagcttcagctcaaagggccccaggtatagctcaggctgctgctccataggatgcaagttataagcctattggtggctcccgtgtggtgttaaattaagcctgtaggtgcacagagtgcaagaattgaggcttgggagcctccaactagatttcagagtatgtgtgggaaagcctggatgtccaggcagaagccagctgcagggacagagccctcatggagaacctctactagggtagtgtggaggggaaatttggggttggagttcccacacagcttcccctctggtgtactgcctagtggagctgtgagaagacagccactgtcctccagattccaggatgatagatctgccaatgacagcttgcactgtacaactggaaaagccacaggcagtcaatgccagtccgtgaaagcagtgacagtggcttaccctgcaaagtcccaggggctgagctgcccaaggccttgggagcccaccccttgcaccagtgtgccctggatgtgagatatggagtcaaaggagactattttggagctttaagatttaatgactacctgctgggtttcagacttgcatgggtccagtagcccctttcctttggccaatttctcacttttggaatgggagtgtttacccaattcctgtacccccactgtatgttggaagtaactaactgtttttttattttgtaagctcacaggtgggagagacttgccttgtctcaggttgagactctggactttggacttttgaattaatgctggaatgagttaagactttgagggactgttgggaagatataactgtattttgcagtatgagaaggacatgagatttgggagacaccagaggtggaataatatgatttggatctgcatccccaccaaaatctcatgttcaattgtaatcctaaattttggaggttgagcctggtggaagaggattggataatgggggtggtttctcatggtttaacaccatccccctgggtgctgttctcatgacagtgagtgagttattgtgagatctgattgtttaaaagtgtgtgccacctcctcccactttcctcctgctccagccatgtaagacaggcttgcctccccttcaccttttgtcatgattgtaagtgttctgaggcctccccagccatgcttcctgtacagcctgcagaactgtgagccaattaaacctcttttctctat

SEQ ID NO: 697 - DNA, 2718 bp, Homo sapiens
aaagtaattttctgaagggaagctgcagaatatggaaaacatatattggagctacatggatcatgtcaagttcagactgtaaggagtagatgcagtagtgaagctgtccatctcaggtgaattgaaaaagtaaagaactacaaaatgccatcattccctctctgtgttgatttctggtgaagctcagaggatgagtaagagatacttacagaaagcaacaaaaggaaaactgctaataataatatttattgtaaccttgtgggggaaagttgtatccagtgcaaaccatcataaagctcaccatgttaaaacgggaacttgtgaggtggtggcactccacagatgctgtaataagaacaagatagaagaacggtcacaaacagtcaagtgctcctgcttccctgggcaggtggcaggcaccacgcgagctgctccatcatgtgtggatgcttcaatagtggaacagaaatggtggtgccatatgcagccatgtctagagggagaagaatgtaaagttcttccggatcggaaaggatggagctgttcctctgggaataaagtcaaaacaactagggtaacccattaacccaggagaaatcaagtgatcctcaaggctgatgacattgaacatgcgcatagaaacttaactcaactcctgaggtgatcttgaagatttttataccacttgaaagaggcgctcaatagtctatttccaagggatttcatggcctcttcttgaaatcaagactttttaaaagtcagacatgaacttgcatgtcatgaagatttcagcagatttgaactgtgttcaacttgtaaattgttaaaagaatttgaagtcactgtctgaggagctggtgaagagttgtttttctcagggtgatgttagagacagtccccttttgagttattggctccagatgtgactacttttcttgtttctgcaagctgtatcccaagtgcactgtccttctgtcctggatgtgttcctgggtcctatgttcatttgctagtgggactacacatggctttaatgacatttcctttgagaacttttcctctggcatggtgtagactgagacaattttatttatatcctaatcttggagctcagaaagcctacatgttttaacatcttaaagttgcttttgttaaaggaatggaaatatatatccattggtaataatgttggcaagtaatagttatctgaataaatcaatcatataagaatgtatagacaagctgacatatttccctaaggctaacaacaccctgccgaagctctttgtcaaataggtagtagttagaactggattgccattttcattatataatactttgtacctctagagcactctccctttctgtttttttttaagtgagcttttctttaattttttatgtttacttattcccttcacagaaatcagcagtgagcagtcaagttaatgggtagccttcagtttcaaaaaaattgacagggatgcatgtgagtttctgatttcttagcttgaacattattcacttagatttcttccagtattttttaaaaaactgtcctatctcattttaaaagactttcttttgcttgatcccaatgactgtttgaatgcttatatatttgttcaatctgttgatagaaaaaattgttcattttcctcagtctcaaatttataaatatttgcttacagttttcctattcaaacaatttgttaggccaatattttgtgacatttttgtagcgattttaacgtttatggttttggttctacaggaaagtcataaatatttaaaggccttaaacatgtatgtactttttttttctaagttatagaatgtataattttgtactacatttattttgtttcatttgtgatatgaagggagagaagaaagaaaagtgcatagccattctgtaacaatattgtgtaaacctatagtttgaaggaatgcaaggagaaggatttctgtgttttactcattttaggctgttcagaagatgcttcaaaaattgtcctgttagaatttccatcatgggaggtggtatggaagaaggtatggaaatactttgtatcctaaaaactcactgacgtggtcagttagacatacgttggtttccaggatggaggcccatatatcctggggagctttggtctattagtttgtgacaatattcaaaggccaaaacactactcagacactttcctgggaagagcaactaaaaatgtaaaattggttaaaaataaaatctgaaaagtatgtatctcacattgaactaaaatccactgtctcataagttcatggaatgaaatggctttctgcctccattttaatcatgcataaaatgaattagatggctttgagtggattttcacaatggctcaagactatatgaaattataaaaaaaaagttgccctggggtttctgcatcaattagaatatcattaatttctttgtaaccaagtgaaaaactatactttttggaaattatgaatttgtcctaggtttgtttgagatttgaaattatacatcatgcttctcattttttaaactatgttctttaaatcaacactggaaactctgtattatatacaagtgtaatacatgcatataatagaaaaaaaacatggaatttcaaatatactaactagattatccccagtagattaatgttgtgactattcagaaaaggtgaataaaattgggatataaaatgg

SEQ ID NO: 698 - DNA, 2852 bp, Homo sapiens
gcggagcgcgggaggccagttgggaggcgcacatccggcggttacccggtgcttcataaagccgctttcgccgctggctgtcgccgcgttttgcctccgcagcagctctgggctcttctcagctgcgcgagcagctgctccaatgccccggagtggccatgggcgccccgcactggtgggaccagctgcaggctggtagctcggaggtggactggtgcgaggacaactacaccatcgtgcctgctatcgccgagttctacaacacgatcagcaatgtcttatttttcattttaccgcccatctgcatgtgcttgtttcgtcagtatgcaacatgcttcaacagtggcatctacttaatctggactcttttggttgtagtgggaattggatccgtctacttccatgcaacccttagtttcttgggtcagatgcttgatgaacttgcagtcctttgggttctgatgtgtgctttggccatgtggttccccagaaggtatctaccaaagatctttcggaatgaccggggtaggttcaaggtggtggtcagtgtcctgtctgcggttacgacgtgcccggcatttgtcaagcctgccatcaacaacatctctctgatgaccctgggagttccttgcactgcactgctcatcgcagagctaaagaggtgtgacaacatgcgtgtgtttaagctgggcctcttctcgggcctctggtggaccctggccctgttctgctggatcagtgaccgagctttctgcgagctgctgtcatccttcaacttcccctacctgcactgcatgtggcacatcctcatctgccttgctgcctacctgggctgtgtatgctttgcctactttgatgctgcctcagagattcctgagcaaggccctgtcatcaagttctggcccaatgagaaatgggccttcattggtgtcccctatgtgtccctcctgtgtgccaacaagaaatcatcagtcaagatcacgtgatggcaagatggtggctggcttctctgcttatcgcccctcatgcagtgggcttcctttgctaggaagacagccaagggagttcgaatagttggggtgtgggctatcttttcaaaaatctatttgctggggctcttaatttctttagtgttctttgtatgtagggatttaaactttgtcatatggtacaaatattccctgcccccctgcagtttcccatttgtctttcagtatgttaatatttttgtgccatactggttttaaactttcatgttgtcacatctgttaatcttttctttaggatttctggattttgtgtaatttttaaaaaggtctcctcctcctccctaatgtgtctgtggaccacctggattccactgtacaaggggaaaagtgtctattcctttcccaaagatggaaaatggagggcttagggacactagatgcatctttctcagcatcacttccagatgcagtgacttgttgggctgcgtccttaatggccatggcagagcagtcccttgggggatccagccctgtacaatgcatctcttcctggagaaagctggcctgctccagaccccaccattcccaggcgcccttggagtggactctactgatgacagacagaccctctgagagacaagaccctctgactctgtgatggaagatgccagagattttcctttggggtaattgtccttaaacaaaaccaaacagatgaaacacacacaggacttgtggctaaaaaggctagtttttcacttgcatttctcaactaacccaggttttacatgcatctgtgaatccttttactactacctctgtggagagatggagagacttcagataaacgtgaagctaatgagtaaaaccctctctgccaaaacctacactccactttaggcccttcttgaagatgagcacaatttttaaatactgagcacaatttttaaatactgacatcacttcctcttccccctcccaccccagctcagcagcctcaaatctacagagaagaagaattatggcatgaacattcccacagacccaccatctttaagacttgacctctgtaagtttaccaaagggctcctcacaattgtggtgggggttctggttcaaaatttggagcaaacatgaagtttttggaaacgttttctcatttgaagcctccagtatgctgtactattctggaaattaccttcaagagtctcacttcttgtttctgttgtgttttctgtgggcatcatgttcttcacgcttgcagtagaaggtgctttctcggtttcccagagtatccaacggctcacctttctcaagtgctggcagtagctatgcactcacgggctggtttgggtcgctggtgcagcagcgcaaatctgttgccttctgaatttttctcacctaatgtgacactggctacaatgaatcttctcttcatcgggctgaatgaaagattcaagaaccatcttcaaggtgcatggtgggaattatcaacctcagggatactcattttaactcaggcgtgtcctgctttgtaacattccattgttgggagagggcaggacaggtgtgttcttctgtgggcaggagtcatgtcactgtcctacatatgtaagagttgggaaggtgacgatttttgacacatccaggaactcttactctagttagaatttgtaccagatccaaggtgaaaaccccaataagcaactgaatttagagtttaaaaatgaatgactttatgctacatctgtggttatcaaattatataggttgttgagaagcagaacgctgtttgtagtaagaaatctttgtggaaccccagtgtgtgaagtaaattgtatgttattaaatttatttaaggtt

SEQ ID NO: 699 - DNA, 2552 bp, Homo sapiens
acacaacgctcctcagatagggcactcccccagcaggggtacagcttggctccgggacctcggtcccgccgaggctggcttcagtttctgaatttgcccaccagtggcttcgagggccaagcccccaggccctgctggtccaggaggagagacagctgcctgcgagcctcctgcagggccctgcgggcgatgaccaggccatggcagtcgtggagctgctggcccgagaactccagccagccagcacagcagctgctgccggtgcccagagccaccagcttgtagatctccttcacgtggcccctggcacgcgggatctctgtgcaggagggggcagagacggcccagcctaaggcccagtatggcgagcgctcgtccaacaggaggtcaaagccggcgctcaccaacgctgcgcagcgctgctcatgggtcaggatgttctctgcgccagggcgagagactgcaggtgacgtcctgatgctcagatggtttgtacagcaacccacctcctgctcacacgcacagccacttccgcctccccacgggactgccagcctcagtcctcttgtccccagctgcggctcagctgcctggccctccctccattacctgggttctccagctgactccggatgtagcagagggcagagagcgctgcctgctgtttggcctccgtcttgctattcgcagtgcccgcagggcagaccaccccatccagttccgcgctcaccgagaaggggaagcagggacctggggaaggagccaggtgaggaagcagccccctggccttcgccctgtgacagcaggctctatcgccaccccatgccgcgcacacccttgagtgcctctgcaggctgtgacccatcgctgattcaaccaagtcctcacccaactcctccacagcagggatgcgtgactccatttcacagatgagcagaaacggcaggcggtttgcccaacttgagtcaggacccaaatccaggtcccctctccagagcccacgccaccctgttctcaggaggaaggctctgagcacttccacctgccacagacacattgctttcaattcctctcctccaggggctctatatttgaacacttttcctatgaaacagtatcattttgggtgttacttataacacaaaagagagatgaaaaatctggaactgggatcacatggtcaaaggtgcagggttaatttcacagtacttgctgctaaattgtttctcccaaggactgcccctctgggggtttcccttttggaagggaacccatttcagcactccccactgcgctgagatctgtctgctctaaacaggcatcaaaaccagcaaccacagacagacgtggaagggatgttggccttagaaagccagcatgtggctgccatcctaacagcgactgaatctggggagaaccatcaaagcatgattttctaaaaccacaagtgacaatgttatagggacaggatatctacatgatctccaaatgcctcccctggatgacttattcagcacaaaggagaaagtgaagacacctggtagatgccaccctagtcaaatccccacagctcgcatcgccaggggacaaagcaagatcgcacacttcctggtgagatgcgtgccaaagactcgacatcacttcaataacacatcacctgaactcagttctgaggaaacagacaaacccaagctgaaggacattcgcaaaactactggcccttactcttcaaagacatcaatgttgtgaaagacaaagacaggaactgtttcaggtaagagattaaagaggcatgacagctaactgtaatgtcatactgggatgggaaacaatggccatgaggtcattactgggacaactggcaaaatttgaatgtgaatagaaattagaagatggtattatatcaatgttaaatttccaggatttgataattgtattgtagttacataagagatgcccttgtttttaagaaatatagatgaggccgggcacagtggctcactcctgtaatcccagcactttgtggggctgaggacaggaactcaagaccagcatggccaacacggtgaaaccccatctctattaaaacacaaaaaaattagctgggcacgggggcacaagtctgtcattccagctactcgggaggctgaggcgcaagaatcgtttgaattcgaaaggcaaaggttgcagtgagttgagatctcaccactgcactccagcctgggccacagagcgagactctgtctcaaaggaaaaaaaaaaagagggctgggcaaggtggctctaacctataatcccagcactttgggaggccaaggcgggcggatcactagaggtcaggagtttgagaccagcctggccaacatggtgaaaccccatctgtactaaaaatacaaaaataaattagccgggcttggtgtggacacctgtaatcccagctactcaggaggctgaggtgggagaatcacttgaacttgggaggcagaggttgcagtgggctgagatagtgccactgaactccagcctgggccacaagagtgaaactccatctc

SEQ ID NO: 700 - DNA, 2796 bp, Homo sapiens
gattgcaggccaccacttcatttacatggggtgagcaccaatgcgttttgttcaattctttgttcaaaaccccaagaatctggacaacttgcactcaagaccctctacgggtttggcgagccagtctttcagtggctgttttctagtagctccttggcaattgaggggaactggctgggaccactctccagtgctgtctgaaggccaaggagtgaacagggatggctgccctgccttgaagagggaaggactcttttctatcctttccagctatagtccctgatccctacatgtgatgcggttggcagcggaagctcatcctgggcgaactcacacacttttcaggagacttaaaccttttcttatgctaagttcttcccttcccctactcatctggctaaaggacagactatgcaaaaaaggttatacaagtcagagggtctgagcatgtcggaggtggtctgtgtggggcatggggtggggggaaaattcatgaaaggcaatttattgcctaaatttaaagggttaaagggttgctttaagtgggatagaaaaaccttaaggaaagttcatagtaggtcctcagtggtggagtgttgtgggaagtcagggaccctgaatgaagggactggctgaagccatggcagaagaacataaactgtgaagatttcatggacatttattagttccccaaattaatacttttataatttcttacgcctgtctttactgcaatctctgaacataaattgtgaagattttatggacatttatcacttccccaatcaatactcttgtgatttcctatgcctgtctttactttaatctcttaatcccgtcatcttcgtaagctgaggaggatgtatgtcgcctcaggaccctgtgatgattgtgttaactgcacaaattgtttgtagagcatgtgtgtttgaacagtatcaaatctgggcaccttaagaacaggataacagcaacgttcaaggaacaagggagataatcttaacgtctggctgcctatgggccgggcagaacagagccatatttctcttctttctaaagcaaataggagaaatatcgctgaattctttttctcagcaaggaacagccctgagaaagagaatgtgtgcctaggggtagtcctccaaaatggccactctggggacggttgtcttttatggtcgtagataagggaagaaataagccccggactcccatagtgctcccaggcttattaggacgaggaaattcccacctaataaattttggtcagactggttgtctgctctcaaaccctgtctcctgataagatgttatcaatgacaatgcgtgcccgaaacttcactcgcaattttaatttcgccctggtcatgtggtcccgtgatctcaccctgcctccatttgccttgtgatattttattaccttgtgaagcatgtgatctctgtgacccacaccctattcatacactccctccccttttggaaatcactaataaaaacttgctggttttacggcttagggggcatcacagaacctgccgacatatgatgtctcccctggacacccagctttaaaatttctctctttgtactctttccctttatttctcagaccagccaacacttagggaaaatagaaaaggacccacgtgaaatatcaggggctgaatttcccccgatagtggagggaaccatcccaaagcagtgccagcccccatctaaggtcagagacatctgacagactaaatcagggccctaaagtagggacgcccctggggaccccagtctgggttcagaattttttcagggggatgccctgggtaaagtttgggtcacctaatgggccctctacttttcaaagtcctcttctctgttccagaccactatgggcaactctctatctattcgacctgattccactatgggcaattctacacctgttccaccggattcctcacttggctacatcatccaccattggaatcaatttgaccctgacactctaaagggaaaatgtataatttttttctgtaatactgtttggccccattatgagctgcccagcccccagcaatgggcagtcagtggtagccttaattatgacaccatcctgcaattagacctactttgcaagaggctgggaagatggtcagaagtcccatatgtacaggccttggtgtgtgatgttcccctccctgtgtccatgtgttctcattgttcacctcccacttattagtgagaacatgcggtgtttggttttctgttcctgtgttagtttgctgagaatgatggtttccagcttcatccatgttcctgcaaaggacatgaactcattcttttttatggttgcgtagtattccatggtgtatatgtgccatattttctttatcccgtctatcactgatgggcatttgggttggttccaagtctttgccatggtaaatagtgttgcagtaaacatacatgtgcatgtatctttataatagaatgatttataatcctttgggtatatatccagtaatgggattgctgggtcaaatggtatttctggttctagatccttgaggaatcaccacactgtcttccacaatggttgaactaatttacactcccaccaacagtgtaaaaatgttcctacttctccacagcctcaccagcctgtttcctgactttttaatgatcaccattctaactggtgtgagatggtatctcactgtgattttgatttgcatttctctaacaacaagtgatgagcattttttcatatgtttgttggctgcataaatgtcttcttttgag

SEQ ID NO: 701 - DNA, 2418 bp, Homo sapiens
gaaatgaaagcccggaaaccccggaactagaactggtatggagtctcactctgtcgcccaggctggagtgtagtagcgcaatcttggctcactgcaacctcggactcccagatctcttcaactacctgtgaaaactgatgtgatgaaaaggggaatttgaaggagccattccagaagacagggcgaaaactgaagtgcaatcagggccaagaaaaacagaaatagcaggacctggagttggcagccttggcatggtcaggttggcacctctggaggtgcccaggctttccctggcagcattgtgagcagtggatggtgttgaagggcagccagaggaggaatggaacacatgctccttgctaaccacacggacaaggccacgttcacaggtacacaaaggcaacgcagttgctcaggtgcttcggtatcacagccaagaccccttcgggggaagctagtcggatactgggacccacattccagactactgagccgcggtcgcgccctcggctccgtttctgctccctccaccccacgaggacgggggtggaaggccaccttcgatgggtgcatcctccacgatgacctgctaacaaaggtgcatggatttcagagtctgattggcctacaacagcatttggcttgtggagacagtggttccctgatgaaaaactgccatgatgtaaggaagagcctgtcagagcgaggctggggtgctgcgtgttggggaggtggaggtgtggcttcccgggagaagctccacccgctggctgagtctggcacataaaccagtctgtgaggggatggatgtgggtgtaatgggggcaattacagtaggaaggagcccacgtggagcctgcattctctgggacagggcattactgcattctctgggacaggctaaggcccagatcctaccttcccaggtggctggatgggtcatagatgtatgaaccggtcccctcattttctgattgccctgtgcttaacgtttctgtacctttactgaggctctttcctccaactccagtgctcagaccccccttctcctgaacatgaatgcctgtccatggaaattcgagtctctctctctcacccaggctggagtgcagtgatgcaatctcaactcactgcgacctctgcctcccaggttcaagtgattcttgtgcctcagcctctggagtatctgggatcgcaggtgcgtgccaccatgtctggctgatgttttgtatttatagtggaggtgggtttcgacatattggccaggctggtcttgatctcctggcctcaaagtgatctgcccacctgggcctcccggattgctgggattacagttgtgagccaccacacccagcctgtccctgaaattctaatgaaatgtgcgataaagttgttttgtttttctttttgttttcccttcttggcaaagcctggtgtttctattttagtggatttgcctggcactgaggactgctatggtggtcttcagaggctcctggtattgactgcttgtgaaaccgcttttgcaaaattatgactgagacagtgaaagagatctaacttaaccgacccaatcttgcttctaacctccaaattgtccttattcattcctgagcatagcctgaactaactttgggagaagcttagtttatattttattttatagtttaaaacaaagatgttaacagccctttcccaaggcagacttccttcttgcctggggactaggttgcctttggaggactaacattagccacgagattagaaattatgggctgggcctcgtggctcacccctgtaatcccagcactttgggaggccacggcaggtagatcacctgaggtcaggagttcgagaccagcctggccagcgtggtgaaaccccatctctactaaagaatgcggaaattagccggttatggtggcacatgcctatactgccagctgcttgggaggctgaggtgggaggatcgcttgaacctgggaggcggcgtggaggttgcagtgagccaggatcttgccactgcactccagcttgggcgacagagtgagactctgtctcaaaaaaaaaaaaagtttagaaattatgctttaggagtcatgcagctggaggctacaagattctgaccctccctaaactgctcctaagatcagtgcttgagatattttgcagaccctgcacttgatggatcagctggcaccacccagactgattaactggctcatgtgatcttgtggtccccacccaggaacttaatcagcacaaggagacagcttcaactccctatgatttcatccctgaccaatcagcactcctgggctcactggcttccccctacccaccaagttgtccttaaaaagtctgctccccaaatgctcgggtagactgatttgggtaataataaaactccggtctccc

SEQ ID NO: 702 - DNA, 3014 bp, Homo sapiens
ctgtgctgtctgactccagagccggtgctcatgacgagtgtcaggcatccgcagaggagccttcggaagcagagtgtgctgtcctgcactacagcggggcttcagggagaggccacacttgggcgttggtctgtgtggacgtggaggaagccactctgtgaatctgaagaaccattatttgagttctgcaccacgcaaaccagttcaccgagggaaggcccagaggcagtatgttattccgggtcttgggcttctaaggttacaccttccagtcctgggcaccacctcggagtgaggccagagtccaggcccttctcccccttgcaggggcatctctgaggccggagtccaggcccttcttcccctgcggggggcctctgcaactcccactcgggcctctttcctcccagagatggggcaggatagaaaccagcgtgtgtgcagacggccatcttagcttccattcaacggctctgaccgaacggggaaggccagggtgttactgattcagataacttctgagagtacagaagagtttcctgaggatggcgtggccatgctgcctgtacgtaaaacaggacttgacagtgatctggacggagagaatgggacaggggagagctcgtgtcatctgaattctggttcgcatccaccctaaggacagctcccatcaggcgctgtcgcctcgggcttcaggactgtgtctcctttgtcttcgtgctcctcattccctgcacttagtacgtactcagcaaatgaggtgaaattcatctctccagtggagtcctcttgtgatgcactgaaaattacagtcatggaccgtcttccaaaacagaggcattctaccttcccccgtttccatgaaagaaggcatggctttgagatgcctggccagcgctcttctcagctgatggcatgactggctcctccagccagttagcttgcctccatgagaagcaggtttcgtgtgtaactatccagccagccacctacctgttacagcggtgaagccagctgggcatctgctctgcactctgctgggtgctgggtgcagagctgacgtgatcagtgtccactgcgaacagcaaggagacagtcagaggcatcgatgcagcctccacgtcgcacgttcccggctaggtacgtacatagtgatgtgactgtatagaaggcaagtcagagaaagtcttcaaagaagatgtgacatgagacctgggccagacgggcgacgagggacagcatcagcaaggacccctcagtgccaggcccccaggctcagtgggaaacaactgcccgtgagatggggctggggcgttgctggcggcgtgtattggtgttacctgggaaagttcttcctcctttggtggcttggatcaaatatcacttctgcaagtcccattacgcccaggcagaaatggcttttccctcctcagggctcccttgctgttctacatgcttccctttgcgcacctgcgacgtaactcctggcttgtgtccatctcctggcaagactgggaaccccttcagggcaggtggggtccctgtgttggtcctctgtgctgtgacaccagcacagtgcctggcacacacaagatggctctgtaggtgtccagctgcttaatttcactcagaaggggacagagaacgtcagtcacccatattagcctctggctctcctgaagctggccgacgttcccagctgtctttccttcagagcctggagtgtgggtattgtggcatgcagaatctagagtgggtaccatggttgcctcctgcctgttctgatttccactgtgtgaaggaagcccgtgaccttggctgaagcagcctgtgctgctaccagctggttggtccgtgtcttcctgctgtggcaaataggaagagtaccaccatcatctgggccagtggtctggtttttatttttattagcaacaaatgcccttaagaagcagctgaacatgctggctaattagagccagaaagaacagcttagcagcaagtgcactaaaatggaaattgcacttggcctccactcagcgtgtgcaagtggtcagcactaaatagcgccatctactaggtctgtccctccggctacttgggagacactccacagccagctcctcctggcaggctgactgggatgccattctcctggaagccggggatcctgcaggggccaaacccacatggtttagtggccgaggcaggcacttgatagcctctgccctgacgacattcctgccactgcagaagggcctcttccgagctctgtggagcagagcctggggcttgaactgagcctgcacccatgtacgggactcaaggtgcatctctggatgggagatacacgtggccctctgcaggcatgccagggtttgcctctctgagaagtttgatggttctcctgtcccaggtgcctgtttagtaagcctgggactcagagaggggcagtagtgtcctaggcctgggtcaaggcacccacctggtggattgaggagggcagagggtcaggccaggtggcggatgagggaagcctgggggatccctgcattgagagagtgcagggattcttgatggcttgacagtggggaccctgtgaccaggctgagaattctgttgaataatgaaagcatttggcccactctctaaaatgcttatcgattatgatcaaaaatgatctttctttgagattattatgatcctgtggagggagactgtcaggtaagaattgtgaaagactttgcagtgtgccataaaaaggattactgagtgtctcatctagcgcccttcagggttatctgattcgatagggacccgcgctttccatcgtctttgggctacttatctctgtaaattgtagaaatcttatagtagtgcactttgagtaatgcaaatttcttttccaaagaaatgcaaataaatgcaaattttatcctgtagaatataaatatggctattgctctgcagatactgacccgttttgcatctatttataaattcatttttgcactatc

SEQ ID NO: 703 - DNA, 3272 bp, Homo sapiens
aaatctatcccatcagctcagtagcaaagtggggaccaaccctgacaggttgctattccattgcagggtgcattgcaaccacacacacacccatagtcgttcagactgagatcatttagacatgctaagtaacctaacatacacatctttgggatgtgggaggaaattgaagtgcccagagaaaacccacacagacttggggagaatgtgcagactctacacagaacagtaaccccaactgggaataattttttttttccttctcagtgttttaacgaaacaatgtcgaacaaaagatgttatttgaggatctgctgtgtaaaaggaatcttgtgtagagatataataaacctctgaaatttttaactctagggatgtttttcaaaatcaatttatagcagtttatgaaaacatgcaaaaaaaaaaagctttatgaagagttgtaccctataaatttttattgaggggaataactgtggttttgaccaggagttccttactcattgatgaccacagtctactactacgtggaaccttaatctcagccttttttgatgatgcccaagttaatatttatattgttttgttcatgggataatatatgcaaaatgactttataaactaaagctttggagttatgcctgagttccagtgatggttcttagctcttcatggttctgttcttagctattgactgcaggtaagttgcttaatttttctgtatctgagataaggaatactaatatggttgaatttttttaaatgtgtttattgcctgtttgcttatttttttattgtggagttaagccttctaattttcaagaattaagagttcattgttatgtgctatacgtatttattccccttgattatatttctgtacctacttacctttttattttagattctggtcacttctattccgaaagttagttatgaagtacaatccaggattaaggtggcatctaaatttggttaatttctgtgctaccttttatgctattagtctaaatcattaagaaagcatttaagaaacttttgtaagcgtttcttttttttcttgtcatatttgggaataggataaatagcttaaaatagttgagctgatttttatttgtattctttttttattataaagaaacatttgctaggaaataagctggatataaacatagttgtatctcctttagtgctacccagcactaaaaacttagacacgtatagggctgagcagctggtataatagagtgggctccgtctcattttctaagcctgtgagtcctagctgcctactgcagctcgatttgagtgggagttgatataatgtcttttttttttttctcacttcagcagtaagtatctggtttgctcatagtcttttgattaataggtagtttgaatatttttcaaagaatcagccaacatgtgattattttaaagatttaaataccagatagatattaaaatgcaaggttattgctactagatattacatctagctaaatcaaccattgtgaaataattgagaagtagagataataaagacataaaccaataaatctttgcttgaaaatcacaggtatgggaacagattgtgaggacagaaaaataaaaagtaaaaagaaaaatcataggtaataagtgtctaaagggtttcttcataggaacagtggttgttgaccccaaataggacaaataggactcccatgttcaagaacacatcaccgttgttaaaaaggtctgccattattaaatagtgcaatgaagaaccatttagactttattagagtccacgttattggcaaaagatgttggatattcatagaaaatcaaacttgacaaattccaaaagtgtctttcagctctggaacaaaagatgtcatatagttccttgctaccaaagagtttgttcatatggtaatagaggcccatacctttagagggcaaatacagtgctttaggaaggacttagatgatataaatggtatttgtcccttttctcatttttatttactgattttcaactcacttggcttttaatgaacattagcgttacttatctgttggcagctgggttggaaaacatttgtttttctagactttatgaaatggtagccactggtgttgcacttaatgtttattgccagttagttctctgcagttaatccacagcagaggaatcacacttctaaaatggttcattctcttcttcatagacatttaaagttgaacaaatactttcttgtatattgttactctgtttggatggagagggaatgtatatgtatcttaaaaatatttctctttgccacattaaacatgccttttttccgtgtgtgtgtgtgtgtgtgttttcaggtcagatgtaccaacagtaccagcaacaggccggctatggtgcacagcagccgcaggctccacctcagcagcctcaacagtatggtattcagtattcagcaagctatagtcagcagactggacctcaacaacctcagcagttccagggatatggccagcaaccaacttcccaggcaccagctcctgccttttctggtcagcctcaacaactgcctgctcagccgccacagcagtaccaggcgagcaattatcctgcacaaacttacactgcccaaacttctcagcctactaattatactgtggctcctgcctctcaacctggaatggctccaagccaacctggggcctatcaaccaagaccaggttttacttcacttcctggaagtaccatgacccctcctccaagtgggcctaatccttatgcgcgtaaccgtcctccctttggtcagggctatacccaacctggacctggttatcgataaggaggctcctctacaccaattaatgtagctgctagctattggcctcccaaaagactccagtactattttaatttgtattgaagaagttcagaaatttaaaagcagagcattttttatgatatcattgttggtgttaattgaaagtataatttgctggaacacaaagaccaaaatgaaagttttttcctccctgcttaaaaatctagcagcttcttagttactttggaacactactcttacatgtataaagtgattgacttgactttctagcttcccttgtccggaggatattaaaatgctagggtgaggtttagccatcttacttggctttttactattaacatgatgtactaaagtagagccctttgagaatacaagatattatgtataaaatgtaacactgatgataggttaataaagatgattgaatcc

SEQ ID NO: 704 - DNA, 2894 bp, Homo sapiens
atttgcttttcgcttcgcgtagggtgaagctgtagctacttcggctttggtgggagggaggaggggtctggaaagggctgggctcaggctttccccgtccggtagaggttctcgcgggatcgcgcggaggcggcggtggctcggttactgactgcagcagcctgacctgagtgggttagtgatccagagaaaccagcaggccaacttggtcaggaaggttcgggaagctgttggagcagtgtggggaatttcccaccaggatgagtatgattggctgtgattttagatcgtaaagctgaaaattgaaatcatgaaagtagacaggactaaactgaagaagacacctactgaggctcctgcagactgcagagccttaatagacaaactcaaagtttgtaatgatgagcaacttctcttggaactgcagcagatcaaaacatggaacattggaaagtgcgagttatatcactgggtggacctgttggaccgcttcgatggaatactggcagatgctggacagacagtggagaatatgtcatggatgctcgtatgtgataggccagaaagagagcaactgaaaatgcttctcttggctgtgttgaacttcacagccttgctcattgagtacagcttttcccggcatctgtacagttccatagagcatttgacaactttattggcttcctctgatatgcaagtggtgctggaagtagccgcaggcatggcggcggctatgccgcttgctctgctcgtcctgttgctcctggggcccggcggctggtgccttgcagaacccccacgcgacagcctgcgggaggaacttgtcatcaccccgctgccttccggggacgtagccgccacattccagttccgcacgcgctgggattcggagcttcagcgggaaggagtgtcccattacaggctctttcccaaagccctggggcagctgatctccaagtattctctacgggagctgcacctgtcattcacacaaggcttttggaggacccgatactgggggccacccttcctgcaggccccatcaggtgcagagctgtgggtctggttccaagacactgtcactgatgtggataaatcttggaaggagctcagtaatgtcctctcagggatcttctgcgcctctctcaacttcatcgactccaccaacacagtcactcccactgcctccttcaaacccctgggtctggccaatgacactgaccactactttctgcgctatgctgtgctgccgcgggaggtggtctgcaccgaaaacctcaccccctggaagaagctcttgccctgtagttccaaggcaggcctctctgtgctgctgaaggcagatcgcttgttccacaccagctaccactcccaggcagtgcatatccgccctgtttgcagaaatgcacgctgtactagcatctcctgggagctgaggcagaccctgtcagttgtatttgatgccttcatcacggggcagggaaagaaagactggtccctcttccggatgttctcccgaaccctcacggagccctgccccctggcttcagagagccgagtctatgtggacatcaccacctacaaccagccctgcctttgtgtccccaggacaacgagacattagaggtgcacccacccccgaccactacatatcaggacgtcatcctaggcactcggaagacctatgccatctatgacttgcttgacaccgccatgatcaacaactctcgaaacctcaacatccagctcaagtggaagagacccccagagaatgaggcccccccagtgcccttcctgcatgcccagcggtacgtgagtggctatgggctgcagaagggggagctgagcacactgctgtacaacacccacccataccgggccttcccggtgctgctgctggacaccgtaccctggtatctgcggctgtatgtgcacaccctcaccatcacctccaagggcaaggagaacaaaccaagttacatccactaccagcctgcccaggaccggctgcaaccccacctcctggagatgctgattcagctgccggccaactcagtcaccaaggtttccatccagtttgagcgggcgctgctgaagtggaccgagtacacgccagatcctaaccatggcttctatgtcagcccatctgtcctcagcgcccttgtgcccagcatggtagcagccaagccagtggactgggaagagagtcccctcttcaacagcctgttcccagtctctgatggctctaactactttgtgcggctctacacggagccgctgctggtgaacctgccgacaccggacttcagcatgccctacaacgtgatctgcctcacgtgcactgtggtggccgtgtgctatggctccttctacaatctcctcacccgaaccttccacatcgaggagccccgcacaggtggcctggccaagcggctggccaaccttatccggcgcgcccgaggtgtccccccactctgattcttgccctttccagcagctgcagctgccgtttctctctggggaggggagcccaagggctgtttctgccacttgctctcctcagagttggcttttgaaccaaagtgccctggaccaggtcagggcctacagctgtgttgtccagtacaggagccacgagccaaatgtggcatttgaatttgaattaacttagaaattcatttcctcacctgtagtggccacctctatattgaggtgctcaataagcaaaagtggtcggtggctgctgtattggacagcacagaaaaagatttccatcaccacagaaaggtcggctggcagcactggccaaggtgatggggtgtgctacacagtgtatgtcactgtgtagtggatggagtttactgtttgtggaataaaacggctgtttccgtggt

SEQ ID NO: 705 - DNA, 2946 bp, Homo sapiens
gttcgcggctgcaccgctcggaggctgggtgacccgcgtagaagtgaagtacttttttatttgcagacctgggccgatgccgctttaaaaaacgcgaggggctctatgcacctccctggcggtagttcctccgacctcagccgggtcgggtcgtgccgccccctcccaggagagacaaacaggtgtcccacgtggcagccgcgccccgggcgcccctcctgtgatcccgtagcgccccctggcccgagccgcgcccgggtctgtgagtagagccgcccgggcaccgagcgctggtcgccgctctccttccgttatatcaacatgccccctttcctgttgctggaagccgtctgtgttttcctgttttccagagtgcccccatctctccctctccaggaagtccatgtaagcaaagaaaccatcgggaagatttcagctgccagcaaaatgatgtggtgctcggctgcagtggacatcatgtttctgttagatgggtctaacagcgtcgggaaagggagctttgaaaggtccaagcactttgccatcacagtctgtgacggtctggacatcagccccgagagggtcagagtgggagcattccagttcagttccactcctcatctggaattccccttggattcattttcaacccaacaggaagtgaaggcaagaatcaagaggatggttttcaaaggagggcgcacggagacggaacttgctctgaaataccttctgcacagagggttgcctggaggcagaaatgcttctgtgccccagatcctcatcatcgtcactgatgggaagtcccagggggatgtggcactgccatccaagcagctgaaggaaaggggtgtcactgtgtttgctgtgggggtcaggtttcccaggtgggaggagctgcatgcactggccagcgagcctagagggcagcacgtgctgttggctgagcaggtggaggatgccaccaacggcctcttcagcaccctcagcagctcggccatctgctccagcgccacgccagactgcagggtcgaggctcacccctgtgagcacaggacgctggagatggtccgggagttcgctggcaatgccccatgctggagaggatcgcggcggacccttgcggtgctggctgcacactgtcccttctacagctggaagagagtgttcctaacccaccctgccacctgctacaggaccacctgcccaggcccctgtgactcgcagccctgccagaatggaggcacatgtgttccagaaggactggacggctaccagtgcctctgcccgctggcctttggaggggaggctaactgtgccctgaagctgagcctggaatgcagggtcgacctcctcttcctgctggacagctctgcgggcaccactctggacggcttcctgcgggccaaagtcttcgtgaagcggtttgtgcgggccgtgctgagcgaggactctcgggcccgagtgggtgtggccacatacagcagggagctgctggtggcggtgcctgtgggggagtaccaggatgtgcctgacctggtctggagcctcgatggcattcccttccgtggtggccccaccctgacgggcagtgccttgcggcaggcggcagagcgtggcttcgggagcgccaccaggacaggccaggaccggccacgtagagtggtggttttgctcactgagtcacactccgaggatgaggttgcgggcccagcgcgtcacgcaagggcgcgagagctgctcctgctgggtgtaggcagtgaggccgtgcgggcagagctggaggagatcacaggcagcccaaagcatgtgatggtctactcggatcctcaggatctgttcaaccaaatccctgagctgcaggggaagctgtgcagccggcagcggccagggtgccggacacaagccctggacctcgtcttcatgttggacacctctgcctcagtagggcccgagaattttgctcagatgcagagctttgtgagaagctgtgccctccagtttgaggtgaaccctgacgtgacacaggtcggcctggtggtgtatggcagccaggtgcagactgccttcgggctggacaccaaacccacccgggctgcgatgctgcgggccattagccaggccccctacctaggtggggtgggctcagccggcaccgccctgctgcacatctatgacaaagtgatgaccgtccagaggggtgcccggcctggtgtccccaaagctgtggtggtgctcacaggcgggagaggcgcagaggatgcagccgttcctgcccagaagctgaggaacaatggcatctctgtcttggtcgtgggcgtggggcctgtcctaagtgagggtctgcggaggcttgcaggtccccgggattccctgatccacgtggcagcttacgccgacctgcggtaccaccaggacgtgctcattgagtggctgtgtggaggtgagtgggggaatccacaccctcagggctgcccccatggcaggccctcagcctgagccttcacatacatcatgacgaggatggcagctcttcccagctactgagcacttgcttcccaagtgccaggttctgtgctaaaccccatgctcacataaaatcctacagtaggtataaccatcctatttgacatttaaggtacagaaagtttaactaacatagataactccccccaaacttgagaatttatgcattccctttaaacagaacacacttttagaatatccacaagcttcctaagggtctaaagatcccacattcacactgacttgggcagtgacagagcccagagcaaacagggccaggccagcccaaatccagtgacctcctcttcaccttcttaaaagagacaggagaatcacttgaacccgggaggtggaggttgtggtgagccaagatcgcgccattgtactccagcctgggcaacaggagcaagattctgcctc

SEQ ID NO: 706 - DNA, 2557 bp, Homo sapiens
aagcagaggattctcaggtccgccagtacctcccagagacctggctctgggatctgtttcctattggtaactcggggaaggaggcggtccacgtcacagttcctgacgccatcaccgagtggaaggcgatgagtttctgcacttcccagtcaagaggcttcgggctttcacccactgttggactaactgctttcaagccattctttgttgacctgactctcccttactcagtagtccgtggggaatcctttcgtcttactgccaccatcttcaattacctaaaggattgcatcagggttcagactgacctggctaaatcgcatgagtaccagctagaatcatgggcagattctcagacctccagttgtctctgtgctgatgaagcaaaaacccaccactggaacatcacagctgtcaaattgggtcacattaactttactattagtacaaagattctggacagcaatgaaccatgtgggggccagaaggggtttgttccccaaaagggccgaagtgacacgctcatcaagccagttctcgtcaaacctgagggagtcctggtggagaagacacacagctcattgctgtgcccaaaaggaaaggtggcatctgaatctgtctccctggagctcccagtggacattgttcctgactcgaccaaggcttatgttacggttctgggagacattatgggcacagccctgcagaacctggatggtctggtgcagatgcccagtggctgtggcgagcagaacatggtcttgtttgctcccatcatctatgtcttgcagtacctggagaaggcagggctgctgacggaggagatcaggtctcgggcagtgggtttcctggaaatagggtaccagaaggagctgatgtacaaacacagcaatggctcatacagtgcctttggggagcgagatggaaatggaaacacatggctgacagcgtttgtcacaaaatgctttggccaagctcagaaattcatcttcattgatcccaagaacatccaggatgctctcaagtggatggcaggaaaccagctccccagtggctgctatgccaacgtgggaaatctccttcacacagctatgaagggtggtgttgatgatgaggtctccttgactgcgtatgtcacagctgcattgctggagatgggaaaggatgtagatgacccaatggtgagtcagggtctatggtgtctcaagaattcggccacctccacgaccaacctctacacacaggccctgttggcttacattttctccctggctggggaaatggacatcagaaacattctccttaaacagttagatcaacaggctatcatctcaggagaatccatttactggagccagaaacctactccatcatcgaacgccagcccttggtctgagcctgcggctgtagatgtggaactcacagcatatgcattgttggcccagcttaccaagcccagcctgactcaaaaggagatagcgaaggccactagcatagtggcttggttggccaagcaacgcaatgcatatgggggcttctcttctactcaggatactgtagttgctctccaagctcttgccaaatatgccactaccgcctacgtgccatctgaggagatcaacctggttgtaaaatccactgagaatttccagcgcacattcaacatacagtcagttaacagattggtatttcagcaggataccctgcccaatgtccctggaatgtacacgttggaggcctcaggccagggctgtgtctatgtgcagacggtgttgagatacaatattctccctcccacaaatatgaagacctttagtcttagtgtggaaataggaaaagctagatgtgagcaaccgacttcacctcgatccttgactctcactattcacaccagttatgtggggagccgtagctcttccaatatggctattgtggaagtgaagatgctatctgggttcagtcccatggagggcaccaatcagttacttctccagcaacccctggtgaagaaggttgaatttggaactgacacacttaacatttacttggatgagctcattaagaacactcagacttacaccttcaccatcagccaaagtgtgctggtcaccaacttgaaaccagcaaccatcaaggtctatgactactacctaccagatgaacaggcaacaattcagtattctgatccctgtgaatgaggatctggctctgttgcccaggctgcagtgcagtggcgtgatctcagctcactgcagcctctgcctcccaagttcaagcgattcttgtgcctcagcctcctgagtagctgggatgacaggcacgtgccatcacgcccagctaattttttttgtatttttaatagagatggggtttcgccatgttggtcaggctggtctcaaactcctggcctcaggtgatccgcctacttcagcctcccaaagtgctgggattacaggtgtaagccactgtgcccggcctgtcctaaactcttgaaaatagtttacagaagaaaaagctaatgcttggtattaaaacaatacttttttctatcagattg

SEQ ID NO: 707 - DNA, 3370 bp, Homo sapiens
agcttccttggcatccaccggctaaacggccccttgaaatgtggccagccccaggaagtgctggtggattattacatcgacccggccgatgcaagccctgaccaagagatcagcttctcctactatttaatagggaaaggaagtttggtgatggaggggcagaaacacctgaactctaagaagaaaggactgaaagcctccttctctctctcactgaccttcacttcgagactggcccctgatccttccctggtgatctatgccatttttcccagtggaggtgttgtagctgacaaaattcagttctcagtcgagatgtgctttgacaatcaggtttcccttggcttctccccctcccagcagcttccaggagcagaagtggagctgcagctgcaggcagctcccggatccctgtgtgcgctccgggcggtggatgagagtgtcttactgcttaggccagacagagagctgagcaaccgctctgtctatgggatgtttccattctggtatggtcactacccctatcaagtggctgagtatgatcagtgtccagtgtctggcccatgggactttcctcagcccctcattgacccaatgccccaagggcattcgagccagcgttccattatctggaggccctcgttctctgaaggcacggaccttttcagctttttccgggacgtgggcctgaaaatactgtccaatgccaaaatcaagaagccagtagattgcagtcacagatctccagaatacagcactgctatgggtgcaggcggtggtcatccagaggcttttgagtcatcaactcctttacatcaagcagaggattctcaggtccgccagtacctcccagagacctggctctgggatctgtttcctattggtaactcggggaaggaggcggtccacgtcacagttcctgacgccatcaccgagtggaaggcgatgagtttctgcacttcccagtcaagaggcttcgggctttcacccactgttggactaactgctttcaagccattctttgttgacctgactctcccttactcagtagtccgtggggaatcctttcgccttactgccaccatcttcaattacctaaaggattgcatcagggttcagactgacctggctaaatcgcatgagtaccagctagaatcatgggcagattctcagacctccagttgtctctgtgctgatgaagcaaaaacccaccactggaacatcacagctgtcaaattgggtcacattaactttactattagtacaaagattctggacagcaatgaaccatgtgggggccagaaggggtttgttccccaaaagggccgaagtgacacgctcatcaagccagttctcgtcaaacctgagggagtcctggtggagaagacacacagctcattgctgtgcccaaaaggaaaggtggcatctgaatctgtctccctggagctcccagtggacattgttcctgactcgaccaaggcttatgttacggttctgggagacattatgggcacagccctgcagaacctggatggtctggtgcagatgcccagtggctgtggcgagcagaacatggtcttgtttgctcccatcatctatgtcttgcagtacctggagaaggcagggctgctgacggaggagatcaggtctcgggcagtgggtttcctggaaatagggtaccagaaggagctgatgtacaaacacagcaatggctcatacagtgcctttggggagcgagatggaaatggaaacacatggctgacagcgtttgtcacaaaatgctttggccaagctcagaaattcatcttcattgatcccaagaacatccaggatgctctcaagtggatggcaggaaaccagctccccagtggctgctatgccaacgtgggaaatctccttcacacagctatgaagggtggtgttgatgatgaggtctccttgactgcgtatgtcacagctgcattgctggagatgggaaaggatgtagatgacccaatggtgagtcagggtctatggtgtctcaagaattcggccacctccacgaccaacctctacacacaggccctgttggcttacattttctccctggctggggaaatggacatcagaaacattctccttaaacagttagatcaacaggctatcatctcaggagaatccatttactggagccagaaacctactccatcatcgaacgccagcccttggtctgagcctgcggctgtagatgtggaactcacagcatatgcattgttggcccagcttaccaagcccagcctgactcaaaaggagatagcgaaggccactagcatagtggcttggttggccaagcaacgcaatgcatatgggggcttctcttctactcaggatactgtagttgctctccaagctcctgccaaatatgccactaccgcctacgtgccatctgaggagatcaacctggttgtaaaatccactgagaatttccagcgcacattcaacatacagtcagttaacagattggtatttcagcaggataccctgcccaatgtccctggaatgtacacgttggaggcctcaggccagggctgtgtctatgtgcagacggtgttgagatacaatattctccctcccacaaatatgaagacctttagtcttagtgtggaaataggaaaagctagatgtgagcaaccgacttcacctcgatccttgactctcactattcacaccagttatgtggggagccgtagctcttccaatatggctattgtggaagtgaagatgctatctgggttcagtcccatggagggcaccaatcagttacttctccagcaacccctggtgaagaaggttgaatttggaactgacacacttaacatttacttggatgagctcattaagaacactcagacttacaccttcaccatcagccaaagtgtgctggtcaccaacttgaaaccagcaaccatcaaggtctatgactactacctaccagatgaacaggcaacaattcagtattctgatccctgtgaatgaggatctggctctgttgcccaggctgcagtgcagtggcgtgatctcagctcactgcagcctctgcctcccaagttcaagcgattcttgtgcctcagcctcctgagtagctgggatgacaggcacgtgccatcacgcccagctaattttttttgtatttttaatagagatggggtttcgccatgttggtcaggctggtctcaaactcctggcctcaggtgatccgcctacttcagcctcccaaagtgctgggattacaggtgtaagccactgtgcccggcctgtcctaaactcttgaaaatagtttacagaagaaaaagctaatgcttggtattaaaacaatacttttttctatcag

SEQ ID NO: 708 - DNA, 2914 bp, Homo sapiens
acagggcgggcgttcggcgacgtcaccgggaggtacagtgcttggagctgggcggtcttctacttagagtggagcctggtaaccgcgacctccccgccaggtcgtgtgtgttgacaaacaccgactcagcacagtgtttatgtcggtcaaaaatagaaaactatgtccgggcacggccagcgggagatgcccttcaggccaagagcagcctggcaacatggcgggaccccatctctgtagtcctacctcagccccccagctacttgaaccccaaggttcaaggctccaatgagctgtgatcccaccacagcactccagcctgcgagactgaggtgatgattattctccaccttctaagagaacaaagaccaacgagccaccacagccaccagtcctggaacccgccaatgctggggaacggaacatgagggagttcaactctgtaaaggaagaatggtatgccagaatcactaaatgaagaaagatggtggatcagcttttctgcaaaaaaatttgctgaagccttggggagcactgaagccaaggctctactgtaccaaaaatttgaaggccatgcaaatgatctgtatgtggaaggactaccagaaaacattcctttcagaagtccctcgtggtatggaatcccaaggctggaaaacatcattcaagtgggcaatcaaattaaatttcttattaaaagtaactccagtcggactccattgtctccaagtcgactttcgtcctcatccacaactcctccacagaagccctgaacacatgtccatatggagttttactcttgttgcccatgctggagtgcaatggtgtgatcttggctcaccgcaacctctgcctcccggattcaagtgattctccttcctcaacctcccgagtagctggaaatacagattgagttttgctctgttgcccaagctggagtacagtggcacaatctccactcactgcagcctctgcctcctgggttcgggggattctcatgcctcaacttcccaagcagctgggattacagctcaagctcttggactcactgaggcagtaaaagtaccatattctgtgtttgaatcaaaccccgagttcctatatgtagaaggcttgccagacagaattccctttccaagccctacctggtttggaattccatgacttgaaaggatcatctgtggagtaataaaaccaagtttgttgttaaaaagtgagttccaggccgggtatggtggctcacgcctgtaatcccagcactttgggaggccaaggcaggtgaatcacctgaggtcaggagttcaagaccagcctgaccaacatctctactaaaaatgttaaaaattagccaggcatggtggctggtgcctgtaatcccagctacttgggagcctgaagcaggagaatcgcttggggctgggaggcagaggctgcagtgagccaagatcgcagcactgtactctagcctgggcgacagagtgagactctgcctcaacaacaacaacaacaatattaaaaaaacctgaactagttatttcctactcgcctcctggaacggctaataaaataaacactaaagctttgcagtccccaaaaagaccatgaagccctgagagtaatggaaaggttcctgaaattgaggtcactgtggaagagatgggatagtgctgtgtttcccaggattgtctcaaactcctaacctcaagtgatcctcctgcctcagcctcccaaattgctgggattataggcagaaccacctaagctgaggagtcccttgagaacaagggctagcctgtgatttcgtgacctttcttccatttgtggttcttgccaagtggaatttaaatgaccttttatcaagatggataaacccaagtttcccagtgctggaatatagaaaatggatggataaaatgtctttttgtcaccttcaactaaatctaccatgaaagacttcagagtccaggaagagagactgactgggcaacatcttattcagaaacaggaccttgccctgtcactcaggatggagttcagtggtccaatcatggctcactgtagcctcaaactcccaggctcaagcaatcctaccacgtcagccttcccagtagctggtctcacgctgtcacttaggctggagtacagtggcacagcctctgctcgctgcagcctccacctgccaggctcaggcagttcttctgacttagcctcctgagtagctgggattacgggtaagtgccgccacgccgagctggtttttgtgttttttgtagagatggggtttcgccatgtttcccagactggtctcaagctcctgagctcaaagcgattcgcccaccttggcctcccaaagtgctgggattacaggtgtgagccaccttgctcattctagtttaaacttttgagtggtttgtgtctcctgattggactcctacaaatacagaattgatggtaggaagggtaccaggagatagacccacacagatgggatttgggaataagtttggttatccaaggagcagtgctgagctccttgctaatgggatatgggatgctggtgatttccaggaagtgacctcacaatgactcaagctaccacttactgttgattgtgatgaaataccaggtgaaggccgggtgcggcagctcacccctgtggtcccagcactttgggaggccaaggcgggcggatcgctaggtcagaagatcgagaccatcctggctcggtgaagccccgtctctactaaaaatacagaaaattggctgggcgtggtggcgggcacctgtggtcccggctactcgggaggctgaggcaggagaatggtgggaacctgggaggcggagcttgcagcgagccgagatcctgtcactgccctccagcctgggcgacagagtgagactccgtctcaaaaac

SEQ ID NO: 709 - DNA, 3060 bp, Homo sapiens
acgtacctgtactactccttgttgatgattttgaagaacaagataatgtctatcttctgcagtactctattcaaacagctatagctaaaaagtacattcgatatgaaaaacctctggtgattatcctaaattgtatgagatcacaaaatcctgaaaaaagtgcaaggatcccagacagtattgccgtaatacagcaactctctcccaaagaacagagagcttttgagcttaaattgaaagaaatcaaagaacagcataaaaactttgaggatttttattcctttatgatcatgaaaaccaattttaataaagaatacatagaaaatgtggtccggaatatcctgaaagggcagaatattttcaccaaggaagcaaagctcttttcttttctggctcttcttaattcatatgtgcctgataccaccatttcactatcacagtgtgaaaaattcttaggaattggaaacaagaaggctttctgggggacagaaaaatttgaagacaagatgggcacctactctacaattctgataaaaacagaggtcatcgaatgtgggaactactgtggagtacgcatcattcactctttgattgcagagttctcactggaagaattgaagaaaagctatcacctgaataaaagtcaaattatgttggatatgctaactgagagtttgttcttcgatactggtatgggaaaaagtaaatttttgcaagatatgcacacactcctactcacaagacaccgcgatgaacatgaaggtgaaacaggaaattggttttccccatttattgaagcattacataaagatgaaggaaatgaagcagttgaagctgtattgcttgaaagtatccatcggttcaacccaaatgcattcatttgccaagcgttggcaagacatttctacattaaaaagaaggactttggcaatgctctaaactgggcaaaacaagcaaaaatcatagaacctgacaattcttatatctcagatacactgggtcaagtctacaaaagtaaaataagatggtggatagaggaaaacggaggaaacgggaacatttcagttgatgatctaattgctcttttggatttagcagaacatgcctcaagtgcattcaaagaatctcaacagcaaagtgaagatagagagtatgaagtgaaggaaagattgtatccgaagtcaaaaaggcggtatgatacttacaatatagctggttatcaaggagagatagaagttgggctttacacaatccaaattctccagctcattcctttttttgataataaaaatgagctatctaaaagatatatggtcaattttgtatcaggaagtagtgatattccaggggatccaaacaatgaatataaattagccctcgaaaactatattccttatttaactaaattgaaattttctttgaaaaagtcctttgatttttttgatgaatactttgtcctgctaaaacccaggaacaatattaagcaaaatgaagaggccaaaactcggagaaaggtggctggatattttaagaaatatgtagatatattttgtctcttagaagaatcacaaaacaacacaggtcttggatcaaagttcagtgagccacttcaagtagagagatgcaggagaaacctagtagctttaaaagcagacaagttttctgggctcttggaatatcttatcaaaagtcaagaggatgctataagcactatgaaatgtatagtgaacgaatatacttttctcttagaacaatgcactgtcaaaatccagtcaaaagaaaagctgaatttcatcttggccaacattattctctcctgtatccaacctacctccagattagtaaagccagttgaaaaactaaaagatcagcttcgagaagtcttgcaaccaataggactgacttatcagttttcagaaccgtattttctagcttccctcttattctggccagaaaatcaacaactagatcaacattctgaacaaatgaaagagtatgctcaagcactaaaaaattctttcaaggggcaatataaacatatgcatcgtacaaagcaaccaattgcatatttctttcttggaaaaggtaaaagactggaaagacttgttcacaaaggaaaaattgaccagtgctttaagaagacaccagatattaattccttgtggcagagtggagatgtgtggaaggaggaaaaagtccaagaacttttgcttcgtttacaaggtcgagctgaaaacaattgtttatatatagaatatggaatcaatgaaaaaatcacaatacccatcactcccgcttttttaggtcaacttagaagtggcagaagcatagagaaggtgtctttttacctgggattttccattggaggcccacttgcttatgacattgaaattgtttaagagcctgatattcttcctccaagaatttgatctcagtacccatttaatttttttggactcaagatctatgctttaaactggcaaggttatagatacagcctctagctcttcagatctgtacatgcagtatttaatttcctcttaaacatgtcatgagttctacaaagacaatagtgaaaaaggaaggagtgagatatatgaaaagtagcaaatatgttccttggtttggttaacatcattgatgacaaaataataaggagctatgactggagtcaggagaagttagtgtaataagctggctacacagaaccccactacttaccaggcatggattgaagaagattgtctactcaaatggcatttagacattagaatgtctgggaaaatatttctcaaagacagcaaaaacctctcaaactgaggagcaacatttattcttactaagcagatcatcaatgtatcatgtgcttggcactcaaggatcttccaaaacagaggaccaaccagtcttctgaaggtcatgcccacagaagtcatcagaccttaccaaagtaggttggagaattagattgccttttcatgcagtgagattcagttaagcaaaaatgaaatttgtctctatagctaattagcttatcaactcccctccaaacaaacaatt

SEQ ID NO: 710 - DNA, 2582 bp, Homo sapiens
catactttatttttgatcaacacattaatgtgaacccttgtttctcctgtcacctgtgttcacagtgaccctagagaggtaactaggacagcatcttatcccctctcacagctgaggaaactgagctgtggagttgggaagcaactgccctcaggtggcaggtaggtgaaggggccatgtctggaggctgggtctctctgacacctgtgccctttctgctgcctgtgggacctccagcagtgcatgggtcaagtggagtccaggtagctagaaccctggggctcacagcatatgttgtctgattacaaaaaaaaagagcaaaggtattttttgacccagttaaaccataaggggacagtccaatggtgtttgctttttttttttttttgaggcagggcctggctctgttgcccaggctggaatgcaatgacacgatctcagctcactgcaacctctacctcttgggctcaagccaccctcccacctcaccctcccaagtagctgggactacaggtacgcaccaccacacccagcggagttttgtactttatatagagatggaattttaccatgttgcccagactggtctcgaactcctgagctcaagagatcccccaacctcggcctcccaaagtgctaggattacagatgtgagccaccgttcccggccccacaatagtgttttttaaaattacctttcctttaacctttccacttaatttttgatgagactctcagcatctcagtgtctaacatcagacctggttttggcagccaagaagccttgatctgtcttctgcctccaagatgtctgtgagctctttccactgtgaccccacaggcatggttgttgacaaaacttgtgcttagtgaaagatggcggaaatttccacctttaggaatgtgggtaacagtgctcaagagtggtccactgaagcggtcagcccatccaggtgtgcaccagagcatttgctggtcttctgcctaccccggacagataggagtctaaatgtcagatgtgccagcggtgggttcatggtgcccaccatttggcaggaatcttttttgatgatagaaacccagggcagtgatgtttgtgaatgtgagtattgagatggtggatacttcttggtgctctgtgtgctgcttacagttcagtggggcttgcccactgagaagagctggtcccctggcaggccatgtctcatgtctgaagatcattctcctgccttccttttgcccaccactctcctttttctttctttttctgaaaggtagggagggataggattaagtaaaaggttatctataaaagctgcgtgcccaagaagtctgcaagcccactgacgtccttggtttcatggtttaaagtgagatgctgcctagtaaaggggtgaatccttttacttgaacatccctagagctcatttaacgagagcccttttattcacttctaaagaaaatacagtggatattcacatcacaaagtcagatttctttttgtttggacatcaataaggacatacactcgctagtttgttttacacatcaggtaaaaagcatttgcttttccgttttcttctggaatggtccttaagtaagcctagtagatgactcctcagtgtttctttaaattcttgttactagtccagaaaggtgttggtggtagatttctccctttctagtccagatttggtttaaatttgtagggccacctttttccatcctgaacaatccaggaattccataaatactgttgcctggggaaagaagggctaagcatgtatgtcgggaagggagaaacaggaggaatgaaaggaaggaagaggaaagatgcatgggaggaagagagctggattgggactgcacagtcacagcccttgcctccggtgtcacaagggcttcatggggctctggagagtcagatccctgtgaaagcagatggacagaaaccagccagagagagaggctcagaagattggagcaggcagttctgaagctcagggctgtgtcaaaagctagccaaatgtgttggggcgaggcggcttgcctggcaaacccatctgctttttgcttaatagatgggtttggatgcctgtggaacagaggcctcgggggacgagctttgttaactttgtgttatgttgaaggaatgtgacagaggagggtatgactgtcatccacccatcagggatctgtccctgacacgctggggtagaggatggaagaacatggaatagaggatggaagaatatggaatagtgccctgactcgaaagttaaccgatttccttcccttccttcccttctctctcagcaactccgaagtcaagcccgcactctgattacctttgctggaatgataccataccgaacgtctggggacaccaatgcgaggctggtgcagatggaggtcctcatgaattaagtgccatgctttgtgggagtctgggtcggcacactgtcagtacatcaggcacatgggcccactaggctggggtttctggttttgtttctgttgtgttttgttttggtttctgtattatgtatttttgtcaacgccaataaatttctttgatttgt

SEQ ID NO: 711 - DNA, 3171 bp, Homo sapiens
ttttatctaccgactcctagttagaaatcccttgcaaggggtgttagggttctgagagaaggctggtaagtaatgaggcttttaacttatttcagtatcctgttcaggtcgggaatatgttgtgttctaattactctagtttccagctcaattggtgttggagaaactagcccacttataagtggctcaaatgaaaacccacggggaggcatttttctttaataagcaaccctaagccccctttgaagtcagtctgactaatcaaaagaaagaggttatatatcccagttttgaccttctgtgaaaatagcccttttactgtatgtgatatattattggcatctcattctgcacagtccaaatgatgtagacaaaatagtgattggtatataactatggacaccgaagatccactgcaaggcctgccgatcactttacacagaaggagcccctttcctgaggtccgcttgctcgctcggggtggggtggtactttgccctagtaaactaccaagcagtccgaacgttcgctcctctggaagaccgagttgtgggcggctgcgctgcgggggcaaactcgccgcatgcccgctggccagagcgagtcggggcctggcgttagggcaatccagactggccggcatggtacagggcgtatccctagccgccttctgtgtcatatggggcgccgccctccagcctaggagaggcggccgctaggaggggcagaagggccttgtctgccccggtctgaataccccaggcggggtcggaaagcgggtcacagaagagcccagtaaactgcaggggtgcagctcgtctccaggaaccggcaacccccagggccgcacaagccggtaacaacccataatccgatcctgtcttcgggatcagaagagaggacagctggcccgcgcgccagctcagttcctcctccgcattcttcaggaggagccccagaaacgcacttccgccgcgcgggcctgcctccacgcagggcgcgtcctaggccggttcatttccgcccagcgctttctgtggctaggggagtcagggctttccttttcccttattcgggctcttatgttacccccgttttccgttgaacccttttctcccctcttgccctccaaaaaaagcagtctgctgccgctcccgacttttctcgctgagacaccgtcagctcactccgagcccagcacagcggccatcttcggtaaattctggcagcagcccgcctgttcattgtcctgtgtgcccagaggaaagaactactcatttttcgtgatcaagctaggggaggcaggagcaataatggccctgctataggactggcttttatttgaattccaactcttctgccaccttaaccagctgtatccagattttaaaagttaatctatccgagcctcttattaaatattaggttgatgagatgatgcatgcaaagcgcttagaacagtactaggcataaagcttccgacataaaggttaagtaaaagtaaggaaaagctatggggatgtattgagtatctctttgcccaatgacgtattagtcgtattaaatatggaaagtgcctttgattcgccgtgcccatgggagaaggcataggaatggccttttcccacctgtaatcagagagcaggtgtttcaagaacgcctcaatatgcttgcgatctctcacgcagcctttcaggctcctaattcctacgaagtttccgcttttattcaaattggctcactcctttttgcagggctttgtactgaatgagtattcttttaagggtggtggacaagcaaaggtttggtagcatcacatttttaatttcacagggaaaatgggtatgaaacatcttcccaagtacatcttagactgccagctgacagcaagccataatgctccccagctcttgggccctacaccccctctcccccatccccgctttagttctttgtcattgctcatggacagctggtttggggaccaggtgcagatgatgggaggtgtctgaaaaacagcaagtgagaaatgctagttttgttgttttaagttgcactgatgactccagtagttatctgtgctgcttgtgataatttataaggcaatgataacgaattaaacatacaaaagattattatcttccacaggaaaaaaaaactgcaaacttgtgacaccatttatgatccacttagtcttgagatactgagtaatagaactttctccttttaggctgagttatgaacttcggtttggtttctttctgcaatccctgcagggccataaattcttggcccttaagactgggtggcccataacagactcagtgataccatcagtaaccacaattcacactggagtcaagttatctgattcccacaccagttggagaactggagattccttagaacttttaactgtcatgttttcaaagttgacatggaaaattttacatgaagcttaaaaatacaactaatctgtggtgatagagacgagaagagttaagctctaaaattagaagagcagttcgttttgaggcagcactgattgggagggagcatggagtatataattacacatttctatgtaatgtaaaaatgtatagatttaagatttatgcattttatgtaaattttactacaataaaacgaaaatgaaagaagagatcatagtttaatcaaatattgtgtacaaagtaatttctgttaaacatttatatttttatgtgtatatgtatcttttacatgtatgtgttaaggatatgcattaaaatggtaataacttcctctgcctgttgggataatggagagttttgttactttttgtctttttttaaaacatgttcttcaataataatgtattgcttttgtaattatgaaaaacaaaagttattttgtaaatctttgttactgataagagatgggtattctgttaactactcaattctcatgtaggaaaacaaaatacataatgtctatttgataaatcgagaaacagaagcattacttagaaatctgagttacctctaaaataatgactggcatttgaagttgaggatgggtcttgagttcctgtgattttaagctcttggatatgagggttgggtgagttcctctttttctcttttaaaatatatgtatgtttaactttgctaaataaaatttaaaagatgc

SEQ ID NO: 712 - DNA, 3343 bp, Homo sapiens
aaaaggtctgtcatcctccagttgaagtctgtgtgcctaccaagaatggccggaggactcgctgcttgacgggagggatgctccagcttggtctccagggacaactgtacctggggataaagtctggataccagggagggacagagatgctcttccttccacagtgtggccacttgctgggccatgtgaaccagcagaggagagttccttggctatgctgttgttcccccgctgtccagggagaatggaggtggactgaggagtgaagtttgggcgaactgcacagagctgctcctcttcaccccgaaaatttgtctttttacagaatccaggttctcccctccctcatcactgctgttgcttcctttgaaagtctaaaccactggaggcttctttttccttcctctctccttccccagtttcctctgtcccaattaaaaccaggatggagagcatttgctggctggccccaattattgtacccttgcccaaagggaggggcctctgtcgtgacccctcagaaatctggcagtctgggtttccacctttcccctatttaactctcagcccccacccatcccctggggttgcggctggcaggccgggacttgcagaaccaaatgggccaggggccaagttcattcttttgggagagagcaatggtaccttcccttaacgggaaaacgagaaatattgaggggaagatggactgcgatccaaacgccctggctctcaggcctggactctagggcttagccagatgcctaaaccgcccaagccgagaaacaacttagaagacagatataaccctgggattcagggaaggcgcgagcaccgcccaggacctggtagggtgcgagccgcgagcagtccgggagggagcgcgcctagggcggagcgtaggctgtggggggagggctgggagtccggggccgccccacacccgcactcctcccgggtttctgctctccgcccgtgtggagtggtgggggcctgggtgggaatgggcgtgtgccagcgcacgcgcgctccctggaaggagaagtctcagctagaacgagcggccctaggttttcggaagggaggatcagggatgtttgcgagcggctggaaccagacggtgccgatagaggaagcgggctccatggctgccctcctgctgctgcccctgctgctgttgctaccgctgctgctgctgaagctacacctctggccgcagttgcgctggcttccggcggacttggcctttgcggtgcgagctctgtgctgcaaaagggctcttcgagctcgcgccctggccgcggctgccgccgacccggaaggtcccgaggggggctgcagcctggcctggcgcctcgcggaactggcccagcagcgcgccgcgcacacctttctcattcacggctcgcggcgctttagctactcagaggcggagcgcgagagtaacagggctgcacgcgccttcctacgtgcgctaggctgggactggggacccgacggcggcgacagcggcgaggggagcgctggagaaggcgagcgggcagcgccgggagccggagatgcagcggccggaagcggcgcggagtttgccggaggggacggtgccgccagaggtggaggagccgccgcccctctgtcacctggagcaactgtggcgctgctcctccccgctggcccagagtttctgtggctctggttcgggctggccaaggccggcctgcgcactgcctttgtgcccaccgccctgcgccggggccccctgctgcactgcctccgcagctgcggcgcgcgcgcgctggtgctggcgccagagtttctggagtccctggagccggacctgcccgccctgagagccatggggctccacctgtgggctgcaggcccaggaacccaccctgctggaattagcgatttgctggctgaagtgtccgctgaagtggatgggccagtgccaggatacctctcttccccccagagcataacagacacgtgcctgtacatcttcacctctggcaccacgggcctccccaaggctgctcggatcagtcatctgaagatcctgcaatgccagggcttctatcagctgtgtggtgtccaccaggaagatgtgatctacctcgccctcccactctaccacatgtccggttccctgctgggcatcgtgggctgcatgggcattggggccacagtggtgctgaaatccaagttctcggctggtcagttctgggaagattgccagcagcacagggtgacggtgttccagtacattggggagctgtgccgataccttgtcaaccagcccccgagcaaggcagaacgtggccataaggtccggctggcagtgggcagcgggctgcgcccagatacctgggagcgttttgtgcggcgcttcgggcccctgcaggtgctggagacatatggactgacagagggcaacgtggccaccatcaactacacaggacagcggggcgctgtggggcgtgcttcctggctttacaagcatatcttccccttctccttgattcgctatgatgtcaccacaggagagccaattcgggacccccaggggcactgtatggccacatctccaggtgagccagggctgctggtggccccggtagccagcagtccccattcctgggctatgctggcgggccagagctggcccaggggaagttgctaaaggatgtcttccggcctggggatgttttcttcaacactggggacctgctggtctgcgatgaccaaggttttctccgcttccatgatcgtactggagacaccttcaggtggaagggggagaatgtggccacaaccgaggtggcagaggtcttcgaggccctagattttcttcaggaggtgaacgtctatggagtcactgtgccagggcatgaaggcagggctggaatggcagccctagttctgcgtcccccccacgctttggaccttatgcagctctacacccacgtgtctgagaacttgccaccttatgcccggccccgattcctcaggctccaggagtctttggccaccacagagaccttcaaacagcagaaagttcggatggcaaatgagggcttcgaccccagcaccctgtctgacccactgtacgttctggaccaggctgtaggtgcctacctgcccctcacaactgcccggtacagcgccctcctggcaggaaaccttcgaatctgagaacttccacacctgaggcacctgagagaggaactctgtggggtgggggccgttgcaggtgtactgggctgtcagggatcttttctataccagaactgcggtcactattttgtaataaatgtggctggagctgatccagctgtctctg

SEQ ID NO: 713 - DNA, 3212 bp, Homo sapiens
ataacagccgtggtggttatggctggtctgagcggcgcgcagatccccgacggggagtttaccgcgctagtgtaccggctcatccgcgatgcccgctacgccgaggcggtgcagctgctgggccgagaactgcagcggagccccaggagttcgcgctggcggccgagtgctatgagcagctgggccagctgcacccggaactggagcagtaccgcctgtaccaggcccaggccctgtacaaggcctgcctttatccggaggccactcgggtcgccttccttctcctggataaccccgcctaccacagccgggtcctccgcctgcaagctgccatcaagtatagcgagggcgatctgccagggtccaggagcctggtggagcagctgctgagtggggaagggggagaagaaagtggaggcgacaatgagaccgatggccaggtcaacctgggttgtttgctctacaaggagggacagtatgaagctgcatgctccaagttttctgccacactgcaggcctcgggctaccagcctgacctttcctacaacctggctttggcctattacagcagccgacagtatgcctcagcactgaagcatatcgctgagattattgagcgtggcatccgccagcatcctgagctaggtgtgggcatgaccaccgagggctttgatgttcgcagtgttggcaacaccttagttctccatcagactgctctggtggaagccttcaaccttaaggcagccatagaataccaactgagaaactatgaggtagctcaagaaaccctcaccgacatgccacccagggcagaggaagagttggaccctgtgaccctgcacaaccaggcactaatgaacatggatgccaggcctacagaagggtttgaaaagctacagtttttgctccaacagaatccctttcctccagagacttttggcaacctgttgctgctctactgtaaatatgagtattttgacctggcagcagatgtcctggcagaaaatgcccatttgacgtataagttcctcacaccctatctctatgacttcttagatgccctgatcacttgccagacagctcctgaagaggctttcattaagcttgatgggctagcagggatgctgactgagcagcttcggagactcaccaagcaagtacaggaagcaagacacaacagagatgatgaagctatcaaaaaggcagtgaatgaatatgatgaaaccatggagaaatacattcctgtgttgatggctcaggcaaaaatctactggaatcttgaaaattatccaatggtggaaaagatcttccgcaaatctgtggaattctgtaacgaccatgatgtgtggaagttgaatgtggctcatgttctgttcatgcaggaaaacaaatacaaagaagccattggtttctatgaacccatagtcaagaagcattatgataacatcctgaatgtcagtgctattgtactggctaatctctgtgtttcctatattatgacaagtcaaaatgaagaagcagaggagttgatgaggaagattgaaaaggaggaagagcagctctcttatgatgacccaaataggaaaatgtaccatctctgcattgtgaatttggtgataggaactctttattgtgccaaaggaaactatgagtttggtatttctcgagttatcaaaagcttggagccttataataaaaagctgggaacagatacctggtattatgccaaaagatgcttcctgtccttgttagaaaacatgtcaaaacacatgatagtcattcatgacagtgttattcaagaatgtgtccagtttttaggacactgtgaactttatggcacaaacatacctgctgttattgaacaacccctcgaagaagaaagaatgcatgttgggaagaatacagtcacagatgagtccagacaattgaaagctttgatttatgagattataggatggaataagtagttatgactgatagtggcttttttcaaaatggctttcttacgtaccacacttttttttatctgtatttagccttggcatctttatatttgtcttattttgaatcttatccactttgtaagaacaagtttatgtttgagcaactttttcatttaatccagaagggtagggactatgcagtgtaagctgcatcacttctgctttcttcctactagtgacaatcatctggtcttgccctcaagcaacaattgctagagtaacatctttgtataagcaagtaaccccagatagagttgacgtttcagctttgggctgtcaaaagggtatgtcatggaccaaagcactgttagtacgggtatgtttgcatttggtcactgatatgtaaatgactgctagcccacggctggaccacttctcaatcagcaaataaagccatgtctattttgctatctcagcatagactatgctgtctgataaatctaattcttaactctatttctccagttttttagtcctttaactttctggattgcaacgaagtctagtttagacctctaagcccttttagaagtacaagtataatgggaatttcttttcttggttcttttcaggttatgaggtttggtcagtgacaaaattttttttcataatttggttgattggttgcttcttaagttttataataaacgtttttcttcatgttctatttttgattttacataaatgattttgcctccttgtggatactgacatatattaagtgtggaagcttattaatatttttggttttttaaaaactgaaatttttaatttttactttttaattttttaggaaaaaataagcactgaactgagaatgagaagaataaaagtatgagttccataccttctaattttaggctgtcagaaattcctttattctttgggatttcacaatcatttgaactatcagaagcctttacaattacttttagctgtaacatccgattctgtataagccacatagaaaaaagttgcctttctttttttatgacctggatatataagcaaatcagctaggaaatatataattgtattttatattaatgttttctaggattttggcttacagtaaatgttagcccctatggtaagtgattgttattgttggatgttatactgattattaataagaaatttggatttttgcctttttacctggaatttttgcttacagccgtagctatgaatatatatagggtggtcccc

SEQ ID NO: 714 - DNA, 3686 bp, Homo sapiens
atggatgacccatctccctgtgggacttctgagatgtgcccggctgccctctatggcttcccctccaccgggaccagccctccgaggcccccagccaactccacaggcaccgtccagcacttacggagtgactccttccctggttctcacaggacagagcagactccagacctggtgggaatgttgctttcctactcccactcagagctgccccagaggccccccaaacctgccatctacagctctgtgaccccaagaagggacagaaggagtggtagggactacagcaccgtttcagcatcccctactgccttatccacgctgaagcaggactctcaagaatccatctcaaatctagagagacccagcagtcctcccagcatccagccctgggtctccccacataatccagcctttgccacagagtctcccgcctacggttcttccccatcctttgtctccatggaggatgtgaggatccacgaacctctgccccctcctcccccacagaggagggacacccatccctccgtggtggagacagatggccatgctcgtgtagtggttcccacgctgaagcagcatagccaccctcctccattggccctaggttcagggctgcatgccccccataaaggcccacttccccaagcctctgaccccgctgtggccaggcagcaccgacctctgccatctaccccagacagctcccaccatgctcaggccacccccaggtggagatacaacaagccgctaccccctacccctgatttgccgcagccccaccttcctcccatttctgctcctggtagctcaaggatctacaggcctctacccccactacccatcatagaccctcccaccgaaccacccccattgcccccaaagtccagggggaggagcaggagcactcggggaggacatatgaactcagggggtcatgccaaaacaagacctgcttgtcaagactggacagtccccctccctgcctctgctggacgcacctcctggcccccggccacagctagatcaacagagtctttcacttccaccagcaggagtaagagcgaagtgtcccctggcatggctttcagcaacatgacaaacttcctatgcccctcttcccctaccactccctggactccggagctccagggacccacctctaaggatgaagcaggggtctcagaacaccctgaggcccctgcgagagaacctttgagaaggacaacccctcagcaaggagccagtggcccagggaggtcacctgtgggccaagcaaggcagccagaaaaacccagccatctgcacctggagaaggcgtccagctggccccacaggcgggactcagggaggccaccaggggacagcagtggacaggctgtggctcctagtgagggggccaacaagcacaagggctggagccggcagggcctgcgcagaccttccatcttgcctgagggctcttcagattcaagaggtccagccgtggagaaacatccgggaccctcagacactgttgtttttcgggagaaaaaaccaaaggaggtgatgggaggcttttcaagacgctgctccaaactcatcaactcctcccagctgctttaccaggagtatagtgatgttgtcctgaataaggagatccagagccagcagcggctggagagcctgtccgagacacccgggcctagctctccgcggcagcctcggaaggccctggtctcctccgagtcgtacctgcagcggctctccatggcctccagcggctccctctggcaggaaatccccgtggtgcgcaacagcaccgtgctgctctccatgacccatgaagaccaaaagctgcaagaggtcaaatttgagctgattgtgtcagaggcctcctacctgcgcagtctaaacatagctgtggatcatttccaactttcaacttcactccgggccacactttccaaccaggagcaccaatggctcttctctcgtttacaggatgtgcgagacgtcagcgccacgttcctttcagacctggaagagaactttgagaacaatatcttctccttccaagtatgtgacgtagtcctgaaccacgccccagacttccgccgggtctacctgccttatgtcaccaaccagacctatcaggaacgcaccttccagagcctgatgaatagcaacagcaatttccgggaggtcttggagaagctggagagcgaccccgtctgccagcgcctttccctcaagtcctttctgattctgcccttccaacgcatcacccgcctcaaactgctgctccagaacattctgaagagaacacagcctggctcctcggaggaggcagaggccacgaaggcacaccacgccctggagcagctgatccgggactgcaataacaatgtccagagtatgcgacggacagaggaactaatctacctgagccagaagattgagtttgagtgcaaaatattcccgctcatttctcagtcacgctggctggtgaaaagtggggagctgacagccttggagttcagtgcttccccagggctacgaaggaagctgaacacgcgtccagtccacctgcacctcttcaatgactgtctgctgctgtctcggccccgagagggtagccgattcctggtatttgaccatgctcccttctcctccattcggggggaaaagtgtgaaatgaagctacatggacctcacaaaaacctgttccgactctttctgcggcagaacactcagggcgcccaggccgagttcctcttccgcacggagactcaaagtgaaaagcttcggtggatctcagccttggccatgccaagagaggagttggaccttctggagtgttacaactccccccaggtacagtgccttcgagcctacaagccccgagagaatgatgaattggcactggagaaagccgacgtggtgatggtgactcagcagagcagtgacggctggctggagggcgtgaggctctcagacggggagcgaggctggtttcctgtgcagcaggtggagttcatttccaacccagaggtccgtgcacagaacctgaaggaagctcatcgagtcaagactgccaaactacagctggtggaacagcaagcctaagtcttctctgagaggagtttcgtgagctgaagaacaagctgctcatggcaagggctggccccagaaccctgcaagagaggccttctgtggatggagaactaggccttctcaaagctcaaggacaaaatccagctaacccagtccctcggcccaggcctcctttcgtgctttgtgcttggtgggggggatttcgagggactttgcactggactctgggaacctttcatcattaaaaaaagggggaccattggggcctgagccaaggaactttccttctactgccttatagtgcttaaacattctccgcctccagggtgcagattcagagctggccagagtttcagtgatagccgtatgttaaacagaatctcacctcagtctcctggagggagatgtttaagaggggttaacacatcagatgggagggtcagcccggtgacctctaaggtatcttctaacctagaaattcaccataattatggtgcaaggtcagtgtgtctctgagatctatgtctgttggtggcaatgtgagggtgatactctctcactctaataaacttggcacttctccgagt

SEQ ID NO: 715 - DNA, 3505 bp, Homo sapiens
aagcaagtgctgcagagggcagagggaagcatggcccagctgccccaccaccacgtcccagagcctgccttcaggaagctggtggaggacgcactgggccggacgagtaaccagcttcgctcctttcaagagacctttgagaaagtgcagccacctcccaccacacaactgctccttccagggtctgaacgccaggtgcaggctctcctgagcaggtatggccctgggaagctgtaccaggtgacaagcaacatcagtgggactgggactctggacctgactctgcctcggggccaaatcgtggccatccttcaaaacaaggacaccaaaggcaacagcggccgctggctggtggacaccgggggacatcgtgggtatgtgccggctgggaaactgcagctgtaccatgtggtccccagtgcagaggagctcagaaggcaggcggggctgaacaaagacccccgatgtctaacaccggagcccagcccagctctagtgccctctattcccaccgtgaaccaggtcatagccgcgtacccttttgtggccagaagcagccatgaagtgagcctgcaggcaggccagcctgtgaccatcctggaggcccaggacaagaaggggaaccctgagtggagcctggtggaagtgaatggacagaggggttatgtgccttctggcttcttggccagggctcggagcccagttctgtggggctggagtctgccctcttagggtaccctctttggagcctacattgccaaatgatgggggaggcttagaggctctgaccctggggggaaaagaagcaaaggaaaggtggaggtggaagggaagaccaggccagggtgggtgaagcacactcaggaggcagccagaagacatgggcgggcctcgcagagtgcttggtgtggtgggggcacaggaggctccagccaggactgctcattatgtctgcataaagaactcattccgacctggggtcacaatgcacttggacagcaggtcacagctgattggccaggactctccacaggttatggccagtcttagctgtgcctgcatccgggcctgcctgtgggcgtgggtcacacgggataatgttacctgcgtgctgtgtggttgcaggaagcgggttctggaggagtccagaactgcctggtcagacagttcacttcctacacatggtatcaggagacatcataaccaatgagtcagcttttatttctctatgctggaagctgagtttatcttgggcagtgacccactgggagccctctcaagtggggaagccatggatttatcggtgtagcagagaggttcccaagactcttgactggtcctgggagtgggtgtgaccaagtcatagttctggaatgtgtgtaggcaaattcagaggctgttccagggaagaggggattttgatactgtgttaggtgtggtgtgtgaggctgttggcagcaggtgaacagctactgctgtgttctcaggactagggaacaaaggggtatgcaaatcatagaggaaactctgggaaggcggtgataaggcctggtgggtggggaggttagggaatggcttgctttcctgtttctggttagaaggggagccagggggaacccccagtggtttcaggtggcccctgaggtcctggaggcagccgtggatgtgatgcaattggctgtgggaccttagatgtaggacacaacttcagtgttcccatccagaaagacctcactcacagggttgtgctgagaatgacgtggggctaagcatgcagagctccctgtaaactgtgaagtgtgatacaaatgtaaatgacagcagtgatctcggggtggcccccggcatgctgccctcccccacgcccatgcctgtggcagcaaaccttgttcatcagtatagctttctttcctgtaacccaggatctaccttggggggcttctcaatactgcattctatgtagccagcctctttaacttggtaagtgagccaccccattctagaacctggaaattggagcccctcaaaaacagttcctgttcaaggaggactgacctgctggggcaatgttgggtgcagtgcagtccctgcttggggtggtcatgtctaggctgttgctctgggcaaagataagttgcaagattcacagaaatgggaaaatgtgaccaagtgtgatcttaacaactgacaaagtttgtaaccaacccaagttagaatgtgtgtcaaacaggaggtagtttagatatgcttccaagaacatgtctgtgttataaccatagtgcctaagcagtgagctctggtttttgaagggcttttaagaaatatatacatgtctgtgtcagtctataacttgcctcctctgggcctgttaaagcatgaagactgcatgacacaagagaaatgcaagccctacggttcctttctcagcagcgaattcacttgagaggatgctcttgactcattctctctgctctttcctgctcagatttctgataaaaatagagagcataggggaacagataatgaaataggaaacccactcgtgggttccacagatacctaccgaaggcctactgtgtgctagaattgtagctcaggagttctcagtgtagctgctcactgaagttaccatggcaggtttcaactggcagaatccaggctccgtcccacccagagattctgatgaaattggtttagggtgtggctcgggcctcaggaattcagaaagcttcccaggtgcttccaatgtgcagccagggttagggacctctaccctagacacaaagtattggacagatagacctggtgccagagatggccatgagctgtaagctaggacgtgccccacctgagctctgcactagctagttcaaacaggcgctttaaaggcagtgtgaaaggggacagcctgttctgccaggtctcagaatgtatatttattaagtgccattaaaagggacctgaacaaaattggatgtcttgtaggcataagggaggaaaataaaatatacttggaaccaagtctatgtcatgaagggaaaataaaaatgtattcagtagcacgtgggttatggtttctcatagaccaggggataagattaaaagtcactgaagagtgggaaaatgcatgttgagaagatgagaatggcctgtattttctccaggggaatctgtgtaatgtgccttttccctctccaaatgcctagaaccatggcactgtgtcttatttatttaaccgttgggctgtctcatactaaacttgcaaagatatttgcctatgaactgaacaagacttccaggagttgaagtctggttcacaagggtaccccttgcctcctgtgatggagtgagaactcttaaacccctcaggccccaactcagttgtggagatgagggcaagattacaatatcaaaagaaagatgaatgaattcttggttaatatgacgaaccccagctcaatgagtaactgatgtgaactgctgggaataaaggacttcaaagatg

SEQ ID NO: 716 - DNA, 3397 bp, Homo sapiens
ctctgctaagatggagcctctgtttctgcatttatgcatcattggggtgggaaactctgtttccttttttctagacctttctcttcctgctgcccttctgaaggacctcattcccccttctcccctcattggccgtgatagtccacagggaacgtcagccccagcgcagcttgtgctgagaccaccatggccctgtggtgcgggtcttctctcaggccttgcgtgctcactacagaggtctggggtgtttctgcagggttttctcctccactcagcacgtggagagatcgcccatggcatggagagatggcccagacccacagagacctcgccgcatagaggatttgcccagacccctagaccccgccacgtgaggaggtcacccaggcccgtagggctcccgtggtgtgcggaggcgcagaacaagctcaggagtctgctgacctggtgcgccacaccccggggaccgccagtgggcgtgttcgaggctccgctgaccagggcgctgtcaggtctggttcgggcagcggctttgcctctgtgataggtgtcccgtccctctttcttcctgtgctccctctacactagcctaagggaagtcagtttcctttttttaataaattttaatttttgtagatacatagtaggtgtttatgggttataggagatattttgatacaggcaggcaatgcgtaataatcccatcagggtaaatggagtatccatcccctcaagcattgatcctttgtgttgcaacaatccaattatgctcccttagttatttttttaacgtacacttaaattactgtagtcacccttgtactagcaaacactaggtcttatttgttctatttttttttgtacccattaccatccccactccatcccccactactgttcccagcctctggtaaccatcctcctgctctccatctccatgagttcagttgtttaaagtttagctcccacagataagtgagaacatacaatgtttgtctttctgtgcccggcgtatgtcacttaacacagtgacctccagttccatccatgctgttgtaaatgacaggataccattcttttttatggccgaagagtactccatcgtgtatatatggcaattcctttatccccttgtctgctgatggacacttaggtggcttccaagtcttggctgttgtgaacagtgctgcagcacacacgggtgtgcagtgatctctgatagactgatttcctttcttttctttggagtatatatctaggcatggattgctgcgttgtatggtagctctattttttgtttttttgtagaaacctcaaactgttctccctagtggttgcactgatgtacattcccaccaactgtggacaaggggtgagggaagttaatttcatggtaacaccaagcctttcctttttgtcagtttctgttcttatgatcattcattagaaggcagattcactgaagaatgtcgttttacctagtttaaactggctagattcttttcaaggttacaattttgaaccccaccttgtcccctgagtcatcgaggtagcccaagataacggttaagaggaaacatcctttgtgttggcagcaaattgttctccagtttctgttaagtagtgtcccttgcaggtgaggagaggctgctttcatcctcagcaggtagagaccggggagtcggaccagcggaaatcctcacctcctggggtgggccgtgtggggagtgttaactggcaagacgatctaaattctctacccagatcacagcggctacagcagctttgctttcagagaagaaaacacaaaaaaaagtgcccaaaagttaaaaagcaagtggtaaaaccgggaagcgacacgttgcacaaaacgtatttggtacgttaaaaaggccagaagcacggtgccctgtaggaatgagactgacatcttcacaaaaggtcatcatcagtctcatgtgacattctccatgcttttttttaaagacagggtctcattctgtcacccagcctggagtgcagtggtgcagtccctggtcactgcagccttgacctcccaggctcaggtgatcctcccacctcagcctcccaggtagctgggaccacaggcgcacaccaccatgcccagctaatgttttgtatttttgtagagatggggttttgccatgttgccccagctggtctctaactcctgggctcaagtgacccacctgcctcggcctcccaaggtgttgggattacaggcttgagccaccgctcaatcccagaagtgttgggattacaggcttgatgcttttcttaaaaaacatattccccatgtatgatgtctgcagatacttcaagaacatcataaacaccactttcaccatcagctgggagcagagtccctccccattcactgtcgccccacgccatagggacttggtgatgtttacagtgtgtccctgtgggcgaacgggataaggaaaagatggtgcacatacactgtggaatactacgcagccgtaaaaaaagaaccaaatcatgttgtttgcagcaacatggatacagctggaggccattatcctaagtgaattaacacagaaacagaaaaccaaatagtgaatgttttcacatatcctggccaatttggagcaaggcttagcagaagacggcggcatgagcagcgtgactcaggagggcagacaagcctctatccggctgtggaggtcacgtctgggccgggtgatgtactccatggcaaactgtctgctcctgatgaaggattatgtgctggccgtggaggcgtatcattcggttatcaagtattacccagagcaagagccccagctgctcagcggcatcggccggatttccctgcagattggagacataaaaacagctgaaaagtattttcaagacgttgagaaagtaacacagaaattagatggactacagggtaaaatcatggttttgatgaacagcgcgttccttcacctcgggcagaataactttgcagaagcccacaggttcttcacagagatcttaaggatggatccaagaaacgcagtggccaacaacaacgctgccgtgtgtctgctctacctgggcaagctcaaggactccctgcggcagctggaggccatggtccagcaggaccccaggcactacctgcacgagagcgtgctcttcaacctgaccaccatgtacgagctggagtcctcacggagcatgcagaagaaacaggccctgctggaggctgtcgccggcaaggagggggacagcttcaacacacagtgcctcaagctggcctagctgcctccaacacactacgtcagaaggacccgggtctttgaaactgtgtcttgaagctaatgtattaatgtgacatggaggaactcaataaaactcctgcttc

SEQ ID NO: 717 - DNA, 3815 bp, Homo sapiens
ttgatgccgtcacaggtgagtcaaaagagaaccaactagggacgtactggaagggtgaacgtccctggattcagatgttggacctggcgtttggggtgtaaagatgctcagtaaagcagtgtgtgggtgagcgttcacgatcccaaacacggactgttcagcaaaacctgacatccatctcagaggtgggaaaagccttgactttggctgacagggtttaagtctcccgaagagtttcctggggtgcggatattttcatttgtctcctgagatagccatcttcttcccctatttctgcttcatgatgagaacgttctagatatgatgaccctgtcttgcttggcactgcttgatgcatcccatcagacagcaaacccctgggtctgcagctgcgctcacagccgcagagtgcagttatttttttctttcgcacgatggtttaaagtggcggcatgcagcctgtggcctgaatgaaatcctgtggcctaattgaaaagaatgtgttttggcatccagtcactcaaaaaaagaagaaagtgaagaccgtgttgcagggctcatgggcatgtgacggggcggctagaggaaagggcaggcggggctggcagcttggccttccagagccgccccttctcctggcacagggaagagcctgaaaccctttgagctcgtgtcttgtcaggtcctcatgttcattctccactcttctgtgcctcggagtcagcatctggaattccgcttgttttttctggaaaggaccattgctggtgggaaggggcatcaggagattctccttgatgttcctttgtccttaggcgtcgggatcagaaaggagtggctttggaaatgtggccgcaggccaggaattagtgatgatctttagaagcacttctgcggttactgccgctcaaggatctgtcagggtctctatggccatgccccaaggacacggcgatggctccgttggcacctccagtctgtggccctgccagggtgggtgtgtcaggagggtctctgtggccacaccccgaggatgttgatggctctggtggcgcctccggtccgtggccctgctggagcgggctgattgtcccgaggctgtgctgctcctgtacctgcgctggcagctcaagatggttgacttactcttatccaaaaccccaggagaaggggatgatgcgctccttaccggcttcaaaggctcaatttcgaagtcattttccatgatttcgtagctgaattatctgcagcgtgtttgcctcggatgcactctcagaggagggtccatggagcttgcaactcatccatggtggttctgtgttctctgctgaatcccacacagcggagggattgtcaggctctcacacccttgggctgacctctagtgggatgccacgtctgtcacagagagcgcagccttgaggtccctcctctcctgggagtctcataggatgtcctttttgtctggggtcttggtgtgactgatactttcccgaatacctctggccattttttttttttttttttgagccagagtcttgctttgtcgcccaggctggagtgcagtggcgtgatctcagctcactgcaacctcctcctcccaggttcagatgattctcttgcctcagcctcccgagttgctgggattacaggcatgtgccaccatgcctggctaatttttgtatttttagtagcgacagggtttcgccgtgttggccaggctagtcttgacctcctcaagtgatccacctgcctcggcctcccaaagtattgtgattgagggtaggagccaccatgcccagcccagaggcacttttcaaaagacagatctggacccccccccaccccgtcaccctctgcctaaaactcaggcaggatgaccacatggccggcctcacactcctgctcctacagaactgtgaatggcgccctgttatactagaagaaatgacccagctcggacagtgcaccatgtggtcactcacctcttaggaagaaagccagcaccctcacctgtgccctcaggcctggccccgagccctgttgcctcccgtcccagctgcaggggcctctttcaggtcctcgggtgtgtcagctccctctgctcccttggcctggggcctcttttctcttctttcatgtctgttgttcctacgcatcccatctccatgcagggtcgtatccttgggggatgcgacctgaccttctgcagagccactttcccctcctggtagcacctccgaatcacaaagtattcactgaatgtgtgcacggacgatggcggagcagagctgggtgctggcttccggcagcccgggcctggtactcagcagatgttccttttcttttccaccctgcctcatagctgccatgtcctttccctcctgccccctgacaccagtagtgtgccctgacccagctgccctgacgtggcattcccggggcatagctcgggagcagagcagacaagagctcgtgctttcatcactctggaggtcagagtgttggtgccaaggttctgctgggtgtgaggcaaaacgcccctcaaagcagcttccatgaaatgggagttcagcaggagagccctggggtgtccctggagggctgtgagcagcagggagccccgggcccctactctgcagcaccttctttgcaccctgctctgtggtgtcctgtgtgggtctggcacgcctctccccaaatccaagtttatgtctccattcaggcgctcccctcctagatggagacagtatctcattccagctccacgttcctggtggggagaccagggccccgggtcagtggtcccagttgatgagtggtgagcagtggtgggggtgagggtctcctggtgcaagcatgagggcatgggctccgccttgcagccgactggaagattacctggaaagaaatgctcctcaggaaagcaagcacgtgtttaaagggcggaacagcttttaattcaggtcactcttgctgccctcttacctctgtctgtggtctggccgctgccccagggacccagcaggagcccccagaaggctgtgggctctgcgggcagagggactccctccagctgccaccctgtcctccagctctgagaggaaacaacagcagggccactgcggggccaagactgcagagtcatctttgttgtcatgaccattcccaggaagccctgggaacatgggtgtggaaggcctctaggcagcagtcgtgccctgtgtccctaggcatgccagaatgtagaaatgccaatgtttaggagtaaaaattaaagagaaatcgtcattgagcacagcctccttgagtggtcagagtcctgtgttgaattcacccacacgcaccccttttgtgcttcgcaggacatcgctgccggctcccatgttcagcagaagcgacttcagcgtgtggaccatcctgaagaagtgtgttggcctggtgagtccgggggcccgtgttcacacatggggctgcaccactgactcctgggaaggtattgcagtgctggtggtttaagaaaatgcgctcttggccgggcgcggtggctcacgcctatagtctcagcactttgggaggccgaggtgggcggatcacgaggtcaggagatcgagaccatcctggctaacacagtgaagccccgtctctgctaaaaattccaaaaattagctgggcgtggtggagggcgcctgtggtcccagctactcgggaggctgaggcaggggaatggcgtgaacccaggaggcggaggttgcagtgagccgagatcgtgccattgcactccaggctgggtgacaagagtgagattccatctc

SEQ ID NO: 718 - DNA, 3793 bp, Homo sapiens
ttggattgtttgatttcttattattgagttttgggagttctttatgtattgtggatacaagttccttattaggtgtatgatttgcaaatattttcttcaagcctgtagcttgttctttcattttcttaacaatgtcttttgtttttaatttcaaagaaatccaatttgtcaatattttcttttacagattatgcttttgatgtaagaaatctttgcctaacctaagtcacaacaatattctcctagaagctgtagaaatttcaatctgtaatgatcaattttgaactcgtttttatatttatttatttatttattctttgagatggagtctcactctgtcgcccaggctggagtgcaatggcactatcttggctcactgcaacttccacttcccaggttcaagcgattctcctgtctcagcttcctgagtagctgggattacaggtgtgtgccatcacgcccggctaattttttgtattttagtagagacagagttccaccatgttgcccaggctggtttcgaattcctgagctcaggccatccacccgcctcggcctcccaaggtgctaggattgcaggcgtgagccaccatgcccgacccagaacttatttttaaatatggtgtgaggcatggagcaaagtttacttttttacatgtgtttacccaattgttccctcaacatttgttgaaaagacatttctccactgcattgttttatgtctttgttgaaaatcagtgtatttttggactcttgattctaacgttccattgatgtttgtcttgatttatttttttggccttgaaacaacaatttattttcatctctcatgatattggaggttggccaggttcagctgggcaattcttacttgggttctctcatgcatttgcagttggatgatggctggagcagcaatctggaggctcaaggaggctgaaggccacatatgactccttcatttccatatctagcacctcagtggagtaggctggaacagctggggaatgattgagcttctaattctctccctacctcctatctatgtgtctagttttcacttcttcacagtacggcattctcaggaaagtcagacttcttagtagtggcttaccctagaatgacttttccaaaagcacatgtttcaagagacccaggcagaagctgcaaagtttcctgtgacctagcttacacatcctatagtttcttttgccatattctgtaaggaaagcaagttgctatggccagaccaggttgaaggagaagggtatgagactctacctctcgatttcaggagcattattacggagagggaaggattgttggttgcttctgtataagcaatgccaataatagaaggctccactgtcctgattaatgtagctttataacaagtctcaaaatcaagcaatgttagtccttcaactttgttcttcctttacaaagttgttttgactgtgctaggtcccttccatttacattcgaattttagaatcagtttgtcaatttctaccaaaaagaaagcccatatgaaattttgatcaagattgcattgaatttatggatcaatttaatgagaacttacaattcaaattattttaagatcaatttggtgaaaatttacaccttaaaaatattgagtcttttgacctatgaacctacttaggttttctttaatttattttagcaattacattataattctcaatgtatagatctttctatcttttatcacatttgccctattttatacgttttgacccattataaatggtatttttaaattttcaatttccggttgttctttgcaagtatatagaaacataattgatttctgtacattagccttatattctatatttttgctaaagtcacatttttagttctagtagtctttttttcataggattttctgcatacacactcatgtcatctacaaataaagatggcttttcttctttatttccaatctcaatctcttttgtttccatttcttgctgttgcactggatagcaccttcagtacaatgttgaatttgtgagagtttctgatcttaagaggaaaacactcagtctttcaccattaagaatgatgttacctataggcttttcatagatgttcccttagcaggttgaagaagtttccatctattcttagtttgctagactttttatcaggaacgtttgctgagttttatcaaatttttttctgcatctattgagacatgcaatcttctagtgccatcattttacaagctcaagtgaagtgtagggcacttacctttctttacgtcctactatcctctctgtttataatataattgcttaaatattttctctgcatatatttaggatcacattagatagttataatttttacttcaactgtcaacataatttagaaaagtccagtgaagaaggaaagtctattatacataccaatatttttgcttactattatgttaatatgttctttcttccttactgatgctccaatattccttcctttactgtttgctttttgtttagaaaacttttttttagctgttcatttatagtatgtctgctggtgacagatacttttagttttccctctcctgagaatgcctttatttccattttattcctgaaggacctgtgattggggtggggctgtggtattttaagtggtgtttggctagagtggagcggttattgcccaaagcttttctgtcttgctgggctgccactgtccagctccttaggctggagagagcaggcttttgttggggccttcttggtctcatttggaatttctgagttcagtttcttcaactatatatctgggatatacaagacagaaagaaaccagggcactctccaccatgttgttcctccagtctcaagatctctagacagtctgtcttctctccatctttcagagtcttcttgtgcatgttttttatataacatctacactttttagtggcgcttagcagaagcaatgggacaagtatgtctactgcagctttctggaagagaagctcctcatttctttttttggatacatttcaaaagaagttgcaaatatatgaccctacacatttcagtatgcatatcattaactacagctcaacattagtttatatttttctttttcttgtgtgagatgaaaactatacatacattgccatcaggctttgcccaggcatcagaactcactagacagcagaatatacatctttgagaggaaccacagaaatgtaatgtgcatgctaaggcttttacctgaacatcaaaatggaaacatcagagtattcatattagagagcaaccttacaattataatggatgtggtaaggctttttaaaaaatcaatgttcaaagacatagaatcaaccaaaatggccatcagtgatagactggataaagaaaacgtggtacatatacaccatgggatactatgcagccgtagaaaggaacgagatcatgtccgttgcagggacatggatggagctggaagccattatcctcagaaaactaacccaggaacagaaaagcaaacaccacatgttctcactcataagtgggagctgaacactgagaacacatggaaccagggagaggaacaacacacactgaggcctgccactgcaggtgggggttcaggggagggagagcatcaggaaaatagctaatgcatgtcaggcttaataagtaggtgattggctgataggtgcagcaaactgccatggcacacgtttacctatgtaacaaacctacaaatactacacatgtaccccagaactaaaagt

SEQ ID NO: 719 - DNA, 3850 bp, Homo sapiens
ctcccgggccgccgcgatcatgtcggaccaggcgcccaaagttcctgaggagatgttcagggaggtcaagtattacgcggtgggcgacatcgacccgcaggttattcagcttctcaaggctggaaaagcgaaggaagtttcctacaatgcactagcctcacacataatctcagaggatggggacaatccagaggtgggagaagctcgggaagtctttgacttacctgttgtaaagccttcttgggtgattctgtccgttcagtgtggaactcttctgccagtaaatggtttttctccagaatcatgtcagattttttttggaatcactgcctgcctttctcagggtgttgatacaagctggagctctttgttggagtcttccagagctctcccagggagaggtagggaagggagcttgtccagcagaagttgggaagcacagagatcatctgccttcttctgacccggtattgatgcaggctgaggcctctgttgtaatgtgctgggtgtcatctgaagacagaagtgccctgtgggctttggttacgttctatgggggagattgccagctaaccctcaataagaaatgcacgcatttgattgttccagagccaaagggggagaaatacgaatgtgctttaaagcgagcaagtattaaaattgtgactcctgactgggttctggattgcgtatcagagaaaaccaaaaaggacgaagcattttatcatcctcgtctgattatttatgaagaggaagaagaggaagaggaagaggaggaggaagtagaaaatgaggaacaagattctcagaatgagggtagtacagatgagaagtcaagccctgccagctctcaagaagggtctccttcaggtgaccagcagttttcacctaaatccaacactgaaaaatctaaaggggaattaatgtttgatgattcttcagattcatcaccggaaaaacaggagagaaatttaaactggaccccggccgaagtcccacagttagctgcagcaaaacgcaggctgcctcagggaaaggagcctgggttgattaacttgtgtgccaatgtcccacccgtcccaggtaacattttgccccctgaggtccggggtaatttaatggctgctggacaaaacctccaaagttctgaaagatcagaaatgatagctacctggagtccagctgtacggacactgaggaatattactaataatgctgacattcagcagatgaaccggccatcaaatgtagcacatatcttacagactctttcagcacctacgaaaaatttagaacagcaggtgaatcacagccagcagggacatacaaatgccaatgcagtgctgtttagccaagtgaaagtgactccagagacacacatgctacagcagcagcagcaggcccagcagcagcagcagcagcacccggttttacaccttcagccccagcagataatgcagctccagcagcagcagcagcagcagatctctcagcaaccttacccccagcagccgccgcatccattttcacagcaacagcagcagcagcagcaagcccatccgcatcagttttcacagcaacagctacagtttccacagcaacagttgcatcctccacagcagctgcatcgccctcagcagcagctccagccctttcagcagcagcatgccctgcagcagcagttccatcagctgcagcagcaccagctccagcagcagcagcttgcccagctccagcagcagcacagcctgctccagcagcagcagcaacagcagattcagcagcagcagctccagcgcatgcaccagcagcagcagcagcagcagatgcaaagtcagacagcgccacacttgagtcagacgtcacaggcgctgcagcatcaggttccacctcagcagcccccgcagcagcagcagcaacagcagccaccaccatcgcctcagcagcatcagctttttggacatgatccagcagtggagattccagaagaaggcttcttattgggatgtgtgtttgcaattgcggattatccagagcagatgtctgataagcaactgctggccacctggaaaaggataatccaggcacatggcggcactgttgaccccaccttcacgagtcgatgcacgcaccttctctgtgagagtcaagtcagcagcgcgtatgcacaggcaataagagaaagaaagagatgtgttactgcacactggttaaacacagtcttaaagaagaagaaaatggtaccgccgcaccgagcccttcacttcccagtggccttcccaccaggaggaaagccatgttcacagcatattatttctgtgactggatttgttgatagtgacagagatgacctaaaattaatggcttatttggcaggtgccaaatatacgggttatctatgccgcagcaacacagtcctcatctgtaaagaaccaactggtttaaagtatgaaaaagccaaagagtggaggataccctgtgtcaacgcccagtggcttggcgacattcttctgggaaactttgaggcactgaggcagattcagtatagtcgctacacggcattcagtctgcaggatccatttgcccctacccagcatttagttttaaatcttttagatgcttggagagttcccttaaaagtgtctgcagagttgttgatgagtataagactacctcccaaactgaaacagaatgaagtagctaatgtccagccttcttccaaaagagccagaattgaagacgtaccacctcccactaaaaagctaactccagaattgaccccttttgtgcttttcactggattcgagcctgtccaggttcaacagtatattaagaagctctacattcttggtggagaggttgcggagtctgcacagaagtgcacacacctcattgccagcaaagtgactcgcaccgtgaagttcctgacggcgatttctgtcgtgaagcacatagtgacgccagagtggctggaagaatgcttcaggtgtcagaagttcattgatgagcagaactacattctccgagatgctgaggcagaagtacttttctctttcagcttggaagaatccttaaaacgggcacacgtttctccactctttaaggcaaaatatttttacatcacacctggaatctgcccaagtctttccactatgaaggcaatcgtagagtgtgcaggaggaaaggtgttatccaagcagccatctttccggaagctcatggagcacaagcagaactcgagtttgtcggaaataattttaatatcctgtgaaaatgaccttcatttatgccgagaatattttgccagaggcatagatgttcacaatgcagagttcgttctgactggagtgctcactcaaacgctggactatgaatcatataagtttaactgatggcgtctaggctgccgtgcatgtcgactcctgcggtgcggggctggctgtctggctggcgaggagctgctgcgcttccttcacatgctcttgttttccagctgctttcctgggggatcagactgtgaagcaggaagacagatataataaatatactgcatctttttaagatgtgcaattttattctgaggaaacataaattatgttttgtattatatgactttaagagcccacattaggttttatgattcatttgccaggtttttaaatgttttcacaaaactgttacgggacttcaactagaaataaaatggtgtaaataaagaccttgctatctctaaattatggatgttaaagatttgaaatgttttgtactttgattatttttatttcttatactctgttttcttttatattgatatcttgcccacattttaaataaatgtacttttgaactt

SEQ ID NO: 720 - DNA, 4651 bp, Homo sapiens
cgttccagtgaatgacaagtactccatggtggaactacaggatccaaatagcaacaggattgcacagtggctggaagtggtacctgagcaaggcattgtagacctgtccttccaactggcaccagaggcaatgctgggcacctacactgtggcagtggctgagggcaagacctttggtactttcagtgtggaggaatatgtgctgccgaagtttaaggtggaagtggtggaacccaaggagttatcaacggtgcaggaatctttcttagtaaaaatttgttgtaggtacacctatggaaagcccatgctaggggcagtgcaggtatctgtgtgtcagaaggcaaatacttactggtatcgagaggtggaacgggaacagcttcctgacaaatgcaggaacctctctggacagactgacaaaacaggatgtttctcagcacctgtggacatggccacctttgacctcattggatatgcgtacagccatcaaatcaatattgtggctactgttgtggaggaagggacaggtgtggaggccaatgccactcagaatatctacatttctccacaaatgggatcaatgacctttggagacaccagcaatttttaccatccaaatttccccttcagtgggaagataagagttaggggccatgatgactccttcctcaagaaccatctagtgtttctggtgatttatggcacaaatggaaccttcaaccagaccctggttactgataacaatggcctagctccctttaccttggagacatccggttggaatgggacagacgtttctctggagggaaagtttcaaatggaagacttagtatataatccggaacaagtgccacgttactaccaaaatgcctacctgcacctgcgacccttctacagcacaacccgcagcttccttggcatccaccggctaaacggccccttgaaatgtggccagccccaggaagtgctggtggattattacatcgacccggccgatgcaagccctgaccaagagatcagcttctcctactatttaatagggaaaggaagtttggtgatggaggggcagaaacacctgaactctaagaagaaaggactgaaagcctccttctctctctcactgaccttcacttcgagactggcccctgatccttccctggtgatctatgccatttttcccagtggaggtgttgtagctgacaaaattcagttctcagtcgagatgtgctttgacaatcaggtttcccttggcttctccccctcccagcagcttccaggagcagaagtggagctgcagctgcaggcagctcccggatccctgtgtgcgctccgggcggtggatgagagtgtcttactgcttaggccagacagagagctgagcaaccgctctgtctatgggatgtttccattctggtatggtcactacccctatcaagtggctgagtatgatcagtgtccagtgtctggcccatgggactttcctcagcccctcattgacccaatgccccaagggcattcgagccagcgttccattatctggaggccctcgttctctgaaggcacggaccttttcagctttttccgggacgtgggcctgaaaatactgtccaatgccaaaatcaagaagccagtagattgcagtcacagatctccagaatacagcactgctatgggtgcaggcggtggtcatccagaggcttttgagtcatcaactcctttacatcaagcagaggattctcaggtccgccagtacctcccagagacctggctctgggatctgtttcctattggtaactcggggaaggaggcggtccacgtcacagttcctgacgccatcaccgagtggaaggcgatgagtttctgcacttcccagtcaagaggcttcgggctttcacccactgttggactaactgctttcaagccattctttgttgacctgactctcccttactcagtagtccgtggggaatcctttcgtcttactgccaccatcttcaattacctaaaggattgcatcagggttcagactgacctggctaaatcgcatgagtaccagctagaatcatgggcagattctcagacctccagttgtctctgtgctgatgaagcaaaaacccaccactggaacatcacagctgtcaaattgggtcacattaactttactattagtacaaagattctggacagcaatgaaccatgtgggggccagaaggggtttgttccccaaaagggccgaagtgacacgctcatcaagccagttctcgtcaaacctgagggagtcctggtggagaagacacacagctcattgctgtgcccaaaaggaaaggtggcatctgaatctgtctccctggagctcccagtggacattgttcctgactcgaccaaggcttatgttacggttctgggagacattatgggcacagccctgcagaacctggatggtctggtgcagatgcccagtggctgtggcgagcagaacatggtcttgtttgctcccatcatctatgtcttgcagtacctggagaaggcagggctgctgacggaggagatcaggtctcgggcagtgggtttcctggaaatagggtaccagaaggagctgatgtacaaacacagcaatggctcatacagtgcctttggggagcgagatggaaatggaaacacatggctgacagcgtttgtcacaaaatgctttggccaagctcagaaattcatcttcattgatcccaagaacatccaggatgctctcaagtggatggcaggaaaccagctccccagtggctgctatgccaacgtgggaaatctccttcacacagctatgaagggtggtgttgatgatgaggtctccttgactgcgtatgtcacagctgcattgctggagatgggaaaggatgtagatgacccaatggtgagtcagggtctatggtgtctcaagaattcggccacctccacgaccaacctctacacacaggccctgttggcttacattttctccctggctggggaaatggacatcagaaacattctccttaaacagttagatcaacaggctatcatctcaggagaatccatttactggagccagaaacctactccatcatcgaacgccagcccttggtctgagcctgcggctgtagatgtggaactcacagcatatgcattgttggcccagcttaccaagcccagcctgactcaaaaggagatagcgaaggccactagcatagtggcttggttggccaagcaacgcaatgcatatgggggcttctcttctactcaggatactgtagttgctctccaagctcttgccaaatatgccactaccgcctacgtgccatctgaggagatcaacctggttgtaaaatccactgagaatttccagcgcacattcaacatacagtcagttaacagattggtatttcagcaggataccctgcccaatgtccctggaatgtacacgttggaggcctcaggccagggctgtgtctatgtgcagacggtgttgagatacaatattctccctcccacaaatatgaagacctttagtcttagtgtggaaataggaaaagctagatgtgagcaaccgacttcacctcgatccttgactctcactattcacaccagttatgtggggagccgtagctcttccaatatggctattgtggaagtgaagatgctatctgggttcagtcccatggagggcaccaatcagttacttctccagcaacccctggtgaagaaggttgaatttggaactgacacacttaacatttacttggatgagctcattaagaacactcagacttacaccttcaccatcagccaaagtgtgctggtcaccaacttgaaaccagcaaccatcaaggtctatgactactacctaccagatgaacaggcaacaattcagtattctgatccctgtgaatgaggataggagctggaaactcaattagtcctctgtgacatttactggagggtggaacattcttctgtcgcttgaagcagaactcattcaatcaaataatttaatttctctgactagtatatgggtaacaaatgaatatgtctgaacctcagctataatactttctactacctttgcaaggagatgggataggaacaatcactcagaggaggcgttgcatgggcagggtcatagggggaagaaaggtggtttagctgttttatttagccattcagggggctctccagagaggagacggtggtagagggtgaactagagaagataagaatgtcttcctaggccggatgcggtggctcacgcctgtaatcccagcactttgggattgcgaggtgggcggatcacttgaggtcaggagttcaagaccagcctggccaacatggtaaaacccgtctctactaacaatacaaagattagcctggtgtggtggcacgggcctgtaatcgcagccccttggaaggccaaggcaggagaatcgcctcaacactggaggtggaggttgcagtgagctgagattgtgccactgcactccagcctgggcaatgaggcaagaccctgtctcaaaaaataataaataataataataataatgtttttctagagtttcagtctaagggaaaatgtgatttagggctttggaaattggctaaaaaaataaaaatggaaaagaaaatc

SEQ ID NO: 721 - DNA, 3544 bp, Homo sapiens
ccagccagtccgtcgatccagctgccagcgcagccgccagcgccggcacatcccgctctgggctttaaacgtgacccctcgcctcgactcgccctgccctgtgaaaatgttggtgcttcttgctttcatcatcgccttccacatcacctctgcagccttgctgttcattgccaccgtcgacaatgtaagtttcctttcctgccactcacgcagaaacctgggtcctgcagtcaatagaagtgggttgtattggtctgttctcatgctgctgataaaggcataccagagactaggtaatttataaggaaaatgaggtctaatggactcacaattccacatgtctgggaggcctctgcagaaggcaaaggaggagcaaagccacatcttacatggtggcaggcaagagagcgtgtgcaggggaactgccctctataaaaccgtcagatctcgtgagacttattcactaccacaagaacagtatgggataaacttggtcccatgattcagttacctcccaccgggtccctcccacgacatgtgggaattatgggaatacaatacgagatttgggtggggacacagccgaaccatatcacaggttgagaaccctgccaaagttctcaatgttgaacctgccaaggttcaaccacgattcggggttgtcccccctgcgaaggcacacccatcttctgacccaagggctgaggactcttggcctaaatgtgaaggttcaggccgtcccatgttcaggttttggtggcaggtcctggcaggcagggacgtttgtcctcccatctgtgattctttcatagagcctggctctaggaagccctttgaggatgttgtgtgacttcagctttcctctagatcagagttctcaaccttgccactattgtcattttgggctggataatcctttgttgtaggggcctccctgtgcattgtaggaagttcagcaacgtgtctggccttatctgctagatgcagtagcacccccacccctggttatgacaatccaaaatatcttcagacattgttaaatgtcccatggagaacaaaatcaccctctgttgaggaccgctgccctagatcttccaggtgacccatcccaggtgacctctgcccccaacccctgacacctccttatcaaccagggtcccttgttgctagcccacccggccatgtcctccccagcagagctcatgcatggaactttccagactctacctatgcccctatgaaaaatttaatgtttccctttagtatccagcttgcagccatatggcaggaatgtattggatacataacctcttggcatagattaatatccctccaaacagggagtgacatcagggaagcttcttaacagcctatacactgttccaaagacctggcttccatcctgctcattttagactgcagagataattaaagggcagaaacattgctcagaaagccaaaaagtacaccatacgagtggccaccaactctgcctacatatacggctcccgttgatggatcatcatgacaatagtaacataaactataatgcctgtcacttagcgatcactgtggcccttttatgcatgtcatctcatgtgatccccaccccagctgtaccaggtagggcaccgacatctccttgcaccgggttacaggtgaaggaactgagcctcagggccattcgggcacttggcagagtttacagtgcagtaagcagcagagccaggatttgagccattccagaggctcctggtcctagagcctgtcaggggagatgagcacaataatcgcatttgggttctggagcttcttgctgagctgctgtgagtggcctgggcagggaccacattgctgctatggattatagcagtggtcaccaacgtttttggcaccaggaaccggtttcatggaagacaatttttctacagactggggagggggcattgcagggggatggtttcagaatgattcaagtgcattacatttattgtgcactttattattattacattttaatatataatgaaataattatataactcgtcataatgtggaatcagtgggagccctgagcttgttgttctggactagacggtcccatctgggggtgatgggagacagtgacagatcatcaggcattagagtctcataaggagcgtgcagcctagatccctggcatgcacagttcacaaggttgacactcctataagaatctaatgcccctggtgacctgacaggaggcagagctcaggcagtaatgtgagtgatggggagcagctgtaaatacagatgaagctgccttcactggctgctcacctcctgctgcgtggcctggttcctaacaggctacagacaggtaccagtccatggcccatgggttggggagtcctagattatagtatttggacccaccattccaggagctcactgtgaaataaatgggaccgaatgttcttttagaatctcctttttctatttcttcccatctagtcctttgggatcctgaaaaggtcccagacttagtgaaaaggatagacagacattaggggcaggaaaaccatcagctttagtgaatcgtatccagcacccccagggtatattatcatggcacatactaagaagatgcagatggactttttgtccatcggtgagtctgagggtattcattatgtatttggaattgtgcttggcaactggaaagtagaaggaaggccatcttgggcagtgggggaagggcagcagccaccaaagcacacagggaaatgaatgcttttggctgaagacaggagaatcttgtctggtcatcccatccattgcaatgtttgtttgtttgtttgtgacggggtctctctctgtcacccaggctggagtgtagtgttgcgatcatggctcactgcagcctctactgcccaggctcaggcgatcctcccacctcagactcctgagtagctgggactacagtcacacaccaccatgcctggctaatttttttgtatttttttgtagagatgggttgccccggctggtctcaaactcctgggctcgggcgatcctcccgcctcggcctcccagggtgctgaaattataggcatgagccactgtgcccacccctgactgctattacttccagcaactcagcctcatcttttctcccatactctctgagggcctggaccacctcttatcctttgggagaaagtagcagggcatcacctggagccggttagaaatgcagaatcctggccaggcgtggtggctcacgcctgtagtcccagcactttgggaggccaaggcgggtggatcgcctgaggtcagaagtttgagactagtccgaccaacatggcgaaaccctgtctctactaaaaatacaaaaatgagccaggtgtgctgtgcatgcctctaaatcccagctactcgtgagactgaggcgggagaattgcttgaacccagtatgggagggttgcagtgatccaggatcatgcatcgcactccagcctgggcaacaagagtgaaactctgtctcaaaaaaaacaaaaaaagg

SEQ ID NO: 722 - DNA, 4059 bp, Homo sapiens
tgttttgtgtgtgcatgcatgtttagttactgtgtgtacctgcgcttgttttgtgtgtgtgtgcatgtgtgtagttaccatgtgtgcatgcgcatgtgtgttaccgtgtgtgttcgtgcacttgtgcgtgcgcatgtgtgtttagttactgtgtgcctgcgcttgttttgtgtgtgcgcgcacatgtgtttagtaccgtgcgtgtgtgtgtgtgcatgggcatgtgtgtttagttgctgtgtgcgtgtgcttgttttgtgtgtgtgcacgcatgtgtgtttagttactgtgtgcgcgtgcgcttgttttgtgtgtgtgcatgcatgtttagttaccgcgtgtgcctgcgcttgttttgtgtgtgtgtgcatgtgtgtggttaccatgtgtgcatgcgcatgtgtgttaccgtgtgtgtgcgtgcacttgtgcgtgcgcatgtgtgtttagtgtgcctgcgcttgttttgtgtgtgtgcatgttattgtgtgcctgcacttgttttgtatgtgtgcgtgcatgtgtgtagttaccatgtgtgtgcatgtgcttgttttgtgtgtgcacgcatgtgtgtttagttagtgtgtgtgtgcacttgtttgtgtgtacacgcatgtgtttactgtgtgtgcacacacttgtgtgtacgtgcatgtgtgattaccgtgtgtgtgcttgttttgtgtgtgtgcgcgcacatgtgtgtttggttaccgtgtgtgtgcttgttttgtgtgtgtgtgtctgcgtgcatgtgtgtttaccgtgtgtgctctttgtgtgtgtgcacgcatgtgtttgtttaccgtgtgtgtgcgtgcttttgtgtgtgtgtgtgtgcacgcatgtgtggttaccgtgtgtgtgcttgttttgtgtgtgtgcgcacatgtgtgtttggttaccgtgtgtgtgtgtttgcatgtgtgcatgcgtgcgcttgtttccattttgaaagtgtgcaatgctccttggtgtgttcgggctctttgatgtttgtagtgggcaccgaccagctgcaatttccagtaacaaccatccctggatttctcgccgggtggcccaggttctgagtgtttctggagcggcctagcatgaccagccccctgcaccatctttccagccccaccagaagcctccatggcgccatcagtaggagccgagggcgctcacatgagagccaggcacagcggccaggaagtgcagtccgaggctctgtgaggacggccccctgcctaccgggtctcccagggtggacgagggcaccccctcagagcgccagatcactgtccagacacttggtcttgtccctgagccagcttctctggttacagtgcctcagaagtgctaagtccccgggatatatctgtcgaattcaaaaccagaagctttctgtagggtttcccaaaagcaggagtagctaggaggacacccagcctgccccggttgtcagggtgacttcgtgcgctgcaaagaaagtaagcgcaagttcttctctccaccctgaaagcatccgtttcacagacgattctaaccctccctggagggcgtgaggtggacacccaccagggccgtgggaaaagagcctccaaatcctagacatttgctcgtccccattccataaccacaggtgcctttgtctttccagctgacttccacaggtttgcagaaatgtaccctgccttcgcagaggaatacctgtacccggatcagacacatttcgaaagctgtgcagagacctcacctgcgccaatcccaaacggcttctgtgccgatttcagcccggaaaactcagacgctgggcggaagcctgttcgcaagaagctggattaggacccagggttgcggagagacgcggcccctcccgcgtggacatcaccgccatgagcctctttgcgagtgacctctgggctccgctcctcactcctgctgtacaggcactgtcttcagcccgagttccaggggcctcgggggctgtttgtatcttgttcctttgtgaagtgtgttgcagaaccgacgcttactgtgcgagaatcggagggcgcgcacgcggatcccccgcctggcctggaccccgtggggtcaggttccctgccgggcggggggcaccggtgccgccccgtgttctcccacggggccctggtttcgagtctctgtcacagcctcttccggcggcagcgtgcaccgggcgggcctccgtgcacactcagcacacgcctgccacacagcgtgcgcttgcgtgtcactctggcacgaaacctgtctgcctctgtggatccacagcctggcagagccgagccgtcacctgatttttcagtgtttctacctgtgtgctggagctcatgagtattttataaactccatttaggtacttcaggaaacatgcagcattttttaaaaaatgaaaattgtttttctacttcatttttccttttagagtcaaaggatatttatttataggcctttttttttttaatatagaatctgaggctgtttgggctttgacttaaatttccatcaggcctctctccagcaggtaatccctctccttccgctgggtcccctggggaggtgtgaactcaagggcctagccccaaaacactttttctgcttttcttaatccttttccagtcccctctttttttataaacgttggcagtttgatgtttctgtttcggcataacgtaatccatttcactgtagcctaaactccagtccgaggttggatattgttcaaatgagcagggcccgagctggaagcgcaaggcagccgccgccgtgccgctcctcccttgccctcaggccaggtccctgctggaagcggctgcatcttcctgtcagccctggtttccatggtgactggcgtcacgcagccacccgagtatggctgaccttcctgcagagagaggagccgcagtcttttgcttgtggaaggagacgctgggctgtgcggtgcggagggtgatgaggatgtctggtgacagccgtgcggacaccactcctctctgcagcactgcctcccagcgccagggtcgcgggcacatcccactgagagcgggggtcctgccccatcttagagtcaaaggcagaggggcttccaggccctggatggggtattttggtgtcacctgaagtccctctgacatcaccttgtttcatcattttttatgacagaattagaaacccatccttcaagcacaataatcatcacagacttgagtttgcttcctaaagcaaaggctccgggtttgtttggaaaatttttttgatttctgaaatgaattgatttttatatttggggcatctctatagaaagtgaccaccaaggccagtaagtacgggaaaaaatgtttactaacttcctcagagattcgtgatacgcgtttctccactgacagacatttaaaaacaaccttcagctccgtttcaatcaatcacctcgacttgttttttagcatggacactgccagcaggacagacagggatggagtaaaccgaagtcaatttcagggctcttggcgtgttggacacagaagaaatcctagtgcagcctttggtagctaacagtcactgattttataattggagaatgcgtaaagattcatttttcaaggagaagagcctgcaaatggccaatgaaggaggtaaataaactaagatattccgagggaagggacccaggccacctcccttccgcaggtttgcagatgaagggttttttgaatgaaatgccactgtgcattttcagaaaaaaaaaatctctgataaacagactttgaatggatgtttgttcctcctgattctcttttctcttcgtggcgacttagagttggcggatattcggaactgtgaatgtacatagcgttgagttaaaccccttgtgtgtgagacaggacgcagcgggcccctggtgacctgggggccagacccgtgggcaggtggggcatgggccctggcctgcggggacctgctggggtgtgagggcagagggagggttgccatgaaggaacttgggattttcaatggaataagtaaaacataaagtctatacttggg

SEQ ID NO: 723 - DNA, 4045 bp, Homo sapiens
agcactgtttaacatagctccagatttatgaaaatgccacagcaaagtattttagttcaggaaggtgtgtgcaggtcaaagccctcattttacagagacggaaactgacacggaggggcgtgtggcagaactggcatcaacactctggtcttctgattcccgggacggatcttcgacttctaattgggccgtgcctccttgcaaaactgtgtgtgcatgtgggttttgttcagaaaaaaggatggccttctcgaaggacccatggctttggctgcttagcctgctcttgcccattccggattcaaggcttcgtcacccgtctcccggacagtttgaatgcagcgagaatgaacacagaggtgcttggtttctggcaagccctgcctttcaccagcctctgtggcaccctctttactgtgactcacacaaagcccagaggtttctgttcacttttaagtgcagaaaagtgctgtgctgcctagtctatagggaggcttcctttgcacatcctgtcttcaccccgtgtctttcctaccccaggggttcagcgggaggcccagggaagggacagcctctcacctgtttggccaccattgtgatccttctctcagctgttgctgctcctttggctaagaccagcggcctcagggccctctgtgggcaggatttctgacatgcgctccctcctggggtcctgggagtggggggtgtagaggtcgcccatcccggcccatctcccttgtatgagagctcccctccacctcaggtccagcccccagctcctgctgctgtggcctccccagagggctgccctctcggtgggggactggcaagatggctcctttaatggatcccacgtgacccaggggagacccacacttgctggccacgccaggccaagggaatacagccactccatagccggccccgcctctgcttccttttcttccccctgccctggctcatgggcacgggcacacaggccagtctgctgcataagcaggcgtcctctgggaagggatgcctcctctcttgaagacatcccactcccccgcaaacagccctttccagccccatcagacatttcagggaattgaaatgaacatgcgtagtggttaggtgcacagtgtctggagctatcccttcagtggctacttcacgcctctgtgtttcaattcacgcatctgcgaaatgggttaataataataatacctctctcatgggtttgttgagaagattgcataggttagtgaatgaaaaacccttagcaaagtgcctggtatgcaataagccttccataaacaactggtattattattattattattgaaatattacattattagtggtagtaataataatagcagtagttatttttagtaatagtaatggtgaccaggtccactgggcaagagaactgtatccctgaacttggcccagcccaattcaacccaatgcagtgaacatttatttatttatttatttatttatttatttatttatttatttattttgagacagggtttcactctgtcgcccaggctggagtgcagtggcgcaatctcaggtcgctgcaacctctgtctcccaggttcaagggattctcctccttagcctcctgagtagctgggattacaggcacccaccatcactaatgtatttttgtatttttgtatttttagtagagactgggtttcatcatgttggccaggctggtctcgaactcctgacctcaagtgatctgcccacctcagcctcccaaagtgctgtgattacaggcgtgagccaccgcgcccagcctgcagtgaacattattaaggattcacccatgtgctcagctctggactaagcactgtgaatgtggtttctgcggaggaagcatgcgggaacagccatcccctcccgactggaagagcacacagatgctggagtgagtgagcctgacctgggttcaagtctcacctctgctgctcatcatctgcaggcttgtaaaagttatttctcctctctgagcctccatttctttcatatagaatggggatctgtgttgcctgccatgagggttgttgtgaacatccaaaggaaattaagcaggagtacaatcactttggaaaactgtttggcagtgttgactgatgctgaacatgtgggtacctcaggacccagcagtcccactgcaggggacacactcagcagatatgtacccacgtgcaccaggaaatacctatgagaatgctgatgtgttatctatggacatcctacgacccagcatttccgctcagcacaaatgcatacgtatttgcaccatacgtgtcctctagacacatatgagaatgttctagcagcatgactcacatggcaccaaactggaagttcccagttgtggatcagcagaggaatagatggatagaggtggtgtatttctttttctttctttttttttttttgagacagagtctcgctctgtctcccaggctggagtgcagtggcgcgatctgggatcactgcaagctccgcctcccaggttcacgccattctcctgccttagcctcctgagtagctgggactacaggcacctgccaccatgcctggctaattttttgtatttttagtagagacagggtttcaccgtagccaggatggtctcaatctcctgacctggtgatctgctcgcctcggccacccaaagtgctgggattacagtcgtgagccaccgcgcctggccgaggtggtgtctttctataatagcacactacataacaacaaggttgaaaacatcaaccacacatacagaatgggtggctctcacaaacactcggtggaaaaagccagacgcaggaggagattactgattgaccctatttatttaacttaaaaaatgggtgaaatcagtctatgctgttagaggtgaggacagtggttcttcccgagggcgggagggttcatgtatccttaaaggggtcacgggtcaggggctgatgggcggctgtcacattctgattcttcatctgggtgccagctctgcaggtgtattcactgtgaacattcatcaagctgtgctttttgctctatgtatggtatgtttcaataaacagtttagttacaaaattaagtgcaataacgcatggaccaccatggtcggcactgaatgtgtgcttactgttattatttttattttctttttctcctcagcacctgaagtgacctggaatcagtgaagccaaagggactggcagtctgccctgcagggagtaccgacctatcccagttgtgtgaggctgcgagagaaagggagtgcatgtgcgcgcgtgcatgtgtgcgtgcgtgtgtgttcacgtgttctcgtgcgggcgcgtgagtggtcttcaaacgagggtcccgatccccggggcggcaggaagggggccgactccacgctgtcctttgggatgatacttggatgcagctcttgggaccgtgttctgcagcccagccttcctgttggggtggggcctctcctactatgcaatttttcaagagctccttgaccctgctttttgcttcttgagttgtcttttgccattatggggactttggtttgacccaggggtcagccttaggaaggccttcaggaggaggccgagttccccttcagtaccacccctctctccccaccttccctctcccggcaacatctctgggaatcaacagcatattgacacgttggagccgagcctgaacatgcccctcggccccagcacatggaaaacccccttccttgcctaaggtgtctgagtttctggctcttgaggcatttccagacttgaaattctcatcagtccattgctcttgagtctttgcagagaacctcagatcaggtgcacctgggagaaagactttgtccccacttacagatctatctcctcccttgggaagggcagggaatggggacggtgtatggaggggagggatctcctgcgcccttcattgccacacttggtgggaccatgaacatctttagtgtctgagcttctcaaattagctgcaataggaaaaaaacaaattg

SEQ ID NO: 724 - DNA, 4545 bp, Homo sapiens
gttgtgtgtttgagagaaaaataagcccataaaaacattctaaccttcagattaagtgttttctgcattctctcccagcggatctgattcctgttctgaagaattgaagttgagcatcgttagttaaattcagctgctgcctgactgtataccacagcaaaggctttggaaacatttttcagttaaaacaataatgactttcttggagtgtaatcccagtggaggctgttctacgtatagcctgaaagaatacttaactaccatacgcaattctgcagagaccttgtaaaaatcacactttacaccaaacaactgagtgattctgaattggttgggggaatcttagttgtagatatcaattcaccttcttgaagattcaaccactgctactcagagctgctgctgaaataccatgtctaagaactcagagttcatcaatctgtcatttttattagatcatgagaaggaaatgatcctgggcgtcctaaagagagatgaatatttgaaaaaagtggaggacaagagaataaggaagctgaaaaatgaactcttagaagcaaaacgtagaagtgggaaaactcaacaagaggccagcagagtttgtgttcactgtcacagaaacctgggcctaatctttgaccggggagacccttgtcaggcttgctcactgagggtatgcagggagtgtcgagttgcaggccccaatggcagctggaagtgcactgtctgtgacaaaatcgcgcagctaaggattataactggtgagtggttttttgaagaaaaggcaaaacgtttcaagcaagtcaatgttctcggcactgatgttgtccgacagtccattttaagaagaagtccaggagctgaagaagtacagagccaagagcaaacccgccaggatgcagaaaagtcagacacttcacctgttgctgggaagaaggccagccatgatgggcccaagagaaagggatttcttcttagcaagttcagatcggcaaccagaggagaaatcataactcccaaaactgacactgggcggagctatagcttggacttagacggtcaacattttcggagtttaaaatcacctcctggttcagacaggggaagcactggctcatcagatctcaatgaccaggaacctggtcctaggaccccgaagagcagtcggagcaatggtgtgacccaggcactcagagttcaccagccccaagcacacgaactgtgacctcagtcatcagtagagagtatggttttgaaaattccatggatttggctgctattgaaggtacctctcaggagctcacaaagagtcaccgcagaaacacttctggcacaccttccatagcagtgtctggaacctctctctcctcagatcagagtcgatctgagttagatttgagtgagtcatttacagaagactcagaggatactgtaagcataagaagcaagtctgtccctggggctttagacaaggactccttggaagagactgaagaaagcattgatgccttagtgtcctcgcagttatctacaaacactcaccgtctggcaagtggcctatcaactaccagccttaacagcatgatgagcgtttacagtgaaacgggagactatggcaacgtgaaagtcagtggtgaaatccttctccatatcagctactgctacaaaactggtgggctgtacatttttgtcaagaattgcagaaatctggccataggagatgaaaagaaacagaggacagatgcttatgtcaagtcatatcttcttcctgacaagtcccggaacaacaagcgtaagaccaaaatcagaacaggcaccaatccagaattcaatgaaacactaaagtacactatcagccatacccagctggaaacaagaactctgcagctctcagtctggcactatgatcgatttggacgtaatagcttcctcggggaagtagagattccttttgactcatggaactttgaaaatccaactgatgagtggtttgtgcttcaacccaaggtggagtttgctcctgatattggccttcaatacaaaggagagctgacagttgttttacgttacattcccccagaagagaacctgatgcttccaccagaacaactccaaggaaataagacttttaaaaagggaaagaagaaggagtcacctgtaatctctggaggaatactagaagtgttcatcaaagaggcaaagaatttgacagcagtgaagtcaggaggcacttctgatagctttgtgaagggctacctgctccctgatgatagcaaagccaccaagcacaaaactctggtaataaaaaagagtgttaaccctcagtggaatcatacattcatgttcagtggcatccatccccaggatataaagaatgtttgcctagaacttactatctgggacaaggaggccttttccagcaacatctttctgggaggagttcgtttgaattctggaagtggtgtgagccatgggaagaacgtggattggatggactctcagggggaagagcagcgcctttggcagaagatggccaacaaccctggaactccctttgagggtgtactcatgcttcgttccagcatgggaaaatgtaggctctaaagggaccagttctccaagaatgaggccaccaggacctatctggctgtcttttcctaccattagcaaactgagacctgagattctgcttccctgccatttctcacctgacagtgttgggacatgaggggagagatgtcagtagtatgaacatttagggtcttgctgagtgcctaaaaaacatatatttccatccaatcaaggccttcttgattggatgatagaaagtgtactacttgtcctgtcaacaagcaaattgtgcaaaggcttatagggtttatgccataaaagaaatggcacaagcctccatttgctaattataagttactttagatttcctcaaatcctttgaagagaaagaggaccactgagaaggtagatcacttgaaaagtcagaagaaaggatactggccaacttttactcaccctaggaatccacatgatctcaagaaggcatggtggagatggttgcttgagcaaggggattgtcctgttattgcagcaaacttgtggattaaccaagtagtatttcaagatggattgacagggctttctatgattactatagaatttatcatctaaatcagtttactttttagaacaaagagagctaaataactacatcagaacgattgatgttgattagaattgacctgggaaaattgggatgtagggtcaccctactgatgacctaagagagctctgttttaaacatttattttataaaatgttctaagccattaactaaaaggaaatgagatataatggtcaattgatataccttttcacattgtgttcactgacgagactagtttagttaactattgtcacaataatgctgaatgaaaaaacacaccaaatgtcagtggcttaaaatgaccatcctttttctcacagttatgaagattggctatggcacctctgcttcctgctataggcctgaggttctagggcttcttatgcctcatcctctttaagccaaagggatagccagagcatcttgatggcagaagtgcaataagatgagccccactgctcgggtacattttcagcccctggttgtgtcatgtctactgatatctcattggtcaaaggaagtcagagggccaagatgaagaggcagggaaatatgcactgcccacagtgaagccatgacaagagtgaggatgcaggaaggcatgaagaattggggccaacagttcaatctaccataccttctctcacctggaattccagatgcttgagctacgaaacttagatgcaaagaaagttaaagctagaaggaacctcaggcccagttgctcattttgcagattccaaatgtgaatttcagagagctgagataacttgcccaaggccatatagaggctgtgactaaatctggacttaaatccagactatcaatcttaggccagtgttcttttttcaatatagtccttggcataatgctatgcttattaggtagataaaagggcttatgtcaagaaatttggagcagagtctgattacttgagcatgaacatacccgaccaaggtatgttctggagtcatattctagcctctgagctcattttttcatgcgagttcatataaaatcctcgaaagtttagaaactaggttttagtagtaacggagctagaatcatcttcgggcttattcctgctagttgttccatatttctagatttcatcttgaattttgaaaactgatttaagaatatatttagtattattattagtaagggaatacgcaatccagtttcaattttattcagaagtaggtcacctaattctagaaaatggttattagtctagtgtcgcttagcaaggtacttaaaagaaaatctgcacatatccttgtgctgcccttcttaaaaacagaaaacaaaaagtgtaagatcatcattgcttcccacataggaaaaataaaatgtcttcagacttg

SEQ ID NO: 725 - DNA, 3812 bp, Homo sapiens
agcgaagtttggcggaacatggcggaagcgtctggggcacgcaggagcgcggggcggcggcggccggagcccgaggagctgtagcagccttagtcgccgccgccgcggggcgaggtcgccgccatggcccgctggatcccgaccaagaggcagaagtacggggttgcgatctataactacaatgcttctcaagatgtggagctctccttgcagatcggtgacacagttcacatcctggagatgtacgagggttggtacagaggatataccctccaaaataaatctaaaaagggcattttccctgaaacatatatccatttgaaagaggcaactgtggaagacctggggcagcatgaaaccgtgattcctggcgagctccccctggtgcaggagctcacgtccactctgcgagaatgggctgtcatctggcgaaagctctacgtgaacaacaagctcaccctcttccgccagctgcagcagatgacgtacagcctgatcgagtggcggtcccagatcctgtctgggacgctccccaaggatgaactggcagagctcaagaagaaagtcacagccaaaattgatcatgggaacagaatgctggggttagatctggtggtgcgagatgacaatgggaacatcctagaccctgacgaaaccagcaccattgccctcttcaaggcccatgaggtggcctccaaaaggattgaggaaaagatccaagaagagaagtcaatcctgcagaacctcgatttgcggggccagtccatcttcagtaccatccacacctatggcctctatgtgaacttcaagaactttgtctgcaacatcggggaagatgcagagttgtttatggccctctacgacccagaccagtccacttttatcagtgagaactatctaattcgttggggcagtaacgggatgcccaaggaaatagagaagctcaataacctccaagcagtgtttacagaccttagcagcatggacctcatccggccccgcgtcagccttgtatgccagattgtccgcgtgggccatatggagctgaaggaaggcaagaagcacacctgtggactccgaagaccttttggagtggcagtgatggatattactgatatcatacatgggaaggtggatgatgaagaaaagcagcattttattccctttcagcaaattgcgatggaaacctacatccgccagaggcagctcatcatgtcgcctttgataacatcacacgtgattggggagaatgagccactcacttcagtcttgaataaagtgattgcagcaaaggaagtgaatcacaaagggcaaggcctttgggtatccttgaagctcttgcccggtgacctcacccaggttcagaagaatttttcacacttggttgatagatcaacagcaatagcccggaagatgggctttcctgaaatcatactgccaggagatgttcggaatgacatttatgtcaccctgatccacggtgagtttgacaaagggaagaagaagacgccaaagaatgtggaggtgacgatgtctgtgcacgatgaggagggcaagctcttggagaaagcaattcaccctggtgctggatatgaaggcatttcagaatacaaatcagtagtctattaccaagtcaagcagccctgttggtatgagactgtcaaggtatccattgctatagaagaagtcacacgctgtcatataagatttaccttccgacacaggtcatctcaggaaaagataaatcggagcgagcatttggggtggccttcgtgaagctgatgaacccggatggcaccactctgcaggatgggaggcacgatctggtggtttataagggtgacaacaaaaaaatggaagatgctaaattctacctgaccctgcctggaaccaagatggagatggaagaaaaagagcttcaagcatctaaaaacctggtcaccttcaccccaagcaaggatagcactaaagacagctttcagattgccaccctcatctgctccacaaagctcacccagaatgttgacctgttaggcttgttaaattggcgttccaactcccagaacattaaacacaacctaaagaagttaatggaagtggatggaggagagattgttaagtttttgcaagatacactagatgcactctttaacataatgatggaaatgtcagacagtgaaacctatgacttccttgtgtttgacgcactggtatttattatttcactgataggagacatcaagttccagcattttaatcctgtacttgaaacctacatttacaagcacttcagcgccactttggcatatgtgaaactctccaaggtactgaacttctatgtggctaatgcagatgactccagcaagactgaactgctttttgctgcgttgaaagccttgaagtacttgtttagattcatcatccaatcccgagtgctctacttgagattttatgggcagagcaaagatggagatgagtttaataattcaattcgccagttatttcttgctttcaatatgctgatggacaggcctctggaggaagccgtcaagatcaagggggcagctttgaagtaccttcctagcataattaatgatgtcaaacttgtatttgatcctgttgagctcagcgtgctcttctgcaaattcattcaaagcattcctgacaaccagctggttcggcagaaacttaactgcatgaccaagatagtagagagcactctttttcgacagtcagagtgcagagaagtgctgctgccactgctgacggaccagctcagcggccagttagatgacaactccaacaagcctgaccacgaggcaagctcgcagcttctgagcaacatcctggaggtgctggacaggaaggatgtgggtgccactgcggtgcacattcagcttataatggaacggctgctgagaaggatcaaccggacagtgattgggatgaaccggcagtctccccacatcgggagttttgtggcttgcatgattgccctgctgcagcaaatggacgacagccactatagccactacatcagcactttcaaaaccagacaagacatcatcgacttcctcatggaaacttttatcatgttcaaggacctgattggaaagaatgtctatgccaaagattggatggtgatgaatatgactcaaaacagggtttttctccgtgctataaatcggtttgctgaagttctcacaagattcttcatggatcaggcaagctttgaacttcagctctggaacaattacttccatttggcagttgcatttctcacccatgagtcccttcagcttgaaaccttctcacaagccaagcgcaacaaaattgttaaaaaatatggggacatgagaaaggaaatcggctttagaatccgggacatgtggtataacctgggtccccccaaaatcaaattcatcccatccatggtgggtcccattctggaggtcactctgacccctgaagtagagctccggaaagccacaatccccattttctttgatatgatgcagtgtgagttcaatttcagtggaaatggcaatttccatatgtttgagaatgagctgatcacaaagctggaccaggaggtagaagggggcagaggagacgaacaatacaaggttcttctggaaaaactgctcctagaacattgccggaaacacaaatacctctccagctctggggaggtcttcgccctcctggtcagcagcctcttagagaacctgctggattatagaaccatcatcatgcaagatgagagcaaggagaaccgtatgagctgcactgtgaacgtgctgaacttttat

SEQ ID NO: 726 - DNA, 4088 bp, Homo sapiens
attggtggaggcggcaagtttaaacagagtcaaaacgccatacttgtttggctcctctttttaatttgcgagtttattgggcttgttttctgttttctagggagtaggttagtggaaaagaaaaagggccgaattcactcccacgacctctacagccgcccctgaggggaagcggtcagcgtaagtcccggatccccgctccggagccgcctcgtgggagcggggcaaggagatccaggaggggtctcgaatctgccatggcgaaccggcgagtggggcgaggctgctgggaagtgagcccgaccgagcggaggccgcccgcggggctgcggggccccgcggccgaggaggaggcgtcttccccgccggtcctgtctctcagccacttctgcaggtctcctttcctttgcttcggggacgttctcctgggagcctcacggacgctgtctctggccctagacaaccctaacgaggaggtggcagaagtgaagatctcccacttcccggccgcggacctgggcttcagtgtgtcgcagcgctgtttcgtgttgcagcctaaagagaaaattgttatttctgttaactggacaccactcaaagaaggccgagtaagagagattatgacatttcttgtaaatgatgttctgaaacaccaagctatattactaggaaatgcagaagagcagaaaaagaaaaagaggagtctttgggataccattaaaaagaagaaaatttcagcctctacaagtcacaacagaagggtttcaaatattcagaatgttaataaaacatttagtgtttcccaaaaagttgacagagttaggagcccactacaagattgtgaaaacttggctatgaatgaaggcggtcccccaacagaaaacaattctttaatacttgaagaaaataaaatacccatatcacctattagccctgctttcaatgaatgccatggtgcaacttgcttgccactctctgtacgtcgatctactacctactcatctcttcatgcatcagaaaatagggaactattaaatgtacacagtgccaacgtttcaaaagtttcttttaatgagaaagctgtaactgaaacttcctttaattctgtaaatgttaatggccaaagaggagagaatagtaaacttagtcttacccccaactgttcttcaactttgaacattacacaaagccaaatacattttctaagtccagattcttttgtaaataatagtcatgaagctaataatgaactagaattagtaacatgtctttcatcagatatgtttatgaaagataattcacagcctgtgcatttggaatcaacaattgcacatgaaatttatcagaaaattttaagtccagattctttcataaaagataattatggactaaatcaggatctagaatcagagtcagttaatcctattttatcccctaatcaatttttaaaagataacatggcatatatgtgtacatctcagcaaacatgtaaagtaccattatcaaatgaaaattctcaagtcccacagtctcctgaagattggagaaaaagtgaagtttcgccacgtattcctgaatgtcagggttcaaaatctcccaaagctatttttgaagaactagtagaaatgaagtcaaattactacagttttataaaacaaaataatcctaaattttctgcagttcaggatatttctagtcatagccacaataaacaacctaagagacgtccaatactttctgccactgttactaaaaggaaggccacctgtaccagagaaaaccaaactgagattaataaaccaaaagcaaaaagatgtctcaacagtgcagtgggtgaacatgaaaaagtaataaataatcaaaaggaaaaagaagattttcattcttatcttccaattatagatccaatattaagtaaatctaagagttataaaaacgaggtaacaccctcttcgacaacagcttcagttgctcggaaaagaaagagcgatggaagcatggaagatgcaaatgtgagagttgcaattacagaacatacagaagtgcgagaaatcaaaagaatccatttttctccctcagagcctaaaacatcagctgttaagaaaacaaaaaatgtgacaacacccatctcaaaacgtattagcaacagagagaaattaaacctgaagaagaaaactgatttatcaatattcagaactccaatttctaaaacaaacaaaaggacaaaacccattatcgctgtggcacagtccagtttgaccttcataaaaccattaaaaacagatattcccagacacccgatgccatttgctgcaaaaaacatgttttatgatgaacgctggaaggaaaagcaggaacagggcttcacttggtggttaaattttatattaacccctgatgacttcactgtaaaaacaaatatttctgaagtaaatgctgctactcttcttttgggaatagagaatcaacataaaataagtgttcctagagcacctacaaaagaggaaatgtctctcagagcttatactgctcggtgtaggttaaacagactacgtcgtgcagcatgccgtttgtttacttctgaaaaaatggttaaagctattaaaaagcttgaaattgaaattgaagctaggcggttaattgttcgaaaagatagacacctatggaaagatgtgggagaacgtcagaaagtcctgaattggctgttgtcctacaatcctttgtggcttcgaattggtctagagacaacttatggagaactcatatctttggaagataacagtgatgtcacagggttggctatgtttattctgaatcgcctactttggaatcctgatatagcagctgagtatagacaccccactgttcctcacctgtatagagatggtcatgaagaagctttgtccaagtttacattgaaaaagttattgttgttggtctgttttcttgattatgctaaaatttccagactcattgatcatgatccttgtctcttctgtaaagatgccgaattcaaggctagtaaagaaatccttttggctttttcacgagatttcctaagtggtgaaggtgacctttcccgtcaccttggcttattgggattacctgttaaccatgttcagacaccatttgatgaatttgattttgccgttacaaatcttgccgtagacttgcaatgtggagtgcgccttgtgcgaaccatggaacttctcacacagaactgggacctctcaaagaaactcaggattccggcaataagtcgtcttcaaaagatgcacaatgttgacattgttcttcaagttcttaaatcacgaggaattgaattaagtgatgagcatggaaatacaattctatctaaggatattgtggataggcacagagaaaaaactctcaggttgctttggaaaatagcgtttgcttttcaggtggatatttcccttaacttagatcaattaaaggaagaaattgcctttctaaaacacacaaagagtataaagaaaacaatatctctactatcatgccattctgatgatcttattaataagaaaaaaggcaaaagggatagtggttcctttgaacaatatagtgaaaacataaagttattgatggattgggtaaatgctgtttgtgccttctataataaaaaggtggagaattttacagtgtctttctcagacggccgtgtgttatgttacctgatccaccattaccatccttgctatgtgccatttgacgctatatgtcagcgtactactcaaactgtggaatgtacgcaaactggttcagtggtattaaattcatcatctgaatctgatgacagttctctggatatgtcacttaaagcatttgatcatgaaaatacttcagagctatacaaagagctcctagaaaatgaaaagaaaaattttcacttggttaggtctgcagttagagaccttggtggaatacctgctatgattaatcattcagatacgtcaaatacaattccagatgaaaaggtggttattacctatttgtcatttctttgtgcaaggcttttggatcttcgtaaagaaataagagctgctcggctcatacaaacaacatgg

SEQ ID NO: 727 - DNA, 3253 bp, Homo sapiens
ggcctttttttttttttttttgagacggagtcttgctctgtcacccaggctggagtgcaatggcaggatcttgccttactgcaacctctgcctcccggattcaagtgattctcctgcctcagcctccccagtagctgggattacaggtgcccgccaccatgctcagctaattttttgtatttttagtagagacagggtttcaccatgttggccatggctggtctcgaactcttgacctcaggcaatccacccgcctcggcctcccaaagtgctgggattacaggcatgagccaccatgcccggcctccaaaagcaacttttttacacacccagccctgcccacctcacaaccccaccccagcgcagattcccagtattcttggtgccctcaagtggtggaggttgcaaactgcagcagagactgaggagcaaaggtcccagggctatcacatccaccccaagtacagagccaaggagtagcttccacttcttaaacgcaaacctctgcctgcactatcaatcctaacgctgatttcagaggcctcacataaggcagagcacagggaccggttctggccctggagggaagggatgggatttcatgccgctgctgctgctcctgctgctgccgtcaggagaccagacgcttggctccattagacagcattgtggggagcaggtctcctggttttctgagaagctcccattccatcccacgctacggagacaaaggatcaggcttgaacctcaggcactggcaagaaagcttcttaacagacagaagagcagaggcagacggatgtcttacagtcaccagcaagaggatgaggcgttcattcatttgacaatttcaggccccacgctaggccactaagactaaagctggccacagtaaggaaccaccagcttcagaagcaaacccctggacctaaggatgaggcaggcaagggcagggggaggtagagggagagggtcacagccaagtgtgacaacactcagcccctgagctcggtggtggtgggagggttgaggattcatctttccttctccactctcagctctggcaaggcagaaggggaaccatctctccagactcacctgtagaaagcagcaggctccgcattcacccgaatctgcatgtgcttgaacctaaaatctccctccagcttctcctgatgcaccagcttcatcacaatggggcccatcaaagttttgttcaccacggtccccaggatgaaatacccgaagatgctcacaggcccgagccagcctgtgctttggaagcactggtaagtgtagtagacgagggtgaacggggagatgatgagcttgctggccatgctgctgagctgccggcagaatcgctccacgtcctggctgatgcgctggtccctggagccaatgacacagagtagctggacccagggagatgggcccaaaggtagagagaacaagaaactttcacatcacctctgctcttgaccttgcctcacagtgctgtgaacactgaccctatgggaagagggaaccagacaaggctggtttcctaggggcaactaaatcccagggcctttaaacagggttctagagggttgcatcttacggtgcctcagttaatcccctgaaaaagtgggaactgaaaggtccagtacccaggggcctgagccagctctgagcagagccaaagaaaaacttgaaggtagatgagctgttttggatgatcaagaagactatcccctttatctcaatcctcccaaatttctcttatataagccctagcctggcccctttagttatctggctgtgaaagctccaggctgtgaggcacacctgtagtcccagctactcagggggcagaggcaggatggaagccatagccatcagaaagaggcctagaagttaggcagcagcagcagcctcccacgcatctttgcaccaaagctaagcttgagctgagaggtaccccaaccaacaaagtgcttgctaggaaggtggtgagtgaggggatgggtgtgaaggagaccccctatgtctcatctcaccactagggccatactgattcctattcccaatgagtgacgtgaccttgggcaagtcacttgcaatctctgggcttcagcttcctcatctgtaaaataacaatagctaacttacactgaaacacttgctatgtgtcaagcactgtacatgtgcattacatgaatgatatttcatcctcactacaccctttgagataggaactattattgtcctcattttacagaaggggaacctggggcttggtgactttaagagttataacctgagtggtgatagaatggagatgtgaatcctagactgagtcctggatagtggtaattttttttactgatgaaaatctaagagctggtttttctagcaaggacattttctttagaaccctctaaagaaaccccttagtcttcttactggaagactaagatataaagtatgaaaaggacaaaagaaagctgctcctaacatttttcttttttttaagagatgggggtttctgctatgttgcccaggctagagtacagtggctattcccaagtgtgctcacggtgcactactcctgggctcaagtgatcctcctgcctcagcctcctgagttgttgggaccacaggtgcatgccactgcacctggcaggcttcttctttttagctgcctattcacagccctgcagcttctccaggagtcctctgcagggcaccctcccccatgactctgggcagcagcatttgaaaacgactgcagatgatctccttggtgtctgccaccagcagtctccagggctaggccagaaggaaaggaccacacagagtgtagaaaggactgagttggggcgcctacgggttatcgatgtcatcccgcagcacgttgagggtgtagtacgcacggccccggaagtagaggcggtgaaggtgctcagtgaggtccttcctccagctcacatacagcaggttgcaggtgaactgatcaaagctcttcagcgtggagttcagaacaatgagcatgacagccaggaatgtcagagtcttaaacccttccaagtctttgtttcccaggaccccatagtactgactggggatcaggccaacctggtagatcacaaattgctctgaaaggaggcgaaggcaggagaatcacttgaaccagggaggcagaggttgcagtgagctgagattatgtcactgcactccagcctgggcaacaagagagaaactctgtctc

SEQ ID NO: 728 - DNA, 4901 bp, Homo sapiens
cttttggtaccggtactatgccgttttggttattgtagccttgtagtatagtttgaagtcaggtagcatgatgccttcagccttgttctttttgcttaggattgtcttggctatgtgggctgttctttggttccatatgaaatttaaagtagtttttttctagttctgtgaagaaagtcaatggtaggttggtgggaatagcattgcgtctataaattactttgggcagtatggccattttcacaatattgattcttcctatccatgagcatggattttttttccatttgtttgtgtcctctcttatttccttgagcagtggtttgtagttctccttgaagaggtccttcatgtcccttgtaagttgtatttctaggtattttattttctttgtagcaattgcggatgggagttcactcatgacttggctctctgcttgtctattattggtatataggattgcttgtgatttttgcacattgattttgtatcctgagactttgccgaagttgcttatcagcttaaggagtttttgggctgaaacagtggggttttctaaatgtacgatcatgtcatctgcaaacagagacaatttgacttcctcccttcctatttgaatacgctttatttctttctcttgcctgattgccctggccagaacttccaatactgtgttgaataggagtggtgagagagggcatccttgtcttgtgccgcttttcaaaggcagtgcttccagcttttgcccattcagtatgatattggctatgggtttatcataaatagctcttattattttgagatatgttccattagtacctagtttgttgagagtttttagcatgaaggggtgttgaattttattgaaggccttttctgcatcttttgagatgatcatgtggtttttgtcactggttctgtttatgtgatggattacatttattgattttcatatgttgaaccagccttacatcccagggatgaagccgacttgatcgtagtagataagctttttgatgtgcctctggattcagtttgccagtattttgaggattttcacatcgacgttcatcagggatattggcctgaaattttctttttttgttgtgtctctgccaggttttggaatcaggatgatgctggcctcataaaatgagttagggaggtagggaggagtctgtcttcttctattgtttggaatagtttcagaaggaatggtaccagctcctctttgtacctctggtagaattcggctgtgaatccgtctggccctgagtttttttggttggtaggctgttaattattgcctcaatttcagaacttgttattggtcttttcagggatttgacttcttcctggtttagtcttgggagggtgtgtatgtctgggaatttatccatttcttctagattttctagtttatttgcatagaggtgtttatagtattctctgatggtagcttttatttctgtgggatcagtggtgatatctcctttatcattttttattgtgtatatttgattcttatcttctttcttctttattattctggttagtggtctattttgttaatcttttaaaaaaaacagctcctggattcattgatttttttctaagagtttttcatgtctctatctccttcagttctgctctgatcttagttatttcttatcttctgctagcttttgaatttgtttgctcttgcttgtctagttcttttaattgcaatgttagggtgtcaattttagatctttcccactttctgatgtgggcatttagtgctataaatttccctgttaacaccgttttagctgtgtcccagagattctggtatgttgtctctttgttctcattggtttcagagaacttcgttatttctgccttaatttcattatttacccagtagtcattcaggagcaagttgttcagttttcatgtagttgtgcggttttgagtgagtttcttaatcctgagttctaatttgattgccctgtggtctgagagactgtttgttatgatttccgttcttttgcatttgctgaggagtgttttacttccaattgtgtggtcgattttagaataagtgctatgtggtgctgagaagaatgtatattctgtggattaggtcagcttggtccagagctgagttcaagtcctgaatatccttgttaattttctgtctcgttgatctaatattgacagtggggtgttaaagtctcccactattattgtttgggagtcttaagtctctttgtaggtctctaagaacttgttttatgaatctgggtgctcctgtattgggtgcatatatatttaggatagttagctcttctagtttcattgatccctttaccattatgtaatgcccttctttgtcttttttgatctttgttggtttaaagtctgttttatcagagattagaattgcaacccctgccttttttttttttttttgctttccatttgcttggtaaatattcctctatccctttattttgagcttatgtgtgtctttgcacatgagatgggtctcctgaatacagcacactgatggattttgactctttatgcaatttgccagtctgtgtgtggtttttttttttttttttttagacggagtcttgctctgttgcccatgctggagtcagtggcgcaatcttggctcactgcaacctctgcctcccaggttcaagtgattctcctgcctcagcctcccatgtagctgggactacaggtgcacgccaccatgcccagctaatttttgtatttttagtagagacccctgtcttcaccatattggccagactggtctcgaactcctgacctcgtgatccacccaccttggcctcccaaagctctgggattacaggtgtgagccaccactcctggcccatctgtgtcttttaattggggcatttagcccatttatatttaaggttaatattgttatgtgcgaatttgattctgtcatcatgatgctagctggttattttgcacattagttgatgcagtttcttcatagtgttgttggtctttatattttggtatgtttttgcagtggctggtaccggtttttcctttccatatttagtgcctccttcaggagctcttgtaaggcaggcctggtggtgacagaatctcttagcatttgcttgtctgtaaaggattttatttcaccttcacttatgaagcttagtttggctggatatgaaattctgtgtttaaaattcttttctttaagaatattgaatattggccttcactgtcttctggcttgtagagtttctgcagagagatctgctgttagtctgtgggcttccctttgtagataacctgacctttctctctggctgcccttaacattttttccttcgtttcaaccttggagaatctgacgattatgtgtcttggggttgctcttctcaaggagtatcttcgtggtgttctctatatttcctgaatttgcatgttggcctgtcttgctaggttggggaagttctcctggataatatcatgaagtgtgttttccaacttggttccattctcctgtcactttcagggacactcagtcaatcgtaggtttggtcttttcacagagtcccatatttcttagaggctttgttcgttccttttcattcttttttctctaatcttgtcttcacaccttatttcagtaagttgatcttcaatctcagatattctttcttctgcttgattgatttggctgttgatacttgtgtatgcttcacgaagttctcatcctgtgtttttcagctccatcaggtcatttgtgttcttctctaaactggttattctagttagcagttcctgtaaccttttgtcaaggttcttagcttttttgcattgggttagaacatactcctttagctcagaggaatttgttattatccaccttctgaagcctatttctgccaatttgtcaaactcattctctgtccagttttgtgcccttgctggagaggagttgcgatcatttggaggagaagaggcattctggtttttggaattttcagcatttttgtgctggttttttcctcatcttcatggatttatttacctttgatctttgaggctgatgacctttgtatagggtttttgtgtgggggtcctttttttttgatgttgatgttgttgctttctgtttgttagtttttcttctaacaggcccctcttctgcaggtctgctccaattggctgaggtccactccagaccctgtttgcctgggtatcaccagtggaggctgcagaacagcaaagattgccacctcctccttcctctggaagcttcgtcccagaggggcactgggctaatgccagctggagctcttttgtatgaggtgtctgtcaacccctgttgggagatctttcccactcaggaggtgtgggggtcagggacccacttgaggaggcagtctgtcccttagcagagctcgagcactgtgctgggagaatcctccttgtcaggatctgttgctctcttcaaagctggcaggcaagaatgtttaagtctgctgaagctgcgcccacagccgtcccttctcccaggtgctctgtcccagggagatgggagttttatctataagcccctgactggggctgctgcctttctttcagagatgccctgcccagtgagaaggaatctatagaggcagtctggccacagccactttgccacgctgtgttgagtcccacccagtccgagcttccaggcctctttagcactgttaggggaaaaccacctactcaagcctcagtaatggcaggcgcccttccccccaccaagctcgattgtcccttggctccctggcttcagcctcctttccaggggagtgaacggttctgtcttgctggggttccaggtgccactggggtatgaaaac

SEQ ID NO: 729 - DNA, 3776 bp, Homo sapiens
agacggcgcccagcggcggcgcgaacggcagctaggagggttgctccgggcttggtgctcactgcgacttcccgcgcagggcccggtcggactaggacccgcggcctgagagacgctggaggatgcggacgcggaggccgcctggggtagcggcggcgggagtcctggcgctctgcaggtcagaagttgagtagcaggggcctaggagggctcgaagccttcacagcgatggcagagaagcgacccctgagaaccctggggcctgtgatgtatggcaagctgccccgcttagagacagactccgggctcgagcacagcctgccccactctgttggtaaccaggatccctgcacctacaaggggtcctacttctcctgccccatggcgggtactcctaaggccgagtctgagcagttggcgtcctggaccccatacccacccttgtactctaccggtatggcaggacccccacttcaggcagacaacctgctgaccaactgcctgttctaccgctcgccagcagaaggccctgagaagatgcaggactccagccctgttgagctcctgcccttcagtccccaggctcactcctacccaggcccaccactggcagcacccaaacctgtctaccgcaaccctctgtgctatgggctctcaacttgtctgggggaaggagcagtgaagaggccactggatgttgactggactctggcgactgggcccctgttgccctcagctgacccaccctgctctctggccccagctcctagcaagggccagactctggatggcaccttcttgcggggggtgccagctgaggggtccagtaaagactcctcagggagcttctccccatgccagcccttcctggagaaatatcagaccatccacagcacgggcttcctggcctccaggtacacaggtccttaccctaggaactccaagcaagcaatgtctgaggggccctcaagtccttggacccagctggcccagcccctggggccaccctgtcaggacaccgggcccacccactacccaccaccccaccacccaccaccccaccctccacaggccctgccttgccctccagcctgtcgccacccagagaagcagggcagctacagcccagcactcccactgcagcctctggggggccacaaggggaccgggtaccaggctggtgggctgggcagcccctacctgaggcagcaggcagcccaggcaccttacattcccccactggggctggacgcttacccctacccctctgcccctctcccagcaccctctccaggcctcaagctggagccgcctctcactccacggtgcccattggactttgccccccagacactgagttttccttatgcccgggatgacctctctctctatggagcatcccctgggcttggagggacaccaccttcccagaacaatgtgagggctgtgccacagcccggtgccttccagagggcatgccagcctttgccagcgagccagccctgctcagagcctgtgaggcctgcacaggaagccgaagagaagacctggctgcccagctgcaggaaagagaagctccagccccggctcagtgagcactctgggccgcccatcgtcatccgagacagtccagttccctgtacccccccagcactgcccccctgtgcccgggagtgccagtctcttccacagaaggaggacgcaaggccacccagctctccaccaatgcctgtcattgacaatgtcttcagcctggccccctaccgtgactatctggatgtgccggcacccgaggccacaactgagcctgactctgccacagctgagcctgactcagccccagccaccagtgaaggtcaggacaaaggctgcagggggaccctgcctgcccaggagggcccctcagggagtaaacccctaaggggctcacttaaggaggaggtagccctggatttgagtgtgaggaagcccacagcagaggcctcccctgtcaaggcttcccgttctgtggagcatgccaagcctactgcagccatggatgtgccagatgtgggcaacatggtgtcagatctgccaggcctgaaaaagatagatacagaagcaccaggcttgcctggggtgccagtgaccacagatgccatgccaaggaccaacttccacagctctgtggccttcatgttccgaaagttcaagatcctccgtccggcacctttgcctgcagccgtggtcccgtccacgcccacctcagctcctgctcccacacagcctgcacccacccccacatctgggcccattggactgcggattctcgctcaacagcccttgtctgtgacctgcttcagcctggcactgcccagccctccagccgtagctgtggcctcccctgcccctgctccagctccatcccctgctccggctcgagctcaggctccagcttcagcccgggatccagctccagctccagctccagttgcaggccctgctccagcatctacttcagccccaggggactccctggagcagcattttacaggactacatgcgtccctgtgtgatgctatttctggctccgtcgcccactctcctccagagaagcttcgcgagtggctggagacggctgggccctggggccaggctgcgtggcaggactgccagggtgtgcaggggctgctggccaagctgctgtctcagctgcagcgcttcgatcgcacccaccggtgccccttcccccatgtggtgcgagctggcgccatcttcgtgcccattcacctggtgaaggagcggctcttccctcggctgccacccgcttctgtggaccatgtgctgcaggagcatcgtgtggagctgcggcccaccacgctgtcggaggagcgggcactgcgggagctcgccctgccaggctgcacctcacgcatgctgaagttactggcgctgcgccagctgccggacatttaccccgaccttctcggcctgcagtggcgcgactgtgtacgccgccagctgggtgactttgacactgaggctggagctgtgtcctcctcagagcccactgtggccagagatgagccagagagcctagccctggctcagaagtcaccggcccccaaggtcaggaagccaggcaggaagccaccaacccctggcccggagaaagcagaggcagctgctggggaagagtcctgtggtgcctcccctacccctgctaccagtgccagcccacctggccccacactgaaggcccgcttccgcagtctgctggagaccgcctggctcaatggcctggctctgcccacctggggccacaagtcctcaagaccagaccagccctcaccctgcccacagctgctggacagccagagccatcacctgtagcactggttgccagtgctgtgtgtatagcagtcactctccacccttcccttctgcctgcccagctgccccggggccacgagtggatgctggggctgtggctgctcccctggaggggttccatctctgaccctgtggcccattcagggtgggctgaagagcccctgagcttttaacgtgagggtctttattggataggactactccctatttcttgcctagagaacacacatgggctttggagcccgacagacctgggcttgaatcccggctcgtgttcttgctgcaggacctgggcaagaaacttcacctctgctgagccctcattccccatgtgtaaaatgggacaacgcaacctacctcacagggttgttgtggggatgctgcctgatacataccctgtcacc

SEQ ID NO: 730 - DNA, 3471 bp, Homo sapiens
agtttctgtcctgggtggacccggattggctccttgcctccaagtccgactgggaacaagctgaggaagacacaaactccaggctaagtcttgactcccaccacccggctttgcgagagaacccccgggtttggacctcctgcccaagcacatccctgctgaagaggaacccggctcaaggtcaccttgggggacagaccttgcctggccatgcagtctctccaggcaggagaactgcaacattttggagcaaagacaggcccggggcccagagattcggattcagcaggcctgggatggggcccaaggagtctgtctcttgaacagagcttctatcctggatggttctgtaaaccccaggtgaggactccacactcaggggcatcgacggtcccaggacactgagcctgccgagtgccccaccacaagccctggccaggccacccgccagcccacacgcagagctgtggccgggccactcacccggttggccgtgatggctaggttctggaggttctgcaggaggccgatgtcggcagggaggaaggtcaggttgttgtggctgaggtccaggtagcgcagcttgcggcagtagaagagctgggtggggatcttctcgatcttgttgcggttcaggtagaggcgctccaggttggtgaggttgccgatctggatggggatgtaggcgatgtggttgtaccacagcttaaggcaggtgaggcggtgcaggtgctggaagctgatgatctcctcgatggtcttgaggttgttgtccttgaggtcaatctcctgcaggttgtggaggctgaagatggagtgggggatgcgctccaggtcacagcggatcagctccagctcagtcaggttcgccatcttcttgaggctgttgaggacgatgagcttggtgccctcattgttgatggacagcttctgcaggtgcacgcccacatctgtgaccacctgtggcagcttgcttaggttgctcttgagccgcagcaccttgaggcgtttgagctcccgcagcccgtcgatgacgatgtagcggttgttctccgcgctcaggttgcccgtcaggtgcagctcctccagtgtcttcaggctatagatccacagcgggatctccttgacgtcggtgaacttgatgtgcagcgcccgcaggttctcgcgcaggaaggccagcgcgggcgcttcaatcttggccgctgtgtggtagagccacagctccttgaggcccgtgagctgggcaatgctgggcgggatggtcacgtcggggatcagctccagcttgaggacctccagctccaccaggtcaaacacagtgtcagggatgccactgagcatgaacaggtgcagctccagcttgtcctgcgcgttcttggtgagccgctgccggagcttgtccagcgtccactcgttgttgaggttcagctgccgcagcttgttctcactcacctccgacaggaagacggcgaagcgcttggagtagagcgggtcgtattggtcaatgaggtgcagcatgaaggcgaagtcgttcttgacgtcggggatgtcgctgtggctgctctcctcacggatcgactcaaacgagtacttcttgagggagcgccgtagcatccaccacagtgtatacatgcagatgaggccgtagaagatgactaggctgatgtagaaggacgccaggatcttgaagagtgtggccagggggtgggcacagcggtaggtgcggtagcccgtcaggctctcaatgtccacggtgcagtccacgtcgaacttgatgttgtgcacgtagtagacggtgtagcagatgatgaggatgaacttgatcaccttgatgatggtctgccgcatgtagaggcggtacacaatgtccccctcctccacatgggtccggaacttcttcaccttctcaaacagcgccttggcttgctccccctccttcttgtccagcacgcccgtctctgagcggtccacgataccctgctcgatccgtgacttggtccgctgcagcatgggcacggtggcctccacgtcctcactgacggtcgatgactttttgtccatggacccattcatcttgctgaaggccggcttggggtcgctctcctccaccactgtctccgacagggccctcgtggtccagggcgagtcgaagcacttcagcaggatagacacaaagtgctccagcttcgagctggtgcgcgggaatttgaaccagaagttgctgcaggccaggaagatgagcgtgtgcagaagcaccaggtaggggaagtacttggcaaaccagtgcagtcggttctcatagcacacagcgtccacgtagttgtactggtgccggtccaggtcatacttgatgcctgtggggcccgtgtcaggggtcggcagaatggtggagttggggtaggtgggctccgggccaggggctgcccagccccggaacgaatcattgcaggagtccttggtgacccacttacaaggcaggcagatcatcttgtcttgggtgacctgcagcgtccccccgaagacggcaatcatcagcatgacgatagagatgtagtctgtgaacacatcccaccacggcttcaggatccggtatgctggctgcgtgtccgcaaagtagcggagctctgtcaccggaatcatggttcaacctaaaagggagccataggaggggggttagcacagggtggcctggctttcctaggaccaggggtcaggggaagaagacaatgaaaattcttccattgtccaaaattccacctcaaatctagctgggagccaaagcctgcctactccacggggcagcccacttatcagcccttctgcagaaagcatgtggccacttggctgggaaaccaccctgggggaggcaggcaggctccccatttaatacacaggaagactgagcacagtgagattagacagatccccagtgcagcctcagggttctctgctccatcccttgcattccagtaagagcaatcgggaactcctttctaaagtccacctatttaatgaacagattgaccagagggacacatttaaaactcccagttcactgggaaccagctgctgtaaagctgcagcaaagggctggagggattcccgcaaaatatgaggaaagaaagcaacatgcagagggggcacaacatgaactcacttccataaaacaaagagcaaggtttaaaaattccacgtggttcacgtctgtaatcccagcactttgggaggccgaggtgggtggatcacctgaagtcagaagttcaagaccagcctggccaacatggtgaggctcggtctctactagaaatacaaaaattagcctggcgtagtggcgggtgcctgtagtcccagctattcgggaggctgagacaggagaatcacttggacccgggaggtggaggttgcagtgagctgagattgtgccattgcactccagcctgggcgacaagagtgaaactccaactcaaaaag

SEQ ID NO: 731 - DNA, 5880 bp, Homo sapiens
acactcatgctgcagccttgagccgtccctcgtcctcctctcaggctccctcttgtccacggcgggcgggcgccgagctgctggctatgccactgaagcattatctccttttgctggtgggctgccaagcctggggtgcagggttggcctaccatggctgccctagcgagtgtacctgctccagggcctcccaggtggagtgcaccggggcacgcattgtggcagtgcccacccctctgccctggaacgccatgagcctgcagatcctcaacacgcacatcactgaactcaatgagtccccgttcctcaatatctcagccctcatcgccctgaggattgagaagaatgagctgtcgcgcatcacgcctggggccttccgaaacctgggctcgctgcgctatctcagcctcgccaacaacaagctgcaggttctgcccatcggcctcttccagggcctggacagcctcgagtctctccttctgtccagtaaccagctgttgcagatccagccggcccacttctcccagtgcagcaacctcaaggagctgcagttgcacggcaaccacctggaatacatccctgacggagccttcgaccacctggtaggactcacgaagctcaatctgggcaagaatagcctcacccacatctcacccagggtcttccagcacctgggcaacctccaggtcctccggctgtatgagaacaggctcacggatatccccatgggcacttttgatgggcttgttaacctgcaggaactggctctgcagcagaaccagattggactgctctcccctggtctcttccacaacaaccacaacctccagagactctacctgtccaacaaccacatctcccagctgccacccagcgtcttcatgcagctgccccagctcaaccgtcttactctctttgggaattccctgaaggagctctctccggggatcttcgggcccatgcccaacctgcgggagctttggctctatgacaaccacatctcttctctacccgacaatgtcttcagcaacctccgccagttgcaggtcctgattcttagccgcaatcagatcagcttcatctccccgggtgccttcaacgggctaacggagcttcgggagctgtccctccacaccaacgcactgcaggacctggacgggaacgtcttccgcatgttggccaacctgcagaacatctccctgcagaacaaccgcctcagacagctcccagggaatatcttcgccaacgtcaatggcctcatggccatccagctgcagaacaaccagctggagaacttgcccctcggcatcttcgatcacctggggaaactgtgtgagctgcggctgtatgacaatccctggaggtgtgactcagacatccttccgctccgcaactggctcctgctcaaccagcctaggttagggacggacactgtacctgtgtgtttcagcccagccaatgtccgaggccagtccctcattatcatcaatgtcaacgttgttgttccaagcgtccatgtccccgaggtgcctagttacccagaaacaccatggtacccagacacacccagttaccctgacaccacatccgtctcttctaccactgagctaaccagccctgtggaagactacactgatctgactaccattcaggtcactgatgaccgcagcgtttggggcatgacccaggcccagagcgggctggccattgccgccattgtaattggcattgtcgccctggcctgctccctggctgcctgcgtcggctgttgctgctgcaagaagaggagccaagctgtcctgatgcagatgaaggcacccaatgagtgttaaagaggcaggctggagcagggctggggaatgatgggactggaggacctgggaatttcatctttctgcctccacccctgggtccatggagctttcccgtgattgctctttctggccccagagaaaggtgagcctacctcttcctgacttgcctgattctcccgtagagaagcaggtcgtgccggaccttcctacaatcaggaagatagatccaactggccatggcaaaagccctggggatttccgattcatacccctgggcttccttcgagagggctcttcctccaaatcctccccacctgtcctccaagaacagccttccctgcgcccaggccccctccgggcctctgtagactcagttagtccacagcctgctcacttcgtgggaatagttctccgctgagatagcccctctcgcctaagtattatgtaagttgatttcccttcttttgtttctcttgtttgtgctacggcttgacccagcatgtcccctcaaatgaaagttctccccttgattttctgctcctgaaggcagggtgagttctctcctcaaagaagacttcaaaccatttaactggtttcttaagagccgtcaatcagcctggttttggggatgctatgaaagagagaaggaaaatcatgccgctcagttcctggagacagaagagccgtcatcagtgtctcacttgtgatttttatctggaaaaggaagaaacaccccagcacaacaagctcagccttttagagaaggatatttccaaactgcaaactttgctttgaaaagtttagccctttaaggaatgaaatcatgtagaattttggacttctaaaaacattaaaatcagcttattaatacgggatagagaaagaaatctggtgcctgggggtccctgtgttcacccctagagtttgttttaaaatttttaattgaagcatgtgaagtgtacgtgcagaaaagtgggaacatgatagtgtatggcttggtggattttcacaaactgaacatacctgtgtaatcagcatctagacccagacccagagcatcacaaatatcccccatcctgggcttttcccagaggagatgggggcttctgaagatggacttacctgggacctgccccccatgagccaggacggtccccccacagtcagcctgtgcaaaggccccgtggccaggggtggaggagaacatgtgggtgtggacaggatgggagactgtggcctgaacaggagattttattatatctggagaccctgagagaccctgagacctggggcaccatggctggccaggtcagaagcatcctgactgcagaggtccgtgcagccacaccctcttccctgccagcaagctgtctgcggctcatcggaggcccctccgcctggagccttctatggacgtgatatgcctgtatctgtttttaattttcattcttcacttaggggaagtgaaatcgctcagagatgagatcctttaattgaaaacgaagtgtaacggaatctagtgtctttctaatgtggtaaaattctccatcaacatcacagtcagctggcagctgaacttcagaatctcacttacagcaggcgacacgggggtacaccgatgggtcacactgggtctgggggctccctggagctcctcctgcgtgtggtctggttaggagttgagttgtttgctccagggttattctcctcctcgagtcacagtcacacgaatacctgccttctctggctttcctgctatacacatattcacatggcgctcaagaagttaggctcatggcaacgtgtgtctttctctggacaactggcccagtttacagtgaaatggagaatttcaggtctccacgtctgcccaggaaagaacttcagctgactccacggggatctggaaatccacgaccaatcccgatcggctcttattagctccccgctccacaagacacctgtgctttggaaatccaccaccaatcccgatcggctcttattagctccccgctccacaagacacctgtgatttggaaatctaccaccaatcccgatcggctcttattagctccccgctccacaagacacctgtgacatcctccagggccacaggagcacgtgctgaccagttttcccttccagttcctgcacaaaaagtgtccagagggctgtttgcaaacactagtgcactttgtagcttctcaccctctgtcccagggaatctaggagagatgaggcccgtcagagtcaagagatgtcatccccccagggtctccaaggcatttccacactattggtggcacctggaggacatgcaccaaggcttgccagagccaacaggaagtgagcccagagcatggcacatgagcatcacccgctgatggtggcctgctgtgcctggtgccaacaggggcatcccggcccgtacccctccagacaggaagcatgggtttgcccacagacctgtcgggtgctcctgtgagtggcctccagatgtctttgtgcataggcacaagtgggccagggctggagggaggtgggaaacctcatcatccggtgggccctgccaatcttaacccagaacccttaggtattcctggcagtagccatgacattggagcaccttcctctccagccagaggctgacctgagggccactgtcctcagatgacaccacccaggagcaccctaggtgaggggtgagggcccccttatgtgaacctcttgcctcttcctttctcccatcagagtggttggatggagccattggcctccttttcttcagcgggcccttcaacctctctgcaccatgttgtctggctgaggagctactagaaaagctgagtggagtctcctttccaacaggatgatgcatttgctcaattctcagggctggaatgagccggctggtcccccagaaagctggagtggggtacagagttcagttttcctctctgtttacagctccttgacagtcccacgcccatctggagtgggagctgggagtcagtgttggagaagaaacaacaaaagccaattagaaccactatttttaaaaagtgcttactgtgcacagatactcttcaagcactggacgtggattctctctctagccctcagcacccctgcggtaggagtgccgcctctacccacttgtgatggggtacagaggcacttgctcttctgcatggtgttcaataggctgggagttttatttatctcttcaaactttgtacaagagctcatggcttgtcttgggctttcgtcattaaaccaaaggaaatggaagccattcccctgttgctctccttagtcttggtcatcagaacctcacttggtaccatatagatcaaaagctttgtaaccacaggaaaaaataaactcttccatcccttaaagaatagaatagtttgtccctctcatgggaattgggctgtatgtatattgttcttcctccttagaatttagagatacaagagttctacttagaacttttcatggacacaatttccacaacctttcagatgctgatgtagagctattgggaaagaacttccaaactcaggaagtttgcagagagcagacagctagagataactcgggacccagagttggtcgacagatgttagatgtatcctagcttttagctataaaccactcaaagattcagcccccagatcccacagtcagaactgaatctgcgttgttgggaagccagcagtggccttgggaaggaagccatggctgtggttcagagagggtgggctggcaagccacttccggggaaaactccttccgccccaggtttcttcttctcttaaggagagattgttctcaccaacccgctgccttcatgctgccttcaaagctagatcatgtttgccttgcttagagaattactgcaaatcagccccagtgcttggcgatgcatttacagatttctaggccctcagggttttgtagagtgtgagccctggtgggcagggttggggggtctgtcttctgctggatgctgcttgtaatccatttggtgtacagaatcaacaataaataatatacatgt

SEQ ID NO: 732 - DNA, 4766 bp, Homo sapiens
attttaaaactgaggaagagctgctatcatatatacgtgaaaattaccaaaagactgtggccacaggagaaatcatgttgtatgcatgtgctcgaaacatgatctcaaccgttaaaatgttcctaaaatcaaaaggcaccaaggaattagaagtgaactgcctgaatcaagtaaaaagtagtctcttaaaaactagtaaaagtcttcgacagaatctaggaaaaaaactggataaggaagacaaagttagagagtgccagcttcaggtatttcttcgtttggagatgtgtctgcaatgcccttcaataaatgaaagtacagatgatatggaacaagtagtggaggaggtgacagatttgctgcgcatggtgtgtttaactgaggattcagcgtacctagcagagtttctggaggaaattttgagattgtatattgactctatcccaaagacacttggaaatctttacaacagcctagggtttgtgattcctcagaagctggctggtgtccttcctacagattttttcagtgatgactccatgacacaagagaacaaatcaccacttctttctgtgccttttttgtcaagtgctcgtagatcagtgtcaggcagccctgaatctgatgaactgcaggaacttcgtaccagatcagccaagaagagaaggaaaaatgcattaataagacataaaagcattgctgaggtttcacagaatcttcgacaaattgaaattcctaaagtgtcaaagagagctacgaaaaaagagaactctcaccctgctcctcagcagccttcccagccagtgaaagatacagtgcaagaagtgaccaaagttcgaagaaatcttttcaaccaggaattgctttccccttcaaagagatcactaaagcgggggttgcctagaagccattctgtgtcagctgtggatggtctagaggataaacttgacaacttcaagaagaacaaaggttatcacaaactgctgactaagagtgtggccgagactccagtgcataagcagatctccaaaaggctgctgcacagacaaatcaagggcaggtcctctgatcctggtcctgatattggtgttgttgaagagtcccctgaaaaaggagatgaaataggtctgagacgaagtcctcgaatcaagcagttgtcatttagcaggacacattctgcctccttctattctgtgtctcagccgaagtctcgaagtgtgcaaagagtccactctttccagcaagataagtcagaccaaagagaaaattctccagtccaaagtattcggtctcccaagagtcttctttttggggcaatgtctgagatgatcagcccctcagaaaagggttcagctcgaatgaaaaagcgttcaagaaacactttggattcggaggtacctgcagcttaccagactcccaagaagagtcaccagaaatctctgagcttttctaaaactacaccaagaaggatctctcatacaccacaaactccgttgtatactccagaaaggctgcagaagtcccctgcaaaaatgacccctacaaagcaggcagcttttaaggagtccttaaaagactcctcctcacccggccatgactcaccattggattcaaaaatcactcctcaaaaacgacatacccaggcaggagaaggtacctctcttgaaacgaagacaccaagaactcctaagaggcaaggtactcagccgcctgggtttttgccaaactgtacttggccacattcagtgaattccagtccagaaagcccctcctgtccagcccctccaacttcatcgactgcccagcccaggagagagtgtctcactcccatcagagaccctctcagaacacctccgagagcagcagccttcatgggcacgcctcagaatcaaacacaccaacagccccatgtcctcagagctgctcgggcagaggaaccagcccagaaactaaaggataaagctatcaaaactccaaaaagaccagggaattcaactgtgacttcttccccacctgttacgccaaagaaactgtttacctctcctttatgtgatgtctccaagaagagtccatttaggaaatctaaaatagagtgtccttccccaggagaactggatcagaaagagccccagatgtcacccagcgtagctgcatctctctcctgccctgttccctcaactccccctgaactctcacagagagctacattggacaccatccctcctccacccccttctaaagttgggaaacggtgtagaaagacctctgatcccagaaggagcatcgtggagtgtcagcctgatgcctccgctactcctggggttggcacagctgacagcccagctgcccccacagactctagagatgaccagaagggactgagcctctctcctcagtctcctcctgaaagacggggctacccaggccctggtctcaggagtgattggcatgcatcctctcctctgctcattacaagtgacacagagcatgtcactctcctcagtgaagccgaacaccatggcattggtgacttgaaaagtaacgtcttatcagtggaagagggtgaggggctaaggacagcagatgctgagaagtcttctctgtctcaccctgggattcccccatctcctccttcctgtgggcctggctctcctctgatgccttcccgtgacgtgcactgtaccacagatgggagacagtgccaggcttcggcacaactagacaacctgccagcatcagcttggcattccacagactctgccagcccacagacctatgaggttgagctggagatgcaagcttctggccttcccaaacttcgaattaagaagatagaccccagctcttcattagaggctgagcccctcagcaaggaggagagctctctgggagaagagagcttcctccctgctctcagcatgcccagggccagcaggtccttaagcaaacctgaacccacctatgtgtcacccccctgcccccgcctctcccacagcacacctggcaagagcagggggcaaacctacatctgccaggcctgtacccccacccacggcccttctagtaccccctctccatttcaaacagatggggttccttggacaccatcccccaagcacagtgggaagacaactccagacataattaaagactggcccaggaggaagagggcggtgggctgtggcgccggctcctcttccgggaggggcgaggtcggtgcagaccttcctgggagcctgtcactgcttgagtcagagggcaaggaccacggccttgaactcagcatccacaggacgcccatcttggaggattttgagctcgagggagtgtgccagctcccagaccagtcgcctcccaggaacagcatgcctaaggccgaggaagcctcttcctggggacagtttgggttgagttccaggaagagagtcctgttggccaaggaagaagctgaccgtggagccaaaaggatctgtgacctgagagaagattcagaagttagtaagagtaaagaggggtctccaagttggagtgcatggcagctaccctccacgggagacgaagaggtgtttgtttccggctccaccccacctcccagctgtgccgtgcggagctgcctctctgccagtgccctccaggctctgacccagtctccgctgctgttccaggggaaaacaccttcctctcagagcaaagaccccagagatgaggatgtggatgttcttccctccactgtagaagactctcctttcagtcgcgctttctccaggaggcgccccatcagcagaacttatacacggaagaagctcatgggaacctggctggaggacttatagccacaaacattactgagcccaaaagatcaaggagtcagccaggaccctgtggacataaagaagttggatgcctggtcccaagcctcttttgccatggtcagtgttcagattgccattagaatgccttagggttttctaattccccttatggatccaatccatctcctggccctgccccttgttggggaagttgcaggaggagaggtggatggcaatgtgattggtgctataactcaggcagcctgggagtcaggaacccagacaaggaatcccattccagcctcaccccaaccatgaccttggcaagtcagggggccactctgcctcatttatgcaaatggagaaaggcgccctccctggggtcccttgagctgctgtaaggctgggctgctgcgacacaggcagcgctttgtaaactgtgaagccatatacgtgaaactgaagagtgcattgggcagtggaagctattttttgccttccctgtgtaacagtaaaatcatctctagtgactgagcactcagtacatttttgtttaatgttgggcctgaggttaactgtgaccatggtccagcttgagtggcttctggagcagccacattttcaaggactgtccaagagccagccagttcagggctcaggcctcacccattgcccactcctggggagaccatcacctggctcatcgtttccaccaagagtgccccacaggagtgccccacagacccgctggaccagcctgctgcgggtcctggccaggggtctggctaacggtgagggctgactctgaactgtctctcagtctccagaaagtgttcaagcctgttgtgttcccaaatctgattcctcctattgtcttgtaaatcaaactctaagtgaaaacttcccatttgtcccttcaaagatttttttttattaaatggttttttaagatcc

SEQ ID NO: 733 - DNA, 3821 bp, Homo sapiens
atctaaaggaactggtttaaatcctaatgccaaagtatggcaagaaattgctcctggaaatactgatgccaccccagtaactcatggaactgaaagctcttggcatgaaatagcagctacatcaggtgctcatcctgaggtgtctgtctttaatacaggtaatgcagagctctcagaagatatatgtaaagaatatgaagtaatgtattcttcatcttgtgaaaccacaagaaatactacaggcattgaagaatcaactgatgggatgattttaggaccagaagatctgagttaccaaatatatgatgtttccggagaaagcaattcagcagtttctacagaagacctaaaagaatgtctgaagaaacaattagaattctgtttttcacgagaaaatttgtcaaaggatctttacttgatatctcaaatggatagtgatcagttcatcccaatttggacagttgccaacatggaagaaataaaaaagttgactacagaccctgatctaattcttgaagtgttaagatcttctcccatggtacaagttgatgagaagggtgagaaagtgagaccaagtcataagcgttgtattgtaattcttagagagattcctgaaacaacaccaatagaggaagtgaaaggtttgttcaaaagtgaaaactgccccaaagtgataagctgtgagtttgcacacaatagcaactggtatatcactttccagtcagacacagatgcacaacaggcttttaaatacttaagagaagaagttaaaacatttcagggcaagccaattatggcaaggataaaagccatcaatacattttttgctaagaatggttatcgattaatggattctagtatctatagtcaccccattcaaactcaagcacagtatgcctccccagtctttatgcagcctgtatataatcctcaccaacagtactcggtctatagtattgtgcctcagtcttggtctccaaatcctacaccttactttgaaacaccactggctccctttcccaatggtagttttgtgaatggctttaattcgccaggatcttataaaacaaatgctgctgctatgaatatgggtcgaccattccaaaaaaatcgtgtgaagcctcagtttaggtcatctggtggttcagaacactcaacagagggctctgtatccttgggggatggacagttgaacagatatagttcaagaaactttccagctgaacggcataaccccacagtaactgggcatcaggagcaaacttaccttcagaaggagacttccactttgcaggtggaacagaatggggactatggtaggggcaggagaactctcttcagaggtcgaagacgacgagaagatgacaggatctcaagacctcatccttcaacagctgaatcaaaggctccaacaccaaagtttgacttattagcctcaaattttccacctttacctggaagttcatcaagaatgccaggtgaactcgttttggagaataggatgtctgatgttgttaaaggtgtctacaaagaaaaggataatgaagagttgacaattagttgcccagtgcctgcagatgagcagacagaatgcacttctgcccagcaactcaatatgagtaccagttctccatgtgctgctgagcttactgcattaagcacaactcagcaagaaaaggatctaatagaagattcctctgttcagaaggatggtctcaatcagacaactataccagtttctcctccaagtactacaaagccatcgagggcaagtactgcttcaccatgtaataataacataaatgcagctacagctgtggctctacaggaaccccgaaagttaagttatgctgaagtgtgccagaagccccctaaagagccatcttcagttcttgtgcagccactacgggaacttcgctccaatgtggtgtctcccaccaaaaatgaagacaatggagctcctgagaactccgttgagaaaccacatgagaagccagaagcaagggctagtaaggattattctggcttccgaggcaatataatccccaggggagcagcaggaaaaatcagggaacagagacgccagtttagccatagggctatacctcagggagtgactcgacgtaatggcaaagagcaatatgtgccacccagatcaccaaagtaaaaaacaacaaaactattcaaaaacttcactctcttcccattaaacttgaactgtggctatattgaactgttttggaggggagggggtagccaggaaggaaacaagagaaagtacgtccatttcattatggatcttggagttgtgagtgatgggatcccaaaattcatctctaatgtggtttttaaatgctggaggattccaatcaatataaatatatatatatatatacacacacatatataaaaagtataatttttctatttttgtttttggttttaatttgcagagatttgctgccaggaatcaattttgagggttcagatttagcttggaagaaaaaaaagaaacatacatccttcagtataggagatgagggaatgagagaaaatattttttgaagaagcatttctgtaaaattagaaattactttttttaatctatttaaagtttggcttgaagaatgccatctctgactatatggccttgtattgcaaagcagatcagtggctggggtgcctgttgtgggtgtgagtgtgtacaagagcgattgaagccaaatctgttgtcatgttagtaaatgatttgaaaactgaatgtaatacttgagtagatttttttttctagtttgaaatttagtctgtctttttgaccttactaatatttcatttaacaagttgtaaaactctgattgtacttagagatgtgactaccaatcagtttgatactcaaggaaagggggttattcaagaaattgaaaatttcatcttggacctcagtgcatcggtcaaatggatttcagaggtttaaacttccctgtgattccccctgaatacccccaaaatgagaaacaaaattttttttcttactccatttgttactctctgttctttgactgcccacccacagaaaagcaaaataaccaactacctactcaattgtgtgtttgtaattgctttgagcagtctagtcaaatcatataaattgttctaaatttcagaattgaacattgaagtattaactcttctgttcacacatttagaattttagctcccaagatggtagggcagactgaccgtacagtaatttatttgtcgttagtgttaaagattaagcatagtaactgactcttaagtgttaaataatgtagaagtaaaaaaattttttttaaaggcttaatttgggaggggggacttatttctgtttacagtgtattaccttccttccctcctcttctccccccacacccaacaaaatacagtttggaattcactgaaacagtaccagcaagtcatgagattttttagtaaagatgagaaagatggttgaagaaaattagtgcataatttctcagtgaataaagttgtagctctcatatactaaatagacaagtttacatgctgttatttagaaaatgactaaaatattaaaaaccgtgttgtgttaatctgttttaagtcataccatgttcagagttctatgtaaggtgggttttatttttcttttaagggatagtttgtaatagtaagaactgtcccatatgttagtaaattacatatgtacaaattgaaactgtaaattgtgaacactggaaagcaccattgtgacatagagtaaacatcttagtaatatattaaagtgaatgtaaatggtggtt

SEQ ID NO: 734 - DNA, 3981 bp, Homo sapiens
aaacccaattcctggtgtcccctagtcttggcggaggagccttttagatgagccccgaaaggccgggcagggaggacaagctctttggggctaccaaacagaagcagcaatgcctgttgtgtggccaacccttctggatctcagcagggatgaatgcaaaagaattcttcgaaaattggaattggaggcatatgctggagttatcagtgcacttcgggcacagggggatctcaccaaggaaaagaaagatcttcttggagaactatcaaaagttcttagcatctcaacagaacgccaccgtgctgaagttcggagagcagtaaacgatgaacggttaacaacaattgcacataatatgtctggacctaatagctcttcagaatggtccattgaaggtcgtcgattggtaccactgatgccccggctcgttccccaaaccgcctttactgtaacagctaatgctgttgctaatgcagctatccagcataatgcatctcttccagtgcctgcagaaacaggaagcaaggaagtagtggtttgctattcctacacaagtaccacgtcaaccccaacctctacccctgttccaagtggcagcatagcaacggttaagtctccaagacctgccagtcctgcctccaatgtagttgtcttgccaagtggaagtactgtttatgtcaaaagtgtaagctgttcagatgaagatgaaaaacccagaaaacgaaggcgaacaaactcttccagctcctctcctgttgttctaaaggaagttccaaaggccgttgttccagtctcaaagacgatcactgtgcctgtgagtggtagtcccaagatgagcaacatcatgcagagcattgccaactccttaccaccccacatgtctcctgtaaaaatatccttcactaaaccatcaacacagacaacaaacacaacaacacagaaggttattatagtcaccacatcaccaagctcaaccttcgtgcccaacattctctccaaatcccataactatgcagcagtcactaagcttgtaccaacgtcagtcattgcttctacaacccagaagccaccagttgttataactgcttcacagtcctctctggtcagtaatagcagcagtggcagcagcagttctacaccatcacctattcctaatacagttgcagtaacagctgtggtgtcctctacaccatctgtggtcatgtcaacagtagcacaaggtgttaaaatcatcacacaacaggttcaaccaagtaaaatcttacccaaaccagtgacagcaactctacccaccagtagcaattcccctattatggtggttagcagtaatggtgcaattatgacaactaaactggtaaccactcctactggcacacaagcaacctatacccggccaacagtgagcccatccattggtcggatggctgcaacccctggagctgcaacctatgtgaaaactacgagtggtagcatcattacagtagtacccaaatcattagctaccttggggggcaagataattagcagtaatatagtttctggaacgactaccaaaatcactacaatcccaatgacttccaagcccaacgtgattgttgtacaaaagactacaggaaaaggaacgaccattcaaggcctcccgggcaaaaatgttgtcacaacgttgctaaatgctggaggagaaaagactattcagacagtgccaacaggagcaaagccagctatccttactgctacaagacccatcaccaaaatgattgtaacgcagccaaaaggaataggttctacagttcaaccagcagctaaaatcatcccaacaaaaattgtttatgggcagcaagggaaaacgcaggttcttattaaacccaaaccagtgacttttcaagcgacagttgttagtgaacaaacaagacagctagtaacagaaacattacagcaagcatccagggtagcagaggctggtaattcatctattcaggaaggaaaagaagaaccacagaattatacagatagtagttactcttctacagagtcctcccggagttcccaagattcccagcctgtagttcatgtaattgcttcccggcgtcaggattggtcagaacatgagattgcaatggagactagccctaccataatttatcaggatgtatccagtgaatcacaatcagctacttcaacaatcaaagctctgttagaactccaacagacaacagtaaaggaaaaattggaatctaaaccaagacaacccactattgacctgagtcaaatggcagtgcctattcagatgacccaggaaaagagacattctcctgagagtccatcaattgctgtggtagagtcagaactagtagctgaatacatcactactgtcagccatcgctcccagccccaacagccttcccagccccagcggaccctgctccagcatgtggctcagtcacagaccgcaacacagacttcggtggtggtgaagtccatcccagcatcttcccctggagcaatcacccacattatgcagcaggcattaagcagtcacactgcttttaccaaacacagcgaggaacttggaactgaggagggcgaggttgaagagatggacactttagaccctcagacaggtctgttttaccgatctgccctgactcagtcacagtcagctaaacagcagaaacttagccagcccccgctggaacagactcagctgcaagtgaaaactctgcagtgcttccagactaaacagaagcagaccatccacctgcaggcagaccagctccagcacaaactcccgcaaatgccccagctttccatcaggcatcaaaaactcacccctctccagcaagaacaagcacagcccaagccagatgtacagcacacacagcatcccatggtggccaaagacaggcagcttcctaccttaatggcacagcccccgcaaactgtagtacaggtgcttgcagtgaaaaccacgcagcagctccctaaactgcagcaggctccgaaccaaccaaaaatctacgtgcaaccccaaaccccccagagccaaatgtcgctcccagcttcttcagagaaacagacggcaagccaggtggagcagccaattataacccaaggatcctctgttacaaagataacttttgaggggcgccagcctcccacagttacaaagataactggtggcagttctgtgcctaagctgacatcaccagttacaagcatatctcccattcaggcctctgagaagacagcagtgtctgacattttgaaaatgtctttgatggaagctcagattgatacaaatgtagaacatatgatagtggatcccccaaagaaggctcttgccactagcatgctcactggtgaagcaggatcattaccctccacccacatggtggtggcagggatggcgaattccactccccagcaacagaaatgtagagagtcctgttcgagtccatccactgttggctcttccctaacgacaaggaaaattgatccaccagcagtgcctgcgacaggccagttcatgcgtattcagaatgtaggccaaaagaaagctgaagagagtccagcagaaattatcatccaggctattcctcagtatgctattccttgtcactccagctccaatgtggtggtggagcccagtgggcttcttgagctaaacaacttcactagtcaacagctggatgatgaggagacagcaatggagcaggacatagacagtagcacggaggatggaactgaacccagcccttctcagagctctgctgaacggtcctagtgtttggacacaatagtgcactttaaaacctgcttggttaccaagtgtccagggaaacccttgtattttgatgactaaaaagagcactttgcccgtacttaggctgtggaccctaaaacagcagtgtttcaacaagatgttgctgcaggagcagctttttaaaacaagataaaactcacagggggatgtactttttt

SEQ ID NO: 735 - DNA, 4736 bp, Homo sapiens
attcctggaacctctttcccaaagcggcagtcgatccctggtctccacggcggtgcagcctcagcctcctcgcttttcacggtcggcttgggcgtcccttcggaatgccttcctcactgatggtgctttattaggattcctcttgtgcttaattacctcctagcctcctgctggcagcggggtgccgcctcctcaccgtaattaggctccgtcgagagccctttcccttcttgccagccccagcaggctcagagttggccgaagccaggggggaggggacggccatgggaacccagcggtgtgacccctgccctcggcgacggggccaaggtcaaggccagagttgttggccagacccacatagaacctcaagacaccccccttatctctctcgcacccggaacgtgagcccagcgcctggacgtggagaattcctatctgaggaggggcgctggggttaggtgccagtgcttgggcccccggcagcctaaaccactcctttaagtggtccgacgggtgctggggaaatgtcccatctggaacccagggatccccccaagagcggcttccctctgctcttagatgcgagaaggaagttctgattttgcggacacccgggaggtggccagggccaggcagactctgccaagtgcccttccagcttctggtccaacgagggaacactttgggatgagagttaccggcttgtcggaactcctctggtgacgatttgtgggtggagcacacacaagtgtagagttatagctgaggtctttacctttccgtcttccaggcagccttctgtgcctctgctctgagaacatgagactcatccttgattctggcacacgggtgttacttggtcacatgaaataaaaggttacgggcatggtggttcacgcctgtgatcccagcgctttgggaggccgaggcggatggatcacgaagtcaggagaggaccggcctggccaagatggtgaaaccccgtgtctactagaaatacgaaaattagccgggcatggtggcaggcgcctgtaattccagctacttgggaggctgaggcagagaattgcttgaacccaggaggcggaggttgcagtgagccaagattgcgccactgcactccagcctgggtgacagagccagactccgtctcaaaaaaaaaaaaagaaagaaaaacggggtcttgttctgttgctcaggctggagtggagtggtgtgatcacagctcactgcagcctcaacctcctgggtcctgggctcaagcaatcctcctgcctctgcttgcctggtggctgggacctcaggcgcacatcagcacacctggccgacttttttttgtatgtttttgtagggatgagatctcactatgttgcccagtttggtctcaagctcttgagctcaagcgatcctcccgcctgggcctcccaaagcgctgggattacaggcatgagccactatgtctggccctaatggacggtgttagacaatgacaggagtgcacataagagatcaaaactagaacttgcataattagtattatttattaagcacccagagaacagtcaagaccaaagtccctgcttgtccttggaaaaatgtcacctctatagcaggtgtcctaaccctgcagtccacccaccttaggaagtccttgaatagctctctgggggaaatctatcagctgcctgaagagctttgtgtgtatttgtacaccagcattttcctgaggaaggaggtgcctggcttcatcagtttctcaaagggtctaggacctcaaaagggatcagaatctagatatttggataccctatttttttttttttttggcagaggtggggtctcgctatgttacccaggctgatctcgaactcctgagctcaaccatcctcctgcattggcctctcaaacagctgggattatagtcatgagccacagcgcccggccctgatacctttacgtcagcatttcccaacatactgtctcagggccacttacctgcaccagaactacctggaatatttaggaacagactcctggcccccaaccaaacctcctgagtcagtgtttcaggggaggggactgggatattttgttttgcaccgactccctaggtgattttgatgcttagccaaatgagaaccattgttcggagctaacatataacacagcaaacaactgtgtctgtgtcctctccttgggagagaactccagaagtaagttgctttgttgcatggggagggggagtgttggaaatcccactgggatgtgtcgtttcccccatatgtggcactaattgagctggaatatccagggagaggcagcagttctagggatgggagcaaggccagccagcctgccagagacacaggtgtggttttggtcggagaatgccatgactgagttaatccctccataccaggttccaccccagctccacaacatcctgtctgtctccccagacaaaccagcccagatcctcctgggccccagaaagatgacacagctgcccccgcccccatctcctggcctggacccacttggcttcctatcttggaagacaatggttgagattccagggcagaagcatttttaaggctctacctaaaacggccccaccccagcttcattcctcctccatcttgtcccgcacttctgccggcagaccctggtaaagcgtgtcttccaccaggagccccgccttcttgagccccccacagttgccaagttcttctggcagcgcctctaagcggttgcctttgagctccaggcggctgagggctctgagggcacccacgtggggcgagagctggctcagctggttgtcgcccagaagcaacgtccgcagcttgcggcagaagaagagctcttcgggcagggcctccagggcattgtaggagagggccaggtgctgtaggttctgcaggaggcccacctcgggtggcagggagtgtagcccattgtgggacacatccagcagacggaggcctgagcacaggccgagctgggagggcagggtctccagcttgttgtagctgaggtagagctgctccaggctcctgagcttccgcacgtgctcagggacgtaggcgatctggttgtgccacagcctgagcgtgaccagcttccggcagtgctggaagctgaggatttcctcgatggagcgcaggtggttgtccttgaggtcaagttcctgcagcgcacccaggctgaacactgcatgggggatgcgctccagcccgcaggccaccagctccagctcccgcaatgccgccagcttcttgaggctgttcagggcaaccagacgggccccatcgttgtgcaggctgagcctctgcaggtggccagcaacgtcggtcacactggctggcaccttcccggcgttgctccggagggacaacaccttgagctgcttcagctcccggaggctctccagggtggctgcccgagctagctcctgggggaaaagcccctccaggtgcagctcctccaagccccgcagcccaaacacccaaagcggcacctcgcggagctcctcgcatttgacgcgcatcaccttcaggtggtcccgcaggaagacctgcaaggagaagggtagcctggcgggcgagtggagcaagctgagctcctgcaagtgcaccagctgtgacagccccggggggaaggtgatatcgcagatggcctccagcctgagtgactccacctcactgagctcaaagacggtgtcgggcagacccggcagcatgcagagggccagctccagccggcccgcggcattgcgctgcagcttcagtcgaagcttctcgggcgtccactcgtggttgagattgagctgctttagacggctttcgctgacctcggacaggaagacggcgaagcgcttggagtagagggagtcgtactgatcgatgaggtgcagcatgaaggcgaagtcattcttgacgtcaggaatgtcccccatgccagtctcctcccgcacggaacggaaggagtactccttgaggggccggtggaagagccagtagagcgtgtagatgcaggtaagtccgtagatgcacacaaaggagatgtaacagaaggccagcttggagaagaggtgggccttggtgtggttgcagcagaagctggcgtagcccgtgacctctgacgtctccaccctacaggccaccaggaaactgatcttctccacatagaccaggttgtagaccaggatggccaggaacttacacactttcagcaccgtctgtcggatgtacatggtgtacaggatgtcgccctcttccacatgcatgcggaacttcttcaccttctcaaacagggctttggcttgctcaccctccttcttgtccaacagggtgacaactggaggctcggtcaccaccttctccggttccgccagcactttctccttctcaccctcccctgccttccccggcccggtccctgccatggccactatggtggccgcagcccgttcggtggctgctgggcccttctggttctccccggagacctcggatagggccctggtggtccatggagagtcgaaacacttgcccaggatggagatgaagtgttcaatcttggagctggtgccagggaacttgaaccagaaactggtgcagaccatgaagatgagtgtgtgaatgaccacgaggtaagggaagtacttggcataccagtgcagggccgtctcataacacagctggttaataaagctgtattgctgcaggtcc

SEQ ID NO: 736 - DNA, 4910 bp, Homo sapiens
gttccagatcaaataatctgattgtagcaaatttggggaagttgaaagtcaaaaataagtttctgtttgctggttttcctggcaccttttccctacaagataaggaatctgtgccttcagcttccccaacgggtattcccaaacacagtctgaggaaaacgacaagcacggaggagcccaggggaacccattcccaggggcagttcacgatgcctcttgctggaatgagcctaggaagcctgaagagtgagtttgtgcccagtacctccaccaagcagcaagggccgcaacccacactgtctgttggccaagagtccagtagtccagaagaccatgtctgcctgctggattgcgttgtcgtggatctccaggacatggacatctttgctgcagagagacatccgagagaatactcgaaggcaccagaggatagtagtggagatctgatcttcccttcctattttgtgcgacagacaggaggaagcctcttaaccgagccttgtaggctgaaattgcaggtggaaaggaatttggacaaagaaataagtcatactgtgccagacatatctatccatggcaatctctcctcagtccactgctctctggatctgtataaatacaagctgatccgcggcttattagagaacaacctgggagaacccatagaggaatttatgcggccttatgatttacaagatccaagaattcatactgtcctgagtggagaagtgtacacctgtatgtgcttcctcattgatatggtgaatgtaagtctggagcttaaagatccaaaaagaaaagaaggtgctgggtccctagccagatttgacttcaagaaatgcaaactgctctatgaaagtttttccaaccaaaccaagtccattaacttggtttcccattccatgatggcttttgacacccgttatgctgggcagaagaccagccctggcatgacgaatgtgttcagctgtatctttcagcccgctaagaacagcagcaccacccaagggtccattcagattgaactacatttcagatctaccaaggattcctcctgctttacagtagttctcaacaatctccgtgtgtttctcatatttgactggctactgttagtccatgattttctccacactcccagtgatattaagaaacaaaatcatgttactccttctcgccaccgtaactctagcagcgaatctgctatagttcccaaaactgtgaagagtggagtagttaccaagcggtcttcccttcctgtgtccaatgaaaggcacctggaggtcaaggtcaatgtaacaggtacggagtttgtggtcattgaagatgtgtcctgcttcgacaccaatgccattattctgaaaggcaccacagtgctcacctataagccccggtttgttgatcgccccttttcaggaagtttgtttggcattgaggtgttttcatgccgactagggaatgagcatgatacagctctttcaattgtggatcccgtacaaattcaaatggagttggtggggaattcttcttatcaaaatagttcaggattgatggatgcattcaatagtgaagatttcccacctgtcctggagattcagttacaagccctggatatcagactctcctataatgatgttcagctgtttcttgccattgcaaaatccatcccagagcaagctaatgctgcagtgccagactcagtggccctggagtcagactccgttggcacttaccttccaggtgcatctcgcgttggagaggaaatcagagaagggacaagacacaccttagatcctgtcttggagttacagctggctaggctgcaggagctgggattcagcatggatgattgtcgcaaagctcttttggcgtgtcaaggccaattgaaaaaggcagcaagttggttgtttaagaatgcggaacctctgaagtctctttccttggcctccaccagccgagatagcccaggggctgtggcagcgccattgatctctggcgtggagatcaaagctgagagtgtgtgcatctgtttcatcgatgactgcatggattgtgatgttcctctcgctgaactcaccttttcccgtctgaattttcttcagcgtgtaagaactagccctgaaggctatgcccacttcaccctttctggagattattataaccgtgctctttcaggctgggagccatttattgagccttggccatgctctgtatcctggcaacagcaggcagctagtcgtctccatcctcctcgactgaagctagaagccaaggccaaacctcgtttggatatcaatatcacttctgtgctaattgaccagtatgtaagtaccaaggaatcgtggatggcagattactgtaaagatgacaaggacatagagtcagctaaatcagaagactggatgggctcttcggtggatcctccatgttttggacaaacagaggtgaaaacccccaagcgccggcagccctttgtcccctttgctctgaggaaccacacggggtgcactttgtggtttgccaccctgaccaccacacccaccagagctgcactctctcacagtgggagtccaggggtagttccagaagggaacggaacatttctcgatgatactcacaatgttagtgaatggcgagaagtccttacaggtgaagagattccctttgaatttgaagcaagaggaaagttaagacacagacacacccatgacctccggattcatcaactgcaagtgagagtaaatggctgggagcaagtgagcccagtgtctgtggacaaagtcgggaccttttttcgatatgcagcaccagataaaaattcatcttcctctacgattggcagcccaagcagcagaacaaatattatacatccccaggtttatttctcttcactcccaccagtgcgggtggtctttgcagtgactatggaaggcagtgcacggaaagtcatcactgtccggtcagccctcattgtgaggaacagacttgagacaccaatggaactaagactggatagcccatcagctccagacagtatgttttgattgtctagcatatagtaaatgctgataaatacttcttgactgttgtcaagtctctttttccccagtggtatcttccccagcagtcagtatatatggtctgtcttcttttgtcctgagatggtcaatctttggggtggaggaccattgcctgaaagtgttaacccttatttctgtggcagagccagtggtgcttcctgctatcatgccaggggattcgtttgctgtgcctttacacctcacttcttggcggctacaggcccggcccaaaggattgggtgtatttttctgtaaggctcccattcattggaccaatgtagtgaagactgcagaaattagtagcagtaaacgagagtgccactctatggacacagaaaaaagccgatttttcaggttttgtgtggctataaagaaagagaattatccagattatatgccctcaaacatattttctgacagtgcaaaacagattttcagacagcctgggcataccatatatctcctgccaactgtggtaatctgcaacttgctaccctgtgaacttgatttttatgttaaaggaatgccaattaatgggacgctgaaacctggcaaggaggcagctctccatacagctgatacatcccagaacattgagctgggggtatcactggagaatttccccctctgtaaagaattgctcattccacctggaacccaaaactatatggtgagaatgcgactctatgacgtcaaccgtcggcagctgaacctcaccatccggattgtgtgtcgagcagaaggatccttaaagatcttcatttctgctccatattggctgattaacaaaacagggttgccactgatcttcagacaggacaatgccaagacagatgctgcaggccagtttgaggagcatgagctggcccgtagcctgagtcctctcttattctgctatgctgacaaagagcagccaaacctctgcacgatgagaatcggaagggggattcatccagaaggcatgccgggctggtgtcagggcttctccctggatggtggtagtggtgtccgagctttgaaagtcatccagcaaggaaaccgcccagggctgatctataacattggtattgatgtcaagaaaggccgaggtcgatacattgatacctgcatggtcatctttgccccccgttacctgttagataataaatcatctcacaagcttgcatttgcacagagggaatttgccaggggacagggaacagccaatcccgaaggttacatttccacccttcctggttccagtgtggtgttccactggcctcggaatgactatgatcagctattgtgtgtcagactgatggacgttcccaattgtatttggtctggaggctttgaagtcaacaagaataattccttccatatcaacatgagggataccttgggaaaatgcttcttcctacgagtggaaattactctccgaggagctacgtataggatctcatttagtgacacagatcagttacctcctcctttccgaattgacaacttttctaaggtcccggttgtctttactcagcatggcgtagctgaacccaggctccggactgaagtgaagcccatgacttcattggattatgcctgggacgaacccaccttgccaccttttatcactctgactgttaaaggggcagggtcctctgagatcaactgcaacatgaatgatttccaggataatcggcagctttattatgaaaatttcatttacattgctgctacatatacattctctggcttgcaggagggaacaggcaggcctgtggcttccaacaaggccattacctgtgcggagctcgttttggatgtctcacccaagacacaaagagtcatttt

SEQ ID NO: 737 - DNA, 3864 bp, Homo sapiens
aagggaggaggaagatggcggcgggggcgaggtgaggtgttggcagtggaaaggggttcgggctcggggggcggggggacgcggagcgatggcccgcgccggccgcaggggcggataaaaagccgtcgcgctgcgggagtgggcgggagggagagggggtgtccgagggccacaagagtatgacggggctgtacgagctggtgtggcgggtgctgcacgcgctgctctgtctgcaccgcacgctcacctcctggctccgcgttcggttcggcacctggaactggatctggcggcgctgctgccgcgccgcctctgccgcggtcctagcgccgctcggcttcacgctccgcaagcccccggcagtcggcaggaaccgccgtcaccaccggcacccgcgcggggggtcgtgcctggcagccgcacaccaccggatgcgctggcgcgcggacggtcgttccttggagaagctgcctgtgcatatgggcctggtgatcaccgaggtggagcaggaacccagcttctcggacatcgcgagcctcgtggtgtggtgtatggccgtgggcatctcctacattagcgtctacgaccaccaaggtattttcaaaagaaataattccagattgatggatgaaattttaaaacaacagcaagaacttctgggcctagattgttcaaaatactcaccagaatttgcaaatagtaatgacaaagatgatcaagttttaaattgccatttggcagtgaaggtgctgtctccggaagatggaaaagcagatattgtaagagctgctcaggacttttgccagttagtagcccagaagcaaaagagacccacagatttggatgtagatacgttagccagtttacttagttcaaatggttgtcctgatcctgatttagtattgaagttcggtcctgtggacagcacattaggctttcttccctggcacatcagattgactgagactgtctctttgccttcccacctaaacatcagttatgaggactttttctctgcccttcgtcaatatgcagcctgtgaacagcgtctgggaaagtagtggtcattggttgcataatttgatttgaggcttgtggaggaaaggaaccaagtgactctgatgtttacaaagcacctatgaaaccctgtacacacctagttcataatcctcataatttatcaacaaacacaaaaaagtgtcttacttgagagtgagtgtgtgtgtgtgcgtgtgcacgtgcacacatgtgcacgtttgtatgtatggaaataaacttataaatggggacgtattggagaaggaaatacatagacctacaactttgagcaaatagcagtgatgttttaggaactgaaatgtcacacttaaagtcttcagcccagctacttccctatttttgtggggagaagagggcctgattagaactgttctggttgtgtttggcgggaggggaataatttttgttcagtccttcttagtgaccaaactttaatttttaagaataatatattgacttactgaactgaagcattctgagttgaaaggagctccagaggagtggagttctgtgttgctcacatgttaaaatcttgctcaccttcagagcagagggaatacctatcttcagatatccgtccattttcatctcttaattgtagtcaaaagtatgacttgagagtgttgctctggtattctgggttctgaagtctggtattctggtattctgggttcaaaagtatgacttgagagtgttgctctggtattctgagagttgctctgtattctgggttctgaagattatttgaaaaataactcctactacattgaaatgcagacttaaaaatttaaacattggattaggcagtcaaaaaaaccaagcaagcataaaaggtcaataagttgtaatcttgatagtaaaggtggaaaacttattataaatggaaagaaagttttatttccttttttgtttgatgggcagtatgccatattatacccaaagttcttttaaaaaatatttccatcaaccatttttatttaaaataaacatttgagggaagttaccaaggcagcttttttcctcaaaagtaacctgttcctctttggaatagcacattttaggggcatggttaatacctgagatttttactcagtaaatcctgatggttactgtgtgtaaaatatctttaagtaggattgaaggcctctgtgggggaataaaatattaccaaagtctataaaaataaattttacatgttctcttttatgacagagagcagcactggttctgttatttttaaaatgaataattgatttcttgataggtgtttaatatttcttccctcactgctgattcttagatagaaaccattctttatatttgatagactgctttcagaaaacccttatcaacaagtgtacaatacttatctaaaactatacatttagaatggagcagtttaatactagatctcagaagttttgaaaaatagcaaagaagactggatttggaaagcatggtctacaattggttgttaaattctgaagctatgaagaataaatgtttcaactttggattatgaaaccccatttatgattttttaaatacacttgaaataaaaatgattaaactaaattttggtccagtgacattactttgcactgcataatccattatacgttgtacgactttttttttttgttttaatttattactgagagttttgtgtgaagctacagcatatctaaccagagaatttctgattccttatactgtgattatattatattgaggcatttgtagtgcagctgaagactgaatttatgccttttgtaaacatgataggtataaatgtcttataaacattctggagtatgtatagctttaatgaatgaaatttaatggacctgattaaaatgaagggatttaatcgttgttaaagttaagttagtcaaataaattacctactggaatatagcccaagccagtaaaggtttaatatttgcattttcgtgcttttattttctccttccattcataagtatatacttgaaagtacatctgtagcctatgatttgagtctcttgaagttctaggaagaggcaaactacaaactactaggattctgatttcagatgtagtcattccagaaccttctctttatgagttcacctgctagtacaatctccacaacttgaatggcattggttgttctgtaattcctgccaaaagcatcacaagttgtacatcatcaaggctccctttgcactcccaagaagaactggtaattttaaacaaaagtatgtgtctttatttgtattggaaaatactgtctttaaattgtttcttgttgacactccccacaatggaaaaattaccgaattaaacctgttttatggatggcagcttggagcatagcaagaagttggaggatttgaattccattcccagttctcattgtgttttgtttcttaaaactataataatcggttactgttataaagtttaaaaggtggttttaatgtgaatagcaaattctggtatatcgtgactaacgcttaagaatgcctgtctttgagaggaaggtgttataatattaatgaacagtgccaaatacactgtgcatatctgcaatttaatctttgaatgtatgttactggattagctccctcctcctgtgtgatggtaccatgcatagagtcaatcaaatccttgtgatgttttgtatggactttgacaatatgtaaataatgtgtaaagccagtttttatgattaaggaatcaaatttattgaattttattattgaaagttgaaacttaacatgtatgaacaaaaaccaataaaagaatatactcttttcattg

SEQ ID NO: 738 - DNA, 4905 bp, Homo sapiens
cccctgttcctgctgcaaaaatagaaaaggaccgcacggtgatgccctgtgggactgtggtcactactgtcactgctgtgaagaccaagcctcgcgtcgacgtggggagggcatccccgctgagctctgattctccggtgaagactcccatcaaggtgaaggtgatcgagaaggacatctctgtccaggccatcgcctgccgcagcgcccccgtcagcaaaacactctcttcttcagacacagaattgttggtgttgaatggttcggatccagtggctgaagtggccattcgacagctcagtgaatcttcaaagctgaaactcaagtcgccacggaagaaaagcactattatcatatcagggatctccaagacctcactatctcaggaccacgacgctgccctgatgcagggctacacggcctctgtggacagcacccaccaggaggacgccccatcccatccggagagggcggcagcctctgccccgccagaggaagccgagtcagcccaggcatcccttgcccccaagccccaggaggacgagctagactcctgggacttggagaaggagccacaggccgcggcatggagcagccaggtcctgctggaccccgacggtgatgagctgtcagagagctccatgagtgtcttggagccgggcactgccaaaaagcataaaggaggaattctaaggaaaggtgcaaagctgttcttccgccggcggcatcaacagaaagacccaggcatgagtcagtcacacaatgaccttgtgttcctggagcagccagagggttcccggaggaaaggcatcaccctcaccaggaccctgaacaagaagctgctctccaggcacagaaacaagaacaccatgaacggtgcccccgtggagccctgcacgtagggcctgaggtcatcacctccaagccagaagacgtgcacccatgttaactaccctcaccaggacgcagccagtgtgtccgccggatgtccagatgccccgcttgtcttgctgggtttcttccaaccatctcgtcatttaaagggaaaacaaaatctgagtctccagccaggaggcttctcccagagaggacaaaaaagcccaacttgccaccagatgctaaatgagacttgacagctgcagagcttgggctgtgctcatagctaagggttagggttcaatattagaaggagattaacattataagtgaaataatatgctctaatagattgtggagggcaggtttgagggacttagtttacctattctacactaacaagtgttgttttgggtccatgcctggaccatgtcacaaaaaggaggtgcccccctgtgctgtcactgtgaatggaaaggatgggtcacctctcttcatctgctgcttggaataaaaaatgcagctggccctgagtacagggaagtggaacataggcaggattttggattaatagagaaattttgataagaatggagacgctacgacagatgtaggaagtcatctacctttgatattagccatagaacttgaacactaactatatcctatgcatagtatgcagaacacttttctaagtttactttgagcctacttgcaagtggaagatatatatattctcacatggtttttacatttttctctatcgtgttaaaagctctaataatgctagtggagcagttgacatccagggttttttttcctgcctgtcatacttgctaaacaagagcacagcgggcctgtcagatgaagtcaggagccatacgtgaccgctcgtagagcacagtaaccaaacacatacatggattttgccaagtgctgccagtagccaaaacaaagtctttttagggcaatagaggaaattattttgtgtctcaggtgtcagtcttaggaatggaagtttaataacaaatgggccaaactcgcaggacattccttctatgagcgcttcagaattttgctgtgaacagtcctcttggacacaggttggggtgcccttgtttgggtttgttttggtggaaaacatcacaaacctggcacaccatttgaatatccctaatatcattccagtcgctttcctcatcagttgcctttctatttcagttcattcacagatctcacttctgaatgtgccacttccagtagacatgctggtcaaagagcagtcatcattggggtgaagtgttcttgacagtttaatatgattcacttttctccaaagacatgtaaaaggctgttacaaaagcttggcttctgtcatggagacggaaatgggcaagcttccttccgtagcctcttgttaatccttaaacattaaatatttcgggggtaatagagccactggtgagtaaaaacctatataaaaaccaagattataggattttttcttttttagtaaaaacctgtatcaaaaccaaaattataggatttttttcttttttagtaaaaacctatataaaaaccaaaattataggattttttcttttttagtaaaaacctatatgaaaaccaaaattataggatttttttcttttttagtaaaacctgtataaaaaccaaaattataggatttttttttcttcttttttagagagagagattagaaaacgacattaggaatttcactttaaaatgcgcattacaaacttcttaggtgtaccaggaattatcaagtgactttaaaatgacttttccaacctgctttgtttttaaaaattatattccagttttaatcattgtaaaaaaagcacctggagtttcaaaacatgtgaatactaccaagtttctgtccccaaagtcaggcatcactgctagtcttttgggacagatgggacagatgttcactttaatgttttacttgaagttttactgctctttgccatgtggtaaaaagaggctgagacatatttaagaattccaagaggatattatgtgtcagaatttcagacactgatgagaagtttttaattgttcttttttatttgattttggaattcaggtgcactctattcaagtgcaaggatatcagaagtttttttttatttaaaaaattttttttttcgagatggagtttcactctgttgcccaggctggagtgcaatggcagcttactgcaacctccacctcctggttcaagcgattctcctgcctcagcctcccaagtagctgggattacaggcacgcgccaccacacctggctaattctatttagtagaaatggagtctcaccatgttggtcaggctggtctcgaactcctgacctcaggtgatccacccaccttggcctcccagcgtgctgggattataggcatgagccaccaggccggccccaggattttatattaagccttcttgctctcaaaaaaaaaaaggttttaactattccatttccagatgaatcccatgagcgctgcttactgttgaataccaaggtctagggctctgcttcctgtagacacgcacacgttgtctccatccaatggccttttctgaagttacagaaaacaccaacatgggagggagtttatgaagcaaaggcaaaggcaacacgtcggctagcttcagggtagcaccgtgagaaatgggctgtattgatactgtgaatgtttgttttccaagctgttttatacaggtttgttttttcatggtgtagggtatttatgacaaagtaaatgttgtgaaggttaaagataaattaagattatccaccaaatgctaaaaatactgatgtgtaaatcacctttatcgcctcacctcttctacaagcttttgtggcttgagggcttttgtttttggcttttgtctggatgaaagttttgcccagttgtgttttaaaaacaattcctcatgaacactaagattaattgtgtctgtatctctggaactgggtgctcatgttggttttaatgagcttgcaacccttccccgtttgctttgtttaaggaggtgcctctgttctttgtggaggagtgaaatggagctttaagtgtgtgtgtgtgttatgtgtgtttgcacacacgcgtgtgttattgtagcaacaacaaaaagtagccatctccttgttgcagctgaaaacctgctgtgagagttttgacagagcactttattttcgtcaagtttcaagtctgagttcaaaaccagccctgatcccttatgaccaactgctactcgaccagtcgccactcagtggccacctggtgcccgtttagatttttgcttgggttttactggccacctctatagacgagagttgcaaagttgctttgagcagagagggaaagattaatttacactgctggccaccgaaggcaggtgtttcctgggtagtaatctcacggctcttgatctggaaacttcagagtacaaattggtggatggtggaaggcaggacacgtatctctgtctgacggaaaacagacctcggggctggcgtaaaccctgctgccaggccctctccccactgccccaaaccggcctagacacgaagaccaaagcagcctgcacagggcaaggcccccgcggaatcctgcagagcaaactcaggttaacttgggtccatgaccgtttgcattcgaaacacaatacactgcctcgttctctcagttagcagctgggcagcagcgcaccattcatcatttaggcttgtggtttgttgtttactctaccaatgttatgtcgaaactgcattgtaaaaagagaagaaaatggcaggttttccaggtccacggaaaggtttggcctgacgctggagtgcggtgatgaacttacgtgacaatgattgtattcctcagtagcactttaaacgccgaagacagccctgcagcaagcctgcacacgggcttgggtgggttcctttggagaagatgtggctggaacacaaacaatctttgaaagaaataaatgtgcacacag

SEQ ID NO: 739 - DNA, 4114 bp, Homo sapiens
actggaaagttcaagagtgtctttgctggctctttcttgaatatttccaaagccttggaagttacaagttttgggtgtgggataaggaaaaactgaatgatagagcacaggtaccgctcccctttcctcatcatgcctctctgtcgcctctttgttcatagttgaccacggcatgtttgagaatttgaacacagccctcactccaaagctccaggccagccgctccttcccccacttgtccaagcccgtggcccccggctctgcccctctgggctctggtgagcctggggggccaggactctgggtgggcagcagccagcacctcaagaacctgggcaaagccatgggggccaaagtgaatgacttcctgaggagaaaggagccctccagcctgggcagtgtgggtgtgacagagatcaacaagactgcaggagcacagctggccagtgggactgacgcggctccagaggcttggctagaggatgaaaggtcagtcctgcaagaaacatttcctcggctggatcctccacctcccataaccagaaagcgaacccctcgggccctgaagaccacccaggacatgctgatttcatcacagcctgtcctcagcagtctggagtatgggacagagccatcacctgggcaggcccaggactccgctcccactgcccagcctgacgtcccagcagacgcttcacagccagaggccaccatggaaagagaagagagaggcaaagttctgcccaatggagaggtttccctgtcagtacctgacctaatccacaaggatagccaggacgaatccaagctaaagatgactgagtgcagaagggcctcctcccccagccttatcgagaggaatggcttcaaactcagcttgagccccatcagcctggctgagtcctgggaggatggcagcccccctcctcaggcacggacctccagcctcgacaatgagggccctcacccagacctgctgtcctttgaatagagcctctgctctttcctgctgagctctgcccttgtcttcctgctgctttctcctccactgcgcacactggccctggcctcaactccgctgtgccctttgtcttccttgtatgaggcaccagcagagagccagtcgtccatcatgggattttgcaggactggaagtccttgagtagttctagttaaagagtctatccgcagaatggctgaaggacttgatgccgttttgagcctaattttctgtaacctcctctgagtgggctgcagcccttggacattagagctcttccactcttgagcttgtcctgtcttctcagtgaattgcagggccaccagctcaggacaatggatcttacaggaattctttttgcctgtcccctacatgcgcctcctcccctgctgttctccctcccacacccctgtcccttctctctcctccttgatgggtccgatgcccctggcctcagcgggaggaaggctggatgaggaatgatgtgtttggcttgatgacaggccatggcctagaaagccacacaccctgaccacagcccagccatagctcctcttggtcccaggacagtgcaggcccctggttgccatgtttgctctgcccctggggtggaggccagaggagatgcttaccaggcctgagaccttgagagttcacccagggtttgaacgctgccacccagggttcccaaggtttctcccatctggtcagatttcgaaaaatgtgggcattctgcacggaaggaaagatcaggcttctcttgctgagtgtgtgaagacagggagagccaggccccagcagatgcggcctagcacactctgatttggttttgtggggagggcccaggaacttgggggtggtcttggcattcagagctggtgctaaaaacccagagcagaagcagggagaagggagtgaggatgggacagagaagagcgaccactggggatcagaacagcttttcaggggccaccttgcagcctaaaataatgccgtttcagggcctgggcctgctgtgagagccagaatgaagcatgtgcaagattggaatgtgagaagaactgtggggggaaaccagttttaattaagtggaagtgctttgtgcttgtgctgaagttgcctgggcctcctgcagctctggacctcactggagcggccccgccctgcccttgcctgcctttcttttatgctgatgctggtgggctttttcctgcttcaggatccatgtaagggactgaccaggttcatccagccttaactggttcctgcaacccacttttaggtctcccaccaggggcctattgtgctgtcttcctctgaccagcagatcctgtaagggggtgatcctaattctggggctctttgcagcaagaggagaacgttctttttcttgaacaaggtggccggttccctgggagaaggctgggaatggcacgtccggccagggcaggcggtgcggcatcctcctcctgggattcctgtggcctcccctgttctattcattgtttggcttcccacccataagctctgggatacccagggcttgcttcccagctcttctcatctccaagcctctgctccccttcccaccaccactgccatataaaatggccatgctaactcctacacaactaggagcctcagcaggattgctaggatgtgggttccttcctgcatgcttgcttctgcagctgtgtggccttgccatggccctcccaccactttcccttctaccttgccttccattgtcttccttctcccagaaagccaggtttcaccacgtgctcaccacaaactgtctcccctccctcgtaggagtcactgcagtagggcacctgcaggccctggtagagtgagcagggcttacgtgtacattctttctcactctaaggatgtgatatctgaccctgatgtcagagaggaggtctcaggactagcattcggggtcctttgagtgttcccagaatggtttggggtatcacacaaaacaccagagctgaggatagggatagagtccccaaacacacatcctgggagcaagccacttcatctgagcttcccataccaggagcatggtttgtgctttgatgggaaacctagcaagcccctgcactctggggcttctcctctcctggagcccagggcggctctggcccgatgatatggcagccataggtacaggtattgcaggtgcagcctttcttaagtaccctgcctccactctatagcccagctgctgctggagtccaggaccttagacccaggatgagcaaaaggatcccaccaggttgtccaggaccattgccagggtgaccccagagttcttcagacctgtgtctgatactgaatacagtgccatgggaccctgctccaatctaactgcctacaacctgcccgtccccctgctgcagggatgttgctgctacctcgggaggctctctgagactggtgtctggtcttagatgctgcacatagtacctggtgctagggtctaggggctgcccaaagcccagcaggaacagctactactcatcctgcagaggccttggcccagaccagctttccatccaaagcctcacctggtttccatgtccatctcaacagtctggccttcctgtgactgtagcctggcagccacaccctcagtaatcccgcacagtgagtccagcttctctgggagcttggccttcagttagcccagtccatgagagggcagggtaatgaggaggagtaaaggacctatcttctctgtccacataaggaagttgggaccacaaggtcttttatctccttgttactccccaaccccaccataacctcctactcagcacacagctttatcctggtagattataaggtgagcttccagaacctggcaggaggctggtgtatccccctgcacagagggaagtgtatctgaatgttgtgtatgtggctgatatggaagacatacatgtatgcaatccatcagcgtttaaagaagaagattggctccagttcggaggaggaggaggaagattacagatctattctgagtattttttagagagttaatatttatatttttagtaattttctggtagaaggaaattgcacaataaaatgatttggttt

SEQ ID NO: 740 - DNA, 4184 bp, Homo sapiens
agttgtgttgtgccaatggtggagaagaaaacttcgggctggagtgcagtggcatagtcatagctcactgcagcctcgatttcctgggatcaaaccatcctcccacctcagcctccggagtggctggaactgcaagcatgaggccccacgcctggttaatttttaatttgttatgtggtgacgggctctcgctatgttgcccaggttggtctccaactcttggcctcaaagcgatcctcctgcgtgggccttccaaagtgctgggattacaggcgtgagctgccgcgcccggccccagctattcctcgtaaatcccttcctcagcccccgggtcctggcgttgacccttcattcacgttttattggtgcctgctccaagccgggcgctggggatgaagaggagaaagacccctcttatccaagcattggctttttctggaaggggggcagaaacgcagacctaacactgtattttactgtgatttgtgatttgtgctatggcagagggaagcacagcgcctgggaacagggagacgtggcatctagcccaggttctgggaggcaggggactgtgaaagcttgaaggaaaaatgaaaaagcttgaattgagtcttgaaagtctagttagggtttctctcagtgggaagctcacgtgcaaaggcagtgaagcaagaaaaagcaagtcgcttaggaagccaagtccacagtttggatcttacagagtaataagaaaggatcgaaggctggggaaaggttacattttgaaaggcattatacacactgcccaggagtttgaactctgtagggaaacactggagagccagcaaaggctttttttttttagacagagtcttgctctgtcacccaggctggaatgcagtggttctatataactcactgcagcctcaacctcccatgctcaagtgattcttccacctcagccacctgagtaggtggaactacaggtgggtgcaggccaccatgctgggctagtttttatattttttgttgagatgggtgtctcactatgttgcccaggctggtcttgaactcctgagctcatgtgatcctcctgcctcggccttccaaaatgctaggattacaagtatgagccactgcgcttggcccttttagtttttctttctttctttttttttctttttgagacggagtctcgctctgtcccccaggctggagtgcagtggtgcaatctcggttcactgcaagctctgcctcccgggttcacaccattctctggcctcagcttctggagtagctgggactacaggcgcccgccaccacacccagcttatcttttgtatttttagtagagacagggtttcaccatgttagccaggatggtcttgatctcctgacctcgtgatccacccgcctcggccccccaaaatgctagaattacaggcatgagccactgcgcttggccctctcagtttttcaaaggcatcgcagtctcccagccatcagttttttcatgttggcctcaaggtctgaaataccccgctgtctcccctagccaggtcattcaccagttaggccttaacctagacttaccttcttctgggaagtcttccctgactactccaaggccaggttgggtgtttctgtcctgggctctgcagcactttatacttccgtatcctagcctactccatgctgtacttactgtgtttgttttttaatcatttgtgtttgccactggactgtaagctttggcatccctaaaacctagagcactgcctggcatttggaggggagacagagtagtacagtgatcataatcatatttttttttgtttggttggttttgggttttttttttttttttttttttgaaacagggtcttgctctgtcacccaggctggagtgcagtggcacaaacacagctcactgcagccttgagctcctgggctcaagcaatccttgcgcctcagcctcctgaatagctgggactacaggtgtgtcccactacacctggctaatttttgtattttttttgtagaaacatggttttgccatgttgcccaggctggcctcgaactcccgcgctcaaacaatccacccaccttggcctcccaaagtgctgagataacaggcatgagccactgcgcctggcaaggtcatgctttttgatgctgggtagttctttgactcctgacctggccacttgttagctatgtgaactttggacacatttcttaatctctgaatgttggtaaattggggatgatgatactgtcccatacagctgttgtaagggttaaatggttcaagtgttgcaaagagctgagcacgtgcctggctcatagtaagtgtccaacaagtgatagctactggggctgctgctgttattattatgcttaacaggtggttaatgaataaagagatatattatgcaaaattatcagaatctggcaaacagctgataaggcaatgaggaaagaggttttttgttttttgtttttgagacagggtctctctctgttgcccaggctggaatgcaatggcgcgatctcagctcgctgcaacctccacctcccgggttcaagcgatccttgtgcctcagcctcccgcgtagctgggattacaggcatgtgccaccacaccctgctaatttttgtatttttagtagagacatggtttcaccacgttggtcaggctggtctcgaactcctgacctgaagtgatgagcccacctcagcctcccaaagtgctgggattgcaggggtgagccactatgtccagccgaggaaagaggtttaaaataacttctaggtttctggtttggatgtctgcatagacggttccatttgcgtagagagaatctgcaggagaagcagacttggatgggaatttttttttttttgagttgcagtgtccacagggccagtgggtgatttcttttttccttctttctttttttttttttttttggagacagtcttgctttgtcactcaggctggagtggtggcgcgatcacggcttgctgcacactgcagcctcaacctcccgggcccatgtagtcctcccaccgcagcctcccaagtaactgggactacaggcatgtgcaaccacgcctggcttattttttaattttttgtagagatggggtttggctatgctgcccaggctggtttctaactcctggcatcaagcgatcctttggcctcccaaagtgctgagattacaggcgtgcgccaccacacccggcctcaccaggcgctggctgcatggccagttctggagcccgggagcaggttctgtgttgagggagtcactctgggagtcatttgcttgtgggtgatcatcagagccctttgtttggagtcaaaatcccaggaagagtgcatagactgagcagagaagagggccagccacctccatagaggcagggagagcagccgagctggagccggaggattcctggacatggagaaggcctgcagttttgtcaaggaagcaagcaaagggtctctttctactcgatgaagttcgctcccaggaccccgggcagcggcgggtgctggaccgggctgcccggcagcgtcgcatcaaccggcagctggaggccctggagaatgacaacttccaggatgacccccacgcgggactccctcagctcggcaagagactgcctcagtttgatgacgatgcggacactggaaagaaaaagaagaaaacccgaggtgatcattttaaacttcgcttccgaaaaaactttcaggccctgttggaggagcagaacttgagtgtggccgagggccctaactacctgacggcctgtgcgggacccccatcgcggccccagcgccccttctgtgctgtctgtggcttcccatccccctacacctgtgtcagctgcggtgcccggtactgcactgtgcgctgtctggggacccaccaggagaccaggtgtctgaagtggactgtgtgagcctgggcattcccagagaggaagggccgctgtgcactgcccggccttcagaaagacagaatttcatcacccaatgcagggggagctcttcctggaccaagggaggagccgctcattcacccaacaaaactgtgtcttatctgccaggaaagaccagcctcactcctgggaactgtctggcaggtaggctgggccccccagtgctgttagaataaaaagcctcgtgccgg

SEQ ID NO: 741 - DNA, 5788 bp, Homo sapiens
aggtggcagcgcttgcagtcgggctacggaggccgggttgccagattacgggaaagccatttaagaagttcctggaataatattagtcagagtaatataggatctgcaggaagtgtctcaagatagttggaaaagaagaatttctagactcttcatcaagatcttcatttatacagctgttaaatccaaggctactttggtgaaagcatgaataaaaatacatctactgtagtatcacccagtctacttgaaaaggatcctgcctttcagatgattacaattgccaaggaaacaggccttggcctgaaggtactaggaggaattaaccggaatgaaggcccattggtatatattcaggaaattattcctggaggagactgttataaggatggtcgtttgaagccaggagatcaacttgtctcagtcaacaaggaatctatgattggtgtatcatttgaagaagcaaaaagcataattaccagagccaagttgaggttagaatctgcttgggagatagcattcataagacaaaaatccgacaacattcagccagaaaatctgtcatgtacatcacttatagaagcttcaggagaatatggacctcaagcctcaacattaagtcttttttcttctcctcctgaaatactaatcccaaagacctcatccactcccaaaacaaataatgacattttatcttcttgtgagataaaaactggatacaacaaaacagtacagattccaattacttcagaaaacagtactgtgggtttgtctaatacagatgttgcttctgcctggactgaaaattatgggctacaagaaaagatctccctaaatccctctgttcgctttaaggcagagaaactggaaatggctctaaattatcttggtattcagcccacaaaggaacaacaccaagccctgagacagcaagtacaagcagactcaaaagggacagtgtcttttggagattttgtccaggttgccagaaacttgttttgcttgcagttggatgaagtaaatgttggtgcacatgaaatttccaatatattagattcacagcttcttccttgtgattcttcagaagcagatgaaatggaaaggctcaagtgtgaaagagatgatgccttgaaagaagtaaatacacttaaggaaaaattattggaatcagataagcaaaggaaacaattgacagaagagctccagaatgtgaaacaagaagccaaagctgtagttgaagaaacaagagccctgcgtagtcggattcatcttgctgaagctgctcagagacaggcacatggaatggaaatggactatgaagaagtgatccgtctgttagaggccaagattacagagctaaaggctcagcttgctgattattctgaccaaaataaagaaagtgttcaggatttaaaaaagagaatcatggtactcgactgccaattacgaaaatcagaaatggctcgaaaaacttttgaggcatccactgaaaagcttcttcattttgtagaggctattcaagaagtattttctgataattctactcctttatcaaatttaagtgaaagaagagctgtgttagcttctcagacttccctcacaccactgggaaggaatggacgtagcatcccagcaacgctggcgcttgaatctaaggaacttgttaaatctgttcgtgccttacttgatatggattgtttaccttatgggtgggaggaagcttacacagcagatggaatcaagtacttcatcaatcatgtaacacagactacatcctggatccatcccgtgatgagtgtcctgaatctatctcgctcagaggagaatgaagaggattgctctagagaactccccaaccagaaaagttgatggttttccttaggaagtggagctacatggatgatgtgagcagagacgcataacatccaattctgagatgaaacagtctaaaataggagtaaagcatgcactacttgttgaagtgtgaaatggagactctggactttgggtatttttgtaaaacttttgatatttctgtatacatttaaaaaatcaattgccactacagtagttccttaagaataatctagttatattttttgaaatcacatataattagactttataatatatatactttttcatatataattagatctttctttgtaatttcatatgtagttcttcatagggtctcagatacaatggtttttataattgacgtattgaaaaagtatatgaacataatgaaacacctcatttatttgataattcactaatgttttatattcatatattaggaaagtgaacttagcaagctttttggaatttaaggatcacatttagacatctcatgggctgatgaatacagctggtatctttgtggagctttctaatttacaaaatgctttgtagaccccattgtctttaaaccatacaacatgcccgtgaagctgatctggtgggtatgtttattcttggttttcagtagggaaatagcagttcagagagaggaagctctctgtcccagcaccgagactcactcctaagtcttctgattccatgagcagtcccccttcccccataccctgctgtctccacggagggaggtcacagcccatcacgcaggacactgtgattgtgttgatgcagctggctccacagctgtgcattccacagagattcagaaggcacctcttcggtcaaacatggcccctctataaccccactattcttctcctataaacccttcccccttctctgcacccaagccttcgccaagtaggcgcactctttgtgatattgtttcagcagacttctttcagcagctcgtgtttttctaaagtgaaaggcatggtttgtcctgcttaggttgcccttcccagagggatggtttgaggggagctgatgagaagagaggtatctgttaaaacattactgctctactcgaaacaagatggaagcctaaagcccaagtcgagcagctcccagcactgctgtgcagacctagaggtccttagaacatagtctaagaaccattcattgtagccattttatagttgagtaaactgagatcttaagtctcctagtctactgaatttcatatggtgtataatacagatttatatggtaaagatatacatatacattgtgctcaactatacattcctgaatccatttaggatttgtgatttatgtcttgagtaataatataaagtcaactccagactgataggtagtcattagccatgagaaatgtttcaggatggctagggaagacttgtgttttgcctgacagccatttgaatgttaggaagcttcggggagacaagttttgagagaagccccagagggagctatttccttgcaccccccagaggtgaatgaggtattctataagttagtgtctataattgtgaaagtacaaacttcttgtttttgtcaaattaatggtatgaaatttctctccccctgcttgaagagttttctaattcgtttctagtgagcaaaacaaagaaggtgcttgagtcactgaaatcaaagtactcaggcacacagcccactgacaagagacacctcatccattaactgctgttttgtaccacttgccgccctgtttctgtcaaatacctagtgaaaaaggcctaaacaattgtaatgatattatttattgggcattttgtgccatacatggtgatgagcagtttgcatatatttatttatgatcttcttaaaaccattccatgaaataagaactgtaattatccccaattctaaaagaaaaaacttagttttagagagttagtaatctttgcctaagggtcacaaagcacctatgtgtagaagctagggttcaaggcagatctgtgattccagaagctgttctctaaaccactatggagaactgcttagattcattgtctatgggtacattttataaaaaggcagattctagttcagtgtcataaggaactttctagtaattagagctgataagaaaagaattcctcaggagaaaatggaaacactatcccagcaatctgaattccttacttggggaatgttgctgaggaggttcagtgtgtgaatggactgaaccagttggccactctctcagattccctcttcataaagcttccgtgacttctaaaccatcaggtcggtgccataagagatgctcaaaaaagcatggtcagggcttagcaagaatccttttccagtgcaaatacgaccctcatattatgttttggcgagtagccagtctttctttaacatcaatcaaccgtagcaatgtggtcatcacgaagtcttcattgactcactggcttggattttagggttagaaaatctgaatgttcttatgtccttccgtctcactttactagagtgcccaagttgactcatccttactcactcattccctcaaaatatttattgagcaccaacaatgtcacaagcactgtgctaaacactgtggtgaagtagaacaattgctaatcatttcctgggttccacttactcttgatttaaaaaaaaaaaaacaacaaaagagtttgtgtgtggccaggactaaacagctgcttcttaatttttgaattttaaaactaatctattttatttaaaaaaaatcaagtactttggaagtgaataaagtaagagatagcctgtctcactttccagaggtagcagtcactaatactgtggtgagtgattttactcaaaggaaatcacactattaagcagcttggttttgacatgttatgttgtggtcatcttttcatgtcaatacatagattaatcttttatttcaaatgtctacataaaatatcactacccacataacctataatttgtgtggccagcaatttattgaacactaaaatgttttaagttttcttattgctaacaatgtcacagtgaacatttatatattcattaaatccttttcctcatgtatctttgcactcttgtgctagtatgtctatagtgtgaatacattcataaatttcttgatcaaagctaggtcaaagttacattcattttaattttggtacatatccataaattctccataaaagtaggaccaacttacattaccaccaatagtgtatgtgagccttatttttatgtatgataggactttttttagtccaaatgttcctatagattttctgggttttttttttttttttgtccttggaagaataaccttccttccaccaagtccaagaacctgagatttttaatcattaggttttagatttcctttagcagcagagactgacttgctgtatagagggaagtcaagtagtgactaactcactatatgtcaaacacatcattactcttctcttttcctactttacatgtaatggttgcgaggaccaactttcaaatgagctaacttgggtgagacgttcactaaagtaccaagcacaatacaaatgcatcttcgagttctttgggcctcactttccctatctgaataataaggatagtaatcccttgccttttctcaaaccagttcaactcagcaaacacttcctgagcacctgctacatgccaggcaaaatgtgaaatttgcatgctatgaggctaaatggtactgattctcaaaacaaggagctcatagtctaaaaccatttttctttcttttttttccccctaaacaacctcttaaaggggtaagaagttagggggttgtttattaagaacccctgaagagcaaccctttaccactctcttaaatttgaaaaattccaaaataatattaacacctcttgactag

SEQ ID NO: 742 - DNA, 3455 bp, Homo sapiens
tatagcatgtccctttcttgtgaatttcactgtaagaatttacatgttaaaggctctgaacaggaatgcagttaaggaaactcacttgattatgcttagtggactacgtttctcaaactcatttgcctgctgtggagccctgttttatataacctctaatagcctgagaaatatactttgggcaacactgatctggaaggtctggtatttgccagatctgtccctgtagactcagactgttttctgctgtaagagcagcagctcttcatatgtttgcctctcttcttttttttttgagatggagtccaggctgtcatccaggctggagtacagtgacacgattttggctcactgcaacctccacctccagggttcaagcagttctccggcctcggcctcccaagtagctgggattatagacacgtgccaccatgcccagctaatttttgtatttttagtggagatgggatttcaccatgttggccaggctggtctcgaactcctgacctcaagtgatccgcccacctcggcctcccaaactgctgggattacaggcatgagccactacacccagcctctgtttgcctctcttctaacccagttttgggtcccaggaaagactttccctgaggtccgtcttcctagttaggccccacgtggactgtcattgaggaggccataaggatcagatcagactgatgttggggctgaaagtgaagatttaacttgggggaggaaggtgtggaaagattctccagatgttctaaacccctttgcctttcccacacaggatggtttccccattcggataaaagcagtccatgtggtgaatgaacctcgaatatttaaaggcatttttgccatcataaaaccatttctaaaggagaaaatagcaaacagattcttcctccatgggtctgacttgagctctctccacacaaaccttccaagaagcatcctccccaaggagtatgggggcacggctggggagctggacactgccacctggaacgcggtactgctggcttcagaagacgattttgtgaaagagttctgccaacctgttcctgcctgtgacagcatcctgggccagacgctgctgcccgagggcctgacctcagatgcacagtgtgacgactccttgcgagctgtgaagtcacagctgtactcctgctactagcccgtcccccagggtcaccatctttaattcttttccttcttttctttggagaggcacaaggagaatttaagggtccatggattcagtcttgctccttgtaattaaactgcaggatggaggaacagcctgagatatgagcatgagcccattttggggtaagcctttggttactttaattactccatggaagacatggaaaatgtccccactgattcttaaacatttggaatcccagtctgcaactattaatctggaggctatatctattttgttttgctttttggttggggggtggtgatctggttcttacacatcttggaagcaagaacaatcaggaccaaagtcactttgatcccacttttccaggagaaaaaccacctgtttggccagtgagaactacttgtatgaaataatttggccaaaccttcagtgtgaccaaatgtgagactgggagtttgtgtttttcacaggaaccctaagtatagacctctgctgctcatcaggaaacttactggagatgaaggccccagctgttgtcaccgggtttggaaagcaccttaactgaatcatgtaagcatcaggacataagcagcactttgtggtcaaatgtggaagccggagacttcaaagcacctctgggacccactggttgaagtttgcaatagaaacttaagttttcccaaatccataaagccttagccctggttctcaatagaatcagggacctagcaggaaatgattttactcaacctaaaatgctggatcccaggcccgtgtagctataagaattctggcctggatcccaggtgtacaactatggacaagatatgggcctctactttctcctctataaaatgaggctggatgaaatgtcagctagggccattttggctgctgaggctctgggatttggtttagttactgaatgttagattttctgcctagaaagataactatctagatacaagtggttggatcctgtttttgtttgtggtacatgtgtctttccaagagagatgtgtcaccaattagccctgcctttaaagaaactattatgtgtattcctgggactcactgacaccaattttctttttatagtgatggttcaattttgaaaagatggcttttgtgaggccaggttaaggtgaccaggatcttgtatgatgaattccttccatccctgagactctggtactatattgtaaacctggctacagtagttaattacttgagattctttaattttggtctctgagctgggcgtggtggttcatgcctgtaatcccagcactttgggaggccaaggtgtgcggatcacaaggtcaggagttcgagacccgcctggccaagatggtgaaaccccatctctactaaaaatacaaaaattagctgggcgtggtggcgggctcctgtagtcccagctactcgggaggctgaggcagaagaatcacgtgaacccaggaggcagaagtggcagtgagccaagatcgcaccactgcactccagcctgggcgacagagcaagactctgcctcaaaaaaaaaaaaaaaaaaaaaaaaatttttttttttttggtctctggaaatgaacacaagggcaggttattcctgggtcacttctgggcccccctgccctcccagccccacttgagtttctctctctggtgtgggtgaaccagccagcctgaatgttctgcatttcagcactttagaacctccctgtgaagattttagccttagcccaaacatcaaattagacggttcacatgatggtttttgacctatttcctttctaatgtattccacatgatcatggtgttaaatagtgaaaagtactgtgttgtgtgtgcaccttctccgtgcatttattagactaaccagtcaagcagacagctcagttagggagaaaacaatactctgaaatttgaaggccaatctgttgttactaagctgtttatctctattgcctttttaaatgtctggataagttgttggtggaaattaagttacttaacctcattaataccaattctagagaaagttcttttcaccatggatagtaaccctggatcctctacggtactggctgagctggaagtgccaaaaagcactcctggctgcttctggttccatctgatgatgatgtgacacacactgctgaaaaggcccaagcagggcaagtgggatggctgaaggagggaaggagggggttcagaacccactggcctggatgggagaactgggtggaggcttccccaagagggaagacagataaac

SEQ ID NO: 743 - DNA, 3890 bp, Homo sapiens
atatatatactaccacatggtccaaaatttgaaggaggcctcaatacaatgtcccaatcaacttaaaacagtgagaagtgctgccaaattgcttaactttgggatgttctcagttggattctaagcaaccatttgggtttgaagcatatttgtacactctacatgcaactgttattcatgtatcatgatgtgaaaatattccataaaatatcaagaataatgtttttgaaaataagaatgaaatcagcatgataccaatatgtgatgatggtaacatttatggaaatcttaaattcatctctagacaactgtcaaactataatatcattttagctggacagtgatgaaaacatgaatatctgtttattgcacaggataaatgaggtattgattgttttcttaatgtctataatcagtcatacatcctcagtcctctgttatgaccagacttcttttttgacacccttgatttcggatttagatttgaaggttgggctgagacatgagctttttctcaaataaatgagcagtcctaatttttttgccagaaattgtgatttaaatttccaagatggactaactataaaacgtttaaatgcggaaccttgcgtttcactctagagactgtctttatttagtatgctttcagctacatgtagcggaaaatgcaattcacactgattccggtaacaaggaaagttatttagctcaagttccaaggacttcccattcccgaccatacgttagaatggcctgggagaatgttttaatcaatactggtcacagaagaactgagtcagaatctttccagtggagcatgggcattggtaattattaaaaactttctggagtattcaaatatgtagtcaaggtttagaaccactaatttagaagctcacctgtgtcttcaaggatgcagtttcttgccatctctctgccctgacctgccctgcccttcccagaacgaactcttccccaggttgaaagcaagacagttgtaatagttctagacaccatatccattcaccaacatcgagaggagaatgaccatgtcttctagggcattttttaaaggtaggtttgccagataaaacacaaaatgcccagttacatttgaatttcagataaataatgagtaaattttttagtataagtatcttatattacatgggacatatttatactaaaaactttatttgatgtttatatgaaattcaaatttaatcctatgttctatgtttttatttctaaatatggcaaccctatcttaaaggcgttttcaacagctactcaccaagacttcctttatgtcttattggccaaaattcctagattacccttaaatccatcaggcccagccactgcccacaactgtagattgggttggagggggctcatggctgcagggccctcttgggaaggagacacagggaacaccagccctagcccctataaagaacaatagtacaggtaacacttctgtttcataaacactgagtgataccatgatgtctagactaaaacttttctgcaattacctttctggaaaaaaatataaatttgattttcatgaatgtatttatcttcattgaacagtcgtcttcagaactgttctttttttcttgagacggggactcatgctgtcacccaggctggagtgcagtggcacaatctcggctccctgcagcctccacctcctgggctcaagcaatccaaccccttctgcctcccaagtagctgggactgcaggcgcgggccaccatgtccagctaatttttgtattttttgtagacatggggtttcaccatgttgcccaggctggtcttgaactcctgagctcaagtgacctgcctgcctcaaccacccaaaatgctggaattacagtcatgagctactgcaccccatccagcggaattgtcagttctgaggtgacaaatgttccccaaaatcactatgctatgcaaagacatgcattaaaaaccacagggagtctaggcacagtaactcatgcctgtaatcccagtgctttgagaggctgaggtgggaggattgcttgaggccaggagttcaagaccggctgggacaacatggcaagaccccatttctaccaaaaaaaattagctgggcttggtggcacgcgcctgtggttctagctatttgggaggttgaggtgaaaagatcgcttaaacctaggagttcagggctgcgatgagccatgatcacaccactgtactccagcctgggtaacagcgagactttgtctctaaaatagtaataaaaataataagataaaaaccccagggcttgtggggaaaattggatcgaggtacaacactaaaaaaaaaggtcatcagtgccacatgaaacaaagtaggaacctaataaaagtggtagagtggttttacacgttaagtgattaagaaataaatagtgcaataaatatgatactttaccttgaaaaatacctgaagctcagttgcggaagtggacattggaagggttgcagcttgtgagtcactgtgaagtggtggaggagagttatctggatggaatctgatggatttggttatggaagtagcccataacacacacggaatggaggtagctggcagatatctgtgttgcatgcatgtaggcattttgtgtattcctgcattcctacgtgtagctgcgttcatctatgtggagttttctgcattcacccattatttcttgaggatgatgttgtgtgtaagcaaatgtgaacttcgggttatgctcaattattccctaatacattgatctcattgaaacaagttcacattttcaaaacaagcattataacggaactgactctatacagttcatgacatgcagcttctggatttggcgagttggaggaatgagaatatagaaaggttacactctacataattttcttgttctcaagtaacaaacccatgttaattagaaattttagagttaatccattttattaatggtcaacatatacccaaagtatttcacgacaccaacgtgtgcatcgtgtatgtctgactcatatgctttgactcctcatcagaattctgcaggagcccttctccctaggataaatccctcaattttaaggtatgccctgtagggccctttacagtctcaccctgttcagccttatcattagtcctccctcttactcctccccagcccctcaggaatgcatagctgtttcacttcccttaaaccaagcatgctttctcatacttctgtgttgtttcccttcactgtctcttctgaccagagtgattgatgtagccacaaaatagagtcccttccagtctcagcccaagcaccttgtgtcccatggagccttctctgctaggagctttcagcacttgtaataagtagctggggccctagttaagctgcagatttcagagcccctccccaaacctaaagcagcagcatcttgagatggagggtgtcctacgtaatctgcaaatgtttcccgttttgaatgtcagagaactacttgtgtttacttataaggctcttgcaggcgcttgtcactgtatcttctgtgccagatattgtgtctggcactcagtaaacgtttaggaataaatgaatgctgttgagggttttgtgtgttgtgcaagtattgagatgtcttaggctttgctctggcgtcctctagagcctgaaaagttgcttcatttctcagcagcatttaccaaccacttatttaaaaagctaataggaattgttggtatttagtgagagatggggtataacttaagggatgaactaacaaaagtatgataggcatatgaataaaccaggcaatttagagaattatttccttctcacctttttttctttccagaagtctcagaagtggtaatgtttatgtt

SEQ ID NO: 744 - DNA, 3493 bp, Homo sapiens
caagaaaagtagatgccagtctcacaatagacacagcaaaattgtttctgtcttgccttttgccatggggagtggataaagatttagattatctttgcattaagcacttcaatattttaaagcttcagggtcctatttctttgggaatttctttgaatgaagataatttctcactgatgttgccaggttgggatttatgcaatagtggaatgataaaagactattcaggagtaaatttattttccaggaaagttttggacttgtcagataaatacacagccactcttccaaatcaggttggaattccaagaggattggaaaataattgtgattctttgcgagagtcagatactatagtttatttgttgagcagactatttttagttaataaattagttaacatgcctttagaattggcatgtagagttggcagttctttcagaatggaaagtatacataataagatgagaggtgctgggaatgacattttaaatatgtcaagcttctacagttgcttacgaaatggtaagaatgaatcccatgtacctgaggctgacctttcacttttgaagctaatttcctgttggagagaccagtctgtgcaggtaactgaagcaatacaagctgttctcttggcggaagttcaacaacacatgaagagtttgggaaagatacccgtcaatagtcaaccagtgtccatggcagagaatggtaactgtgagatgaagcagatgctgccaaagctggaatggacagaagaactagagttacagtgtgttagaaacactttgcctctgcaaactccagtcagcccggtcaagcatgacagcaactcaaactcggcaaacttccaagacgtggaggacatgcctgacagatgtgccttggaagagtctgagagtccaggtgagccaaggcatcattcatggatagcaaaggtctgcccctgcaaggtgtcttaaatggaatctcatcagtaggagctgaatttggacaaattaagaaatccaaaagatgccatttgtttattactgtataaaagcattgttgttattggtcaagttattaggctgtagtggatttgctaatactttagccaacatgtattaaagtgattttaatacatgctgattacaatgcaatacatactgattgaaaatattcatattcatctaattttagaaaaatattgcctagatcactctctattcctgtttcttactttttctgttaatatttccaacagggaatgccagtccacagacacaaatttaatactgctttaaattttctcctatccttttagtccctgaattatataataaacaatgttaaaaccaatgtagtacacaatacttacttacaaatttaatactgcttcaaggtatttaatctaaaattttaccaactttgatttgtctggttaggatattttgttttagtggatatgctttaattcggatcaattactgcagtaaatcccatccctaagcatgaaatgttgtcaacaaatacccagttccatttagttatcaattagcccaaataagagatacaaagtataacagtgaccaaccttgtactgttgagttaatttgaacttctaatgacattgaggctaatgtctttagctcaaggttgatcttgttggccatatagatgtgaactagggaaggggaatcaacttacagcatatcacaattgatccttattaagtataaactcttgtaggtcttttcccagaaagaagcttgactagcaggaattctaaaactgaaatatatcaaacagcataaataggaatagacataaagtgctcttctattaaagcctttggtgatctatttactatgatttatattgtacagttcctcgatttacagaaaatcatcaaaattattaatctacatatcttatgtatataaatattgcctaatccatagaaaaaaggatataaagtattaaatatgtgatatatagctatatctatctatctatgtatctaatagggaagttcaagtcacttcaattgaagaaacatatctctgagcataggagcagcctcaggtcctatggtgggatgcagtggacaggagagggggaaattagaaaagagaactatataattgaaaaagggatataaagcattaaatatatgatatatagctatatctatgtatgtatctaacagagaagttcaagtcacttcaattaaagaaacatttttgagcatgggaccagcctcaggtcttatgctgggatgcagtagacaggagatggggaaattagaaaagagaactgtgtaattgaaatgacgtgggctgcacccttaaggaacttataattaatgatgatctgaataaacataccaggataaagatgtcaaatgagtgtgactcccttaaagtagattaaagtgtgcattctttgtttcctaaaatatgattttactgcttgaaattacatttgagttgaagtttagaaactaacatagcattaatatgaataatcatggaaaattattatcctttgaaaactgattgataaatatattccccctcctttagaaacagtcaaaagccacttcaaacaagtttcaaaataaaggaaggtagcaagttaggcgatggattatattttcttgcttgttgtataccagttgtcaaggacattataaggactcccaaaagcattttgaaggatggcaatatcaaataagtgtatgtcctctcaaatgaggcatttttaattgttaaaatctatttggacgctcaggttatgatatgtttatgaaaaataagcttcattatttttatagctacatcctattattcccttttagaaacaagaataacaataagttttaatagttgccatacttagcatttatcaggtctaatgaaaccaatattgaatctctgataaatattttctgatgttactagctatgggaaattagaactggcacaaccctgacattactaagtggaaatgttaggatttttcggcattgcatgttagaatctctaaaatttaaacattcctgttaaatgactaaggtttgcttttatcaatatgaattctgaaggccaatatcataccattaactatgaaagcttttaattcctaaaaatagttttagagatattcaagcaatgctctcctaatatccatacgcaagtgtgtttatgacacaaattcactagtctgtttaaaaatgaattctttatattgactggtgttccacatatttcagtaatttctgttatgagaggacttgaaatagcaaattgccacacagttaactggatagaccacgtacgtggtgatcataaccacttggtactacacccagaaactcaaaattgtctttctcctgatgagatatgggtgtccttttgtacgtctaggcctaggtaaccagtggagtgattatattagcaaatgtgtttgtatccagagtcttcctgtcattgtaataaaaaatttattt

SEQ ID NO: 745 - DNA, 3750 bp, Homo sapiens
gtgctttctaccaggatctcaaaggaatggaaaatatactgtgtatttgtgtgcacccacacatatttcagggatggaaagatctacttgaagcaagattaataaaacaccaagatgaaatttcaagccaatgtatttctgctttaagccttgaagagatcaatggcactattcttaaactaaaatctgtgactcaatcttcaaaaaggcttttgccatctattggtttatcgactgtccttctgaaaaaggaagaagatatcatgactgctctggaaattatctgtgaaaatgaatgtgagggtacactgttagagaaggacaaaaataaattccttgaattcaaggcatcaaaagaggaagacttctatcgaggtggcaaagtgtcatggtggaacttctacttctcttctgaaagttattcttcaccttttgtcaaaagggataaatatgaaagacttgaagcaatgattcaaaactgtgcagattcttctaaaccaacaagtaccaaaattattcatctgtatcatcatccaggctgtgggggaactaccttggctatgcacattctctgggaactaaggaagaaattcagatgtgctgtgctgaaaaacaagacagtggatttttctgaaattggagaacaggtaaccagtttaatcacctatggggcaatgaaccgtcaggaatacgtacctgtactactccttgttgatgattttgaagaacaagataatgtctatcttctgcagtactctattcaaacagctatagctaaaaagtacattcgatatgaaaaacctctggtgattatcctaaattgtatgagatcacaaaatcctgaaaaaagtgcaaggaccccagacagtattgccgtaatacagcaactctctcccaaagaacagagagcttttgagcttaaattgaaagaaatcaaagaacagcataaaaactttgaggatttttattcctttatgatcatgaaaaccaattttaataaagaatacatagaaaatgtggtccggaatatcctgaaagggcagaatattttcaccaaggaagcaaagctcttttcttttctggctcttcttaattcatatgtgcctgataccaccatttcactatcacagtgtgaaaaattcttaggaattggaaacaagaaggctttctgggggacagaaaaatttgaagacaagatgggcacctactctacaattctgataaaaacagaggtcatcgaatgtgggaactactgtggagtacgcatcattcactctttgattgcagagttctcactggaagaattgaagaaaagctatcacctgaataaaagtcaaattatgttggatatgctaactgagaatttgttcttcgatactggtatgggaaaaagtaaatttttgcaagatatgcacacactcctactcacaagacaccgcgatgaacatgaaggtgaaacaggaaattggttttccccatttattgaagcattacataaagatgaaggaaatgaagcagttgaagctgtattgcttgaaagtatccatcggttcaacccaaatgcattcatttgccaagcgttggcaagacatttctacattaaaaagaaggactttggcaatgctctaaactgggcaaaacaagcaaaaatcatagaacctgacaattcttatatctcagatacactgggtcaagtctacaaaagtaaaataagatggtggatagaggaaaacggaggaaacgggaacatttcagttgatgatctaattgctcttttggatttagcagaacatgcctcaagtgcattcaaagaatctcaacagcaaagtgaagatagagagtatgaagtgaaggaaagattgtatccgaagtcaaaaaggcggtatgatacttacaatatagctggttatcaaggagagatagaagttgggctttacacaatccaaattctccagctcattcctttttttgataataaaaatgagctatctaaaagatatatggtcaattttgtatcaggaagtagtgatattccaggggatccaaacaatgaatataaattagccctcaaaaactatattccttgtttaactaaattgaaattttctttgaaaaagtcctttgatttttttgatgaatactttgtcctgctaaaacccaggaacaatattaagcaaaatgaagaggccaaaactcggagaaaggtggctggatattttaagaaatatgtagatatattttgtctcttagaagaatcacaaaacaacacaggtcttggatcaaagttcagtgagccacttcaagtagagagatgcaggagaaacctagtagctttaaaagcagacaagttttctgggctcttggaatatcttatcaaaagtcaagaggatgctataagcactatgaaatgtatagtgaacgaatatacttttctcttagaacaatgcactgtcaaaatccagtcaaaagaaaagctaaatttcatcttggccaacattattctctcctgtatccaacctacctccagattagtaaagccagttgaaaaactaaaagatcagcttcgagaagtcttgcaaccaataggactgacttatcagttttcagaaccgtattttctagcttccctcttattctggccagaaaatcaacaactagatcaacattctgaacaaatgaaagagtatgctcaagcactaaaaaattctttcaaggggcaatataaacatatgcatcgtacaaagcaaccaattgcatatttctttcttggaaaaggtaaaagactggaaagacttgttcacaaaggaaaaattgaccagtgctttaagaagacaccagatattaattccttgtggcagagtggagatgtgtggaaggaggaaaaagtccaagaacttttgcttcgtttacaaggtcgagctgaaaacaattgtttatatatagaatatggaatcaatgaaaaaatcacaatacccatcactcccgcttttttaggtcaacttagaagtggcagaagcatagagaaggtgtctttttacctgggattttccattggaggcccacttgcttatgacattgaaattgtttaagagcctgatattcttcctccaagaatttgatctcagtacccatttaatttttttggactcaagatctatgctttaaaccggcaaggttatagatacagcctctagctcttcagatctgtacatgcagtatttaatttcctcttaaacatgttatgagttctacaaagacaatagtgaaaaaggaaggagtgagatatatgaaaagtagcaaatatgttccttggtttggttaacatcattgatgacaaaataataaggagctatgactggagtcaggagaagttagtgtaataagctggctacacagaaccccactacttaccaggcatggattgaagaagattgtctactcaaatggcatttagacattagaatgtctgggaaaatatttctcaaagacagcaaaaacctctcaaactgaggagcaacatttattcttactaagcagatcatcaatgtatcatgtgcttggcactcaaggatcttccaaaacagaggaccaaccagtcttctgaaggtcatgcccacagaagtcatcagaccttaccaaagtaggttggagaattagattgccttttcatgcagtgagattcagttaagcaaaaatgaaatttgtctctatagctaattagcttatcaactcccctccaaacaaacaatt

SEQ ID NO: 746 - DNA, 3266 bp, Homo sapiens
agatgcgaaccaagatggctgaataggaatggatccagtctacaactcccagcgtgagagatgcagaagacaggtgatttctgcatttccaactgaggtaccgggttcatctaactagggagtgccggatagtgggtgcaggacaatggatgcagcacactgtgtgtgagccgaagcagggcgaggcatcgcctcacccgggaagcgcaaggggtcagggaattccctttcctagccaaagaaaggggtgacagacagcacctggaaaatcgggtcactcccaccctaatactgagcttttccaatggggttaacaaacagcacaccacgagattatataccgcacctggctcggagggtcctatgccacggagacttgctcactgctagcacagcagtccgagatcaaactgcaaggtggcagggaggctgggggaggggcacccaccattgctcaggcttgagtaggtaaacaaagcggccaggaagttcaaactgggtggagcccaacacagctcaaggaggcctgcctgcctctctaggctccacctctgtaggctccacctctgggggcagggcacagacaaacaaaagacagcaataacctctgcagacttaaatgtccctgtctgacagctttgaagagagtagtggtgctcccagcacgcagcttgagatctgagaacaggcagactgcctcctcaggtgggtccctgactcctgagtagcctaactgggaggtgcctcccagtaggggcggactgacacctcacatggccgggtactcctctgagacaaaacttccagaggaacaatcaggcagcagcatttgcggtccaccaatatccgctgttctgcagccactgctgctgatacccaggaaaacagggtctggagtggacctccagcaaactccaacagacctgcagctgagggtcctgtctgttaaaaggaaaactaacaaacagaaaggacatccacactaaaaacccatctgtacatcaccatcatcaaagaccaaaggtagataaaaccacaaagatgggggaaaaacagagcagaaaaactggaaactctaaaaatcagagtgcctctccttctccaaaggaacgcagctcctcaccagcaacggaacaaagctggacggagaatgactctgaggagttgagagaggaaggcttcagaagatcgaactactccaagctaaaggaggaagtttgaaccaatggcaaagaagttaaaagctttgaaaaaaaattagacaaatggataactggaataaccaatgcagagaagtccttaaaggacctgatgttgctgaaaaccacggcatgagaactatgtgacaaatgcacaagcctcagtaaccaatgcgatcaacgggaagaaagggtatcagcgatggaagatcaaatgaatgaaatgaagtgtgaagagaagtttagagaaaaaagaataaaaagaaatgaacaaagcctccaagaaatatgggactatgtgaagagaccaaatctacgtctaattgctgtacctgaaagtgacggggagaatggaaccaagttggaaaacactctgcgggatattatccaggagaacttcccccccgacaatctagtaaggcaggccaacattcaaattcaggaaatacagagaacaccacaaagatacccccctagaagagcaactccaagacacataattgtcagattcaccaaagttgaaatgaaggaaaaaattttaagggtagccagagagcaaggtcgggttacccacaaagggaagcgcatcagacagacagcggatctctcggcagaaactctaaaagccagaagagagtgggggccaatattcaatattcttaaagaacagaattttcaagccagaatttcatatccagccaaactaagcttcataagtgaaggagaaataaaatgctttacaaacaagcaaatgctgagagattttgtcaccaccaggcctgccgcaaaagagctcctgaaggaagcactaaatatggaaaggaacaactggtaccagccactgcaaaaacatgccaaattgtaaagaccatcaaggctaggaagaaactgcatcaactaacaagcaaaataaccagctaacatcataatgatgggatcaaattcacacataacagtactaaccttaaatgtaaatgggctaaatgctccaattaaaagacacagactggtaaattggataaagagtcaagacccaccagtgtgctgtatacaggaaacccatctcacgtgcagagacacgcataggctcaaaataaagggatggaggaagatctaccaagcatatggaaaacaaaaaaagccaggggttgcaatcccagtctcggataaaacagactttaaaccaacaaagatcaaaagagacaaagaaggccattacatcatggtaaagggatcaattcaacaagaagacctaactatcctaaatatatatgcacccaatacaggagcacccagattcataaagcaagtccttagtgacctacaaagagacttagactcccacacaataataaagggagactttaacaccccactgtcaacattagacatatcaatgagagagaaagttaacaaggatatccaggaattgaactcagctctgcaccaagtggacctaatagacatctacagaactctccaccccaaatcaacagattacacattcttatcagcaccacaccacacctattccaaaattgaccacatagtttgaagtaaagcactcctcagcaaatgtaaaagaacagaaattataacaaactgtctctcagaacacagtgtaatcaaactagagctcaggattaagaaactccctcaaaatcgctcaactacatggaaactgaacaacctgctcctgaatgactactgggtacataatgaaatgaaggcataaataaagattttctttgataccaatgagaacaaagacacaaaataccagaatctctgggacacattcaaagcagtgtgtagagggaaatttatagcactaaatgccaacaagagaaagcaggaaagatccaaaattgacaccctaacatcacaattaaaagaactagagaagcaagagcaaacacattcaaaagctagcagaaggcaagaaataactaagatcagataagaactgaaggaaatagagacacaaaaaacctttcaaaaaatcaatgaatccaggagctgttattttgaaaagatcaacaaaattgatagaccgctagcaagact

SEQ ID NO: 747 - DNA, 3139 bp, Homo sapiens
ctaaaggtttgtcatctgttgatcctaaattataattataaatttatatattcctgttgaatataatgcatgtgtgttacaagattattagcaatttgagaatttcccgtgcatactggagatgagcaaatggaataagtgctcatgtgtagcaacaggattctctattttatttcaatacttaatattgtaccaaaccaagtaagaggagcatcatgagaaaatgtactaaaggacagtcattacctatatttacacctagaaaagaaaactatattattgataaactgataaatctattttatgtatttatttattattttgctctgtcatccaggctggagtgtactggtgcgatttccactcattgcaacctcctgctcccaggttcaagcaattctacctcagcctccctagtaactgggactacaggcgtgcaccaccacgcccagctaatttttgtatttatagtagagacggggtttcaccatgttggccagcctggtctcaaactcctgacctcaggtgatatgcccacctcagcctctcaaatgctaggattacaggtatgagccaccgcgcccagtctgataaatctatattaaaaagaataaatataaccattgcatcttcaacagaaattggaatatggcatgtagatttcaaaataaaatgaattctctggcattgaattactgtactcatgttgaagaaatgtcagaacttcattggatgttattatattacagttgtttgtttgagttgtagtttgggcagagtaaaggagccaacatgtcttaggatttagaacttgtgcacattgcttacagttgaaagaagaatgcatgctaaattccagcctctttggtatgtggttgggacgtaaagttttaccacatccttcattgtcttagcctactcaggctgccataacaaaataccagagactggatggcttaaacaacagaatctttttttccatatctaagaggcttggaacagaaattcattttctcacagttttggagcctggaagtttaagatcaaggtgccaacatagtttatggtgagaatctgttcctggctaacagatggctgccatctcactgtgtgtttgtatggtgtttccttggtgcctgcgtggagagagagctctaagtgtctcatcttctgtaaggacaccagccccaatgggattagggccctatcctgtgatctttagttttatgtaccccctaaaggctctatgtccaaatgcagtcacactggggtttagggttttaataaatgaattttgggggacacagtttagtccataacattctgtccttgacctgccaaaatgtatgtccttctcccatacaagataaatttattccatcccagccgggcatggtggctcacacctgtaatcccagcactttgggaagccaaggcaggtggatcagaaggtcaagagatcgagaccattctggctaacacggtgaaaccccatctctactaaaataaaaaaaaaattagccaggcgtggtggcgggcgcctgtagtcccagctactctggaggctgagacatgagaatggcataaacccgggaggcagagcttgcagcgagccaagatggtgccactgcactccagcctgggcgacagagctagactccgtctcaaaaaaaaaaaaaaaattattccatcccaacagccccctgaaagtcttaactcattctagcatcaattctaaagttcaaagtgtcatctaaaaaatcatctaaatcaggttacgggtgaggctcaatgtgtgattcatccagagacaaaattcctttccagctttgaacgtgtgaaaccagaaatgttacatgcttctaaggtacaatggtgaaacaggcataatagacattcccattagaaaatggagaaagaggaaagaaggaaggtgtaatgtgtcctaatcaagtccaaaacctggcaaggcaaattctgttaggtcttaagaaaaaccctctttggcttgatgccctgatttccaggcccagtggtgtctcagtgtcacctctggctctgtagttggcctactccatctgccctgcctgaagtctcggtctttcagtttggtggggtcccacccaggcagccatctgtgagagactcccacacagttctgcagggcatctttgaaacaggtagagtcagccttgactacatgttcccacccccaccctatcccatctgtactctctgagtctgacatcaaagtggcagccctggcggctcctgcctgtaatcccagcactttgggaggccaatgagaatggatcactggaggtcaggagttccaaactagcctggccaacatagtgaaaccccatctctactaaaaatacaaaaattagctgggcaagtggtggcaggagcgctactcgggagggtacagatttagagcctgtaatcccagctacttgggagtctaaggcaagagaatcccttgaacctgggaggtggagattgcaatgagctgagatcacaccattgccctacagcctgggtgacagtgagactgcctcaagaaaaaacaaaagagtcagccctagtgatcttgtaagttgcctttggtgggtcagtctttccttttcttaaagaatagtacacattgacagccaggtagctctatgatcctgttctatagaattcaaaaagtcgacaaccttcctttgttcctttctgttttctctgcctacgttagtttaaattggcagtgtctctgctggaataatcccatctctcttcctggcttctgctgagatggctgattaaatccttgggtcacacccattatctctttatcaaatggttgttcaggctaggctcagtgtttcacgcctgtaatcccaacactttgggagactgaggagggcagatcacttgagctcaggagttagagaccagcctaggcaacatgtcaaaaccccatctctataaacaacaacaaaaaattagccggggtgtggtggtgcatacatgtagtcccagctacttaggaggctgaggtgggaggattgcttgagcctgaaggcaaaggttgcactgaactgagattgtgccactgcactccagcctggatgacatagccagaccctgtctc

SEQ ID NO: 748 - DNA, 3496 bp, Homo sapiens
aagagcggctggccaggcacggcctccgcctctcagtacgcggagcgccggcggtcacctggggctcgcggagcggccagatcgcggcggagtcggcgcgcttccccgagggaaggtgggagaggggacccggacgcgaggtgccccgaagccctctcgagcgtaaccgtcccgcgcctctctgaggcggaggatgcgggagcgcatctgggcgccgccgctgctgctgctgctgccgctgctactgccgccgccactgtggggcggccccccggacagcccacgccgggagctggagctggagcccgggcctctgcagcccttcgacctgctctacgccagcggcgcggccgcctactacagcggagactacgagcgagcggtgcgcgacttggaagcggcgctgcgcagccaccggcgcctgcgggaaatccgcacgcgctgtgcccgccactgcgcggcgcgccacccgctcccgcccccgccccccggcgagggccccggcgctgagctgccccttttccgctccttgttggggcgggcgcgctgttatcgcagctgtgagacccagcgcctcgggggccccgcatcccgccaccgcgtcagcgaggatgtgcgcagcgacttccagcgcagagtgccctacaactacctgcagcgggcctacatcaagcttaaccagctcgaaaaagcagtggaggcagctcacacatttttcgtggctaaccctgagcacatggaaatgcagcagaacattgagaattacagggcgacagctggtgttgaagcattgcagttggtagacagagaagccaagccacacatggagagttacaatgcaggagttaaacattatgaggctgatgactttgagatggctatcaggcacttcgaacaagccttaagagaatatttcgttgaagatacagaatgccggaccctatgtgaggggcctcagagatttgaagaatatgagtatttagggtataaggctggtctgtatgaagctattgcagatcactacatgcaggtgcttgtttgtcagcatgaatgtgtgagggaacttgccacccgccctggccgcctctctcccatcgagaattttcttcctctgcactatgattacctacagtttgcctactatcgagttggtgagtatgtgaaagccctggagtgtgccaaagcctatcttctatgccatccagatgatgaggatgtcctagacaatgtggattactatgagagtctgctggatgatagcattgacccggcatccattgaggccagagaggatttaacaatgtttgtgaaacgtcataagctggagtctgagctgataaaatcagctgcagaaggtctggggttttcatacactgaaccgaattattggatcagatatggaggacgacaggatgagaatcgggtcccttcaggagtgaacgtagagggagcagaagttcatggattctcaatgggaaaaaagctatcacccaagatagatcgagacctaagagaaggtggtcctctactctatgagaacatcacattcgtctacaactcggagcagctgaacgggactcagcgggttctcctggataacgtcctgtcggaagaacagtgccgggagctccacagcgtggccagtggaatcatgcttgttggtgatggatacagaggaaaaacttcaccccatacacccaatgaaaagtttgaaggtgcaactgtcctgaaagcactcaaatctggttatgaaggtcgagtcccactgaagagcgctcgtctgttttatgacatcagcgaaaaggctcgaaggattgtagaatcttattttatgctgaactcaactctgtatttttcctatacacacatggtctgccgaacagccctgtctggtcagcaggatagaagaaatgacctcagtcatcccatccatgctgacaactgtttgttggatccagaggccaacgaatgctggaaggagcctcctgcttacacatttcgagactatagtgctctcctatatatgaatgatgactttgaaggaggagaattcatattcacagagatggatgctaagactgtgactgcctctataaaaccaaaatgtgggcgcatgatcagcttctcatctggaggagagaaccctcatggggtgaaggcagtcaccaagggaaagaggtgtgctgtggctctgtggttcaccttggacccactttatagagaattggagcgaatacaggctgatgaagtgattgcaattctggatcaagaacagcaagggaagcatgaactgaatatcaaccctaaagatgagctataaaaatgagaaagaatgttctatcaaatatttatttaaattgttaatcttatgagaacctttttatttttgtacagagccatggtataaattaacaggttaatgtcagtcatcagatcttccttctcttcctaaggatgcttgtgttgcctcaatctatcaatctatctttcttgttttgggttgttttctctctctctctctctctctctctcttcttagagacatggtctaaccatgttgtctaggatatagggcagtggctattcacagatgtgatgatagcacactggagcctcaaactcttaggctcaggcgatccttcaagcctcccggggagctgggaccacaggcacgtgccaccacacccagctctctttcttggtttttcatcatttcatgtatctatcaaagcccagttcacctcctcccccaaacacacacacacacacacacacacacacacaattaagttgctgcaaattcaaaagcttagagagaataagcttcttggtggtgaaactacaactctcacgtgtgctccagttctaaaattaacctgtgcctggtctctgaagccctttcttgctctgtgcctttcagccacatccttaggtgctaacggccatgagctccgactctccaaagtgagctccactttgggtctgaggagcccctggcagagtccacgctgcctcaggtatcatgggcgtaatgatcacccaggctccgggagatctcatggatgattactgtatgagacagaggggacttcagtctttccagggccttggtggaatttttggctctggtgttttcgccagacaataaacttacactggaagctttgattcaccctccacagtactccagaaaggactgtcctataagttgtacactttaaaaggtcatgtagaggttgtagtagaatggcttttcaccctggtgactttggaagaaactcttgaatactgcctgcatccgggcaccatggccaggttgcctaggagtggggtccactgatgaaaagaggtgttttgtacttacataagaaaaataaatttctgattgattttaaccgtcatctgcttatattttgggggcccctcctcattgctgctatccagcacacagatttgtgcttgtgtctgatttgtttaataaagggaggcttatttt

SEQ ID NO: 749 - DNA, 3148 bp, Homo sapiens
gaacagtacaggcggttccatcttcctgggaagacagggagttacagatcgttttaagggaatcccaggactctagaagtctccttcatgggtttctctttctgcacctttcctgtgaatggtgtatccacccgggtcccctcctgcctctttgcacactctctgtggtgtaacttgcacccagggcttcagcagccatctatgcactgagacctttctgttcttggggtggcattcctcgggatttagtgccaggacacacctgtgtgcgcattcactgggaaaagtctgcagaatctacaccaggccttcctggagggcgtgttcctccatctacattcgtgatggaacaaccagttattgtcgccgggacaccagtgcctcatgcacaccatcagccacgggagttttactgttacaagcttgtcctcttaggcacattccctcatcctgaacctgctggcagcagctcctttaggggagcgagggtggctgcttgtcccttccgtccttgggcagccagcgctcagctggatgcatgcagtggaagtcaccttctgcctccactcctgagcaggatgtgctctccccacatctcctgtttgcgctttcagcaatagatcattcacagccataggagggggaggcctcccagtccttggctttttgtacctggaaggggatggtgaggcgttcagctgccaggaatcacttccttccctccagggaccagccccttgcattgttcattttctaaagcaaatacttctcaggaagtggctctcctctttttttttttttcctacgaagctcttttcttaaaagcttactttaactgcaaaaagttccactgttcatggaggaagaaaatgaggcttgctgggtgagacgacagaatagggcttgctgtaattctctcctggaggcaggctctctctctggctctctgttcccccttccccaacctctgtgaaaccacttcaaggatggctcaagctgcgctgatccttgaggcgccaacagcctaagctgtcagcatcttctccagagcctggaagtagaggccttgtcactttttggtataaaagttttgggttaagaggtgccagcagcagaaacatatgttcaaggatgaaggtaagtctgtcttcacaaatgactgatcctgaagatggaccggcacctccaggcccaggtccctgcagaatcaggtgatgggtccccaaaacacaaatggtggcacaatgagaaatctggtggtgggcttggacgaaatggtgtggatgctgggtggtctcttgctttcacctctgtggcaggcactgctgaggtgctgggtccctgggccttttcttggctctgagccatctggtcagggaatgggtaggaagctggcttacataaaacagtcatgtccctgagaaggctgtgtgggccccagcaggcaggtgggttgacctgggagcagcgcctgcaaggctggcacttgcacaccatcccgttacacagagccttcctgcggttcctgagtgtggtggggatcctcccgccacagctggcagccccatgtctcctctggctgcacacaggatcactagggaactttaaaaaggcactgatgccagggctccacttcggccaatacaatcagtctctcagggcagcactgggaggaggtgtttgtggtgtttcatggacacacacactgccagcatcagggagtagtgacagggtactgagaacagcagaatatctagaagtgagttcttcataactgtggaacacagaagtcttccctcacagtgtggcccttgcccactgctgctggaggagagcgctaaggccctggaacactcgtccttacacagccagagtctagtgaaggccacagagccacagcccactgcctttatgcactgatccactccattttctcatttttagattgttttaacctttgaaagcacagatcccaatgcagacgagctcccaattcttggagttcacagacatttgatccgtgtttgaaaataccccagtccttgtgcagagttcccagaattccaagttttcctttcccaggctcgttcttggagctggcccatgatactagctggactcttgaacattcctgacccatcacggccacccttcgaggcttccgattatgcagacacaccatgcccctgcacagtgctcaaagtcaggctgccgcatgcttctatactagacagtcaaagtcggagcccagggctcagcaaagcacctggcacagtggcggctgcagaatgagatctgcttgcctggttgccaaggctggagggcagtaagcttcagtatcctcagaggcagggggctgccacctttgcactaagaaggaattactgatttctaccatttgagaaaaggagtgttgaccacatggaactccgaataggttcatgcacatggaacaaagccctttaggagaaaagcccgttttttgctgtctgcctgatactggatggttgagaaacaatcgtggtgggcagtcacgccacacttgtgcgggcctaggacacaggaaggtttagccctggcctacagggagggtgggcaagcacagcaatcttgtcccccaaaagaacatcagtggccgctggtgccaagacccacgggaaggttagagctctgggttacatttgtggagagagacacagacagcggcagagacagagacgtagtaatccaggctgtgtggcataagaagataaagcggccccccagcccggggcccctcccatggacctcatggtaccgagcctccattttctcatctgttcagtgaggatgaagcctcacctcccagggttttcgcaaagacagggagactggccgggcgccgtggcttacgcctataatcccagcaccttgggaggccgaggcaggcggatcacaaggtcaggagtttgagaccagcctaaccaacatggtgaaaccccgtctctactaaaaatacaaaaattaggcaggcgtggtggcacgcacctgtaatcccagctactcaggaggctgaggcaggagaatcacttgaacccaggaggcagaggttgcagtgagccgagattgcgccactgcactccagcctgggtgacagagcaagactctc

SEQ ID NO: 750 - DNA, 3660 bp, Homo sapiens
aaaaacagaaggcaggattgttcggagatgccggatggcagccatgagaaagaccccactggtctgagaggtctgtgcaggaatgcacggagcctgggaaacacagagaggtatggggcctgagggtgaggacgcaggacaggttagggacgggtggcgctgggtgctggctctggcagagagcaagccaactgggggcatttctttccagccccgtggctgatggtctcgccgtgcgtgatggtgaattttatgtgtcgccttgatgggaccttgggggtgctcagacatttggtcaagcctctgtgtttgcgaggatgtttctggatgggactagcattcaaatctgcagaccgaggcaagcagagtgtcctccccgcagaaggtgggcctcacctcatccatcaggggcctgaatagaataaaaagttgaagaggagagaattatttgcctctgcctgtcttcaaggtggaaccataggtcttctcctgcctttggacttagactcagcagaaagagcacctcccctggccaatgcttttggcaggattccagaatgtgcactcctggagccctggaccacggctggcttggttccagcccatctgtgaccatctctcctaggatgctgggatgttctgtggggccaagctagggctacttgcctacttctgctgcaagggaggggtcagccccatgggaaccataagtgtggggattggggcagcctgattctctaggaagaactgctgccctctttctaggaaaaaggagaagggatttcaggcagcccaagctaacagaggcctgctgtgcacttgtgtgttctgagcactggctaggaagtgcagggcttccaagaagacctaaaattcatgagaaccaagacaaggcagtgaaggtgtgatcctgataaaaggtgaccaagacaaggcagtgaacgtgtcatcctgataaaaggtgactgcaggggctgcccagggcagggagggctcagcctggagtgggtccatcccgtccttgagtcattctgtccttcccctcatctgacaggtgcctggctctttgttcttccttcatcgtgggggacaagggtgcaggggacgacgtgttcattttcctctcctatgctcagctcacggcccccgccctccactccccgcctcacactgatcactttcccattcagcaggttcgatgcacgcacaggatgcacgcgcctccttgcagaacaccgtgtggggcttccagtgagcgcttcatattgtaaatgccactgtgccccggatcccactgtttcactcaacactgttcttgattgttgtcatcaagtttaaaaaaaaaaattatggtaaaatacatataagctaaaactgaccttttttttttttttttttttgaggtggagtcttgctctgtcccccaggctggagtgcagtggcacaatctcagctcactgcagcctccgcctcctgggttcaaatgatcctcctgcctcagcctcccaagtagctgggattacaggcacccaccaccacaccaggctaatttttgtatttttagtagagacggggtttcaccatgttgatcaggctggtctcgaactcctgacctcaagtgatttgcccgcctcagcctcccagagtgctgggattacaggtgtgagctactgcacccagcccattttaaccatttctaagtgtattgttcactggcattaagttcattcaaactgttgtgcagctgccaccatcatccatctccagaacttgtcatttttccaaactgaaactctgttcccattaaaccccaactctatgtttcctcctcccccagcccctggcaaccaccatgctactttctgtctctatgggtttgaccattctagggacctcatttaacctgagccctacagccttcacctttctgtggctgatttatttcacttggcgtgacatcctcaaagttcatccatgttgtcacctgtgtcagaatctccttatttccaaggctgagtgatattccgttgtgtggatggaccacactctgtttattcattcacctgtcaatggatgtttggcccatttctacctttcggctagtgtgaaaaaaagcagctgagaacatgagtgtacaaatacctctttgaaaccctgcatttagttcttttggagacagacccagaagtggtattgctggatgacatgctaattccatgtttaatttttggagaaacagccatcccattttccacaggggccgcaccgttttacatccccacccacagtgtgcaagggttccagtttctccatggcctcgctgacacttgttattctccacctcgttgacagtagccatcctgaggagtgtgaggtggtgctgtgtgttattctccacctcattgacagtagccatcctgaggagtgtgaggtggtgctgtgtgttattctccacctcattgacagtagccatcctgaggagtgtgaggtggtgctgtgtgttattctccacctcgttgacagtagccatcctgaggagtgtgaggtggtgctgtgtgttacttttacttgtctccatgcagctaagggcacgccagtgcacgcctaatgcaggcggggtgacacctgcacagttccatctgctgcttcacgacgtgttgctaactcagtcgccgaccactggactctgggctgctccattcctaacttccacagtgttgatggataccgatgcaagcccttctggggaagacacagtgagagcctctctcagccatgcattcctcagcctgactgcaaggtcgcagccccctacaaagcccagtctgagtgcttcccaggctgccatgtgccaggtctccctcccacggctgtcctggaaggctctgctttgcaccaacttgccagcacttggcattagtcaaccctctagcttttaccaatctgatgggtgtaaagggaattcctgcgttttactttgcatttctctgattcctgtgggtttgagcagctcttcattgaattgtgtgtcatttgcactttcccttctgggaattgtctgttggggttggctttctgtcaacttaaacaggagcaaacttggttacttttaattaaaagcaggctcgtggcagcaggggagttttacatgcataggaaggtcaggtccagccctgcccatcttcgtgcatactctctctttggtcactgctgtgcggcatggtgagcttggcacctggccttcagaatgcagccacagaagggagttcatgggccaggcattctgctaagggacacagctgtctctggctcctgcatccaattactggactctctgcttcattgctctggtggagctgccagcctgagtctccacatgttctttcaacactcccttggtggccagcccagtgtgcttttaatcattgacaagcaagaggatgccacagagaaggatgttggctgctgttcaggcatttggggactggcagggagggctgctgtccacgacggaggatgccacaagtggattcaagactgagttttttgtttttctatccatcaactcaagcatttgttattttgtttgtgttacacatagtccaattatactcttttagctatttttaaatgtacaataaatttttattgattctagtc

SEQ ID NO: 751 - DNA, 4092 bp, Homo sapiens
gagaaaggcgggcgagctggcgctcaggtgtgttcttccatagggcccgggcggcagagaggaccgcgtcccggcagtcggagcgggaggaggacaagacgatgccgctgtccccgccagcccagggcgaccccggggagcccagcccgtgcaggccccctaagaagcacaccaccttccacctctggcgctccaaaaagaagcagcagccggcgccgcctgactgtggggtgttcgttccgcacccgctcccggcgcctgccggagaggccagagctttggatgtagtcgatggaaaatatgtggttcgagactcccaggaatttccactgcactgtggggaatcccagttcttccacaccaccagtgaggcgcttggttccttacttctagagtctggaatatttaaaaagtccagagcacaacctccagaagacaacagaaggaagccagttttggggaaacttggcactctattcactgcaggaaggagaagaaacagtagaaacgggttagagagtcccaccagatcgaatgccaaaccactctctcccaaagatgtggtagcctctcctaagctcccagagagagagagtgagaggagcagatctcagagcagccaactgaagcaaacggacacaagcgaggagggctccccgcgggagaatccccgagaggcagagggcgagctccccgagagcggtggccccgcagccccccctgacgccgagctgtcacctcgctggagcagcagtgcagcggctgtggctgtgcagcagtgccatgaaaatgattcaccccaattagaacctctggaggcagagggagagcctttcccagatgccaccaccactgccaagcagctgcattcctcgccgggaaattcctccaggcaagagaacgcagagacgcccgcccgcagtccgggggaggacgcttcaccaggtgctggccacgaacaggaggctttcctgggtgtgaggggtgcgccagggtcgcccacccaggagcggcccgcgggaggactaggcgaggcccctaacggagcccccagtgtgtgtgccgaagagggctccctggggccccgcaacgcccgcagccagccccgcaagggcgcgtctgatttgccaggtgagcctccggccgaaggcgcagcgcacacggccagctccgcgcaggcagactgcacagcccgccccaagggtcacgcccaccctgctaaggtgctaactttggacatctacttgagtaagactgagggggcacaagtggacgagccggtcgtgattactcccagagcggaagattgcggtgactgggacgacatggagaagaggtccagcggccgtaggtcggggaggcggagggggtcgcagaaatccaccgactcccccggcgcggacgccgagctccctgagagcgctgccagggacgacgcggtgttcgacgacgaggtggcgccaaacgcggccagcgataacgcctcggcggaaaagaaagtgaaatctccgcgggcagccctcgacgggggcgttgcctccgctgcgagcccagaatccaagcccagccccggtaccaaagggcagctccgaggggagtcggaccggagcaaacagccacccccggcttcgtcccccacgaagaggaagggcaggagccgtgccctcgaggccgtgcccgccccgcccgccagcggcccccgggctcccgccaaggagtccccacccaagagggtgcccgatcccagcccagtcaccaagggcactgcggccgagagcggggaggaggcggcgcgggccatcccccgcgagctcccggtcaagagcagctcgctgctgccggagatcaagcccgagcacaagaggggcccgctccccaaccacttcaacggccgggcagagggaggtcgaagcagagagctgggcagagcggccggagcgcctggagcttctgacgccgacggcttgaagcccaggaaccatttcggcgtgggcaggtcgacagtgaccactaaagtgaccctccctgccaagcccaaacatgtggaactaaatcttaaaacccctaagaatcttgacagtttgggaaatgagcacaatccatttagccagccagttcacaaaggcaacactgccaccaaaatctccttatttgaaaacaaacggacaaacagtagcccaagacacactgacattcgaggccaaaggaatactcctgcctctagtaaaacgtttgttgggagggcaaagctgaatttagccaaaaaagccaaagaaatggagcaacctgaaaagaaagtaatgccaaacagtccccagaatggtgtgctggttaaggaaactgctatagaaaccaaagttaccgtctcggaagaagagattctgccagcaaccagaggaatgaatggagactcttctgagaatcaagctcttggtcctcagcctaaccaagatgataaagcagatgtacaaacagatgctggctgcctttcagaaccagtggcttctgctctgattcctgtcaaggatcataagctcttagagaaggaggactcagaggctgcagacagcaaaagccttgtacttgaaaatgtaaccgatacagcacaagacatccccaccactgtggataccaaagatttacctccaacggccatgccaaagccacagcatacattttctgactcacagtcccctgctgagtcatctcctgggccttctctttcactgtctgcacccgctcctggggatgttcccaaagacacatgtgttcaatcacccataagcagtttcccatgcactgatctaaaagtgtcagaaaaccataaaggatgtgttttgcctgtgtctcgtcagaacaatgagaaaatgccacttttagaacttggaggagaaacaacccctcctttgtccacagagcgtagtccagaagctgtgggaagtgagtgtccatccagagtcctcgtccaggtcaggtccttcgtgctccccgtggagagcacccaggatgtgagctcccaggtcatcccagagagctctgaagttagagaagtgcagttgccaacttgtcacagtaatgaacctgaagtggtttccgttgcaagttgtgctcccccacaagaggaagtactgggcaatgaacactctcattgcacagcagagctcgcggcaaaatctggcccacaagtcataccgccagcatcagagaaaactctgcctattcaggctcaaagtcagggcagcagaacacccctgatggctgaatccagtcccaccaactctcccagcagcggaaatcacttagccactcctcaaaggccagatcagactgttacaaatggccaggatagccctgccagccttttgaacatttctgctggtagtgatgatagtgtatttgattcttcttctgatatggaaaaattcactgaaattataaaacagatggatagcgcagtttgtatgcccatgaaaagaaagaaggccaggatgccaaactctcctgctcctcactttgccatgcctcctattcacgaagaccatttagaaaaggtgtttgatcccaaagtgtttacctttggtttggggaagaagaaggaaagtcagccagaaatgtcaccggctttacatttgatgcagaaccttgacacaaaatccaaactgagacccaaacgtgcatctgctgaacagagcgtcctcttcaagtccctgcacaccaacactaatgggaacagtgagcctctggtgatgccggaaatcaatgacaaagagaacagggacgtcacaaatggtggcattaagagatcgagactagaaaaaagtgcacttttctcaagcttgttatcttctttaccacaagacaaaatcttttctccttctgtgacatcagtcaacactatgaccacggctttcagtacttctcagaacggttccctatctcagtcttcagtgtcacagcccacgactgagggtgccccgccctgtggtttgaacaaagaacagtcaaatcttctgcccgacaactccttaaaggtcttcaatttcaactcgtcaagtacatcacactccagtttgaaaagtccaagccacatgg

SEQ ID NO: 752 - DNA, 3146 bp, Homo sapiens
acattctcattttaatcctcaagcaactctgaattagttgctgttatcccagacttacaggcaggaagcaggctcagagaagtgaaggtttccaacttagacgtgccaggctgtgcacaggtggggacctctgaggggcctgctctgatctgggttggggctgccccaggacccttggaggagccgccaccagagcaatgggtggagggtccggggaggagcaactctatgctgactttccagaacttgacctctcccagctggatgccagcgactttgactcggccacctgctttggggagctgcagtggtgcccagagaactcagagactgaacccaaccagtacagccccgatgactccgagctcttccagattgacagtgagaatgaggccctcctggcagagctcaccaagaccctggatgacatccctgaagatgacgtgggtctggctgccttcccagccctggatggtggagacgctctatcatgcacctcagcttcgcctgccccctcatctgcaccccccagccctgccccggagaagccctcggccccagcccctgaggtggacgagctctcactggcggacagcacccaagacaagaaggctcccatgatgcagtctcagagccgaagttgtacagaactacataagcacctcacctcggcacagtgctgcctgcaggatcggggtctgcagccaccatgcctccagagtccccggctccctgccaaggaggacaaggagccgggtgaggactgcccgagcccccagccagctccagcctctccccgggactccctagctctgggcagggcagaccccggtgccccggtttcccaggaagacatgcaggcgatggtgcaactcatacgctacatgcacacctactgcctcccccagaggaagctgcccccacagacccctgagccactccccaaggcctgcagcaacccctcccagcaggtcagatcccggccctggtcccggcaccactccaaagcctcctgggctgagttctccattctgagggaacttctggctcaagacgtgctctgtgatgtcagcaaaccctaccgtctggccacgcctgtttatgcctccctcacacctcggtcaaggcccaggccccccaaagacagtcaggcctcccctggtcgcccgtcctcggtggaggaggtaaggatcgcagcttcacccaagagcaccgggcccagaccaagcctgcgcccactgcggctggaggtgaaaagggaggtccgccggcctgccagactgcagcagcaggaggaggaagacgaggaagaagaggaggaggaagaggaagaagaaaaagaggaggaggaggagtggggcaggaaaaggccaggccgaggcctgccatggacgaagctggggaggaagctggagagctctgtgtgccccgtgcggcgttctcggagactgaaccctgagctgggcccctggctgacatttgcagatgagccgctggtcccctcggagccccaaggtgctctgccctcactgtgcctggctcccaaggcctacgacgtagagcgggagctgggcagccccacggacgaggacagtggccaagaccagcagctcctacggggaccccagatccctgccctggagagcccctgtgagagtgggtgtggggacatggatgaggaccccagctgcccgcagctccctcccagagactctcccaggtgcctcatgctggccttgtcacaaagcgacccaacttttggcaagaagagctttgagcagaccttgacagtggagctctgtggcacagcaggactcaccccacccaccacaccaccgtacaagcccacagaggaggatcccttcaaaccagacatcaagcatagtctaggcaaagaaatagctctcagcctcccctcccctgagggcctctcactcaaggccaccccaggggctgcccacaagctgccaaagaagcacccagagcgaagtgagctcctgtcccacctgcgacatgccacagcccagccagcctcccaggctggccagaagcgtcccttctcctgttcctttggagaccatgactactgccaggtgctccgaccagaaggcgtcctgcaaaggaaggtgctgaggtcctgggagccgtctggggttcaccttgaggactggccccagcagggtgccccttgggctgaggcacaggcccctggcagggaggaagacagaagctgtgatgctggcgccccacccaaggacagcacgctgctgagagaccatgagatccgtgccagcctcaccaaacactttgggctgctggagaccgccctggaggaggaagacctggcctcctgcaagagccctgagtatgacactgtctttgaagacagcagcagcagcagcggcgagagcagcttcctcccagaggaggaagaggaagaaggggaggaggaggaggaggacgatgaagaagaggactcaggggtcagccccacttgctctgaccactgcccctaccagagcccaccaagcaaggccaaccggcagctctgttcccgcagccgctcaagctctggctcttcaccctgccactcctggtcaccagccactcgaaggaacttcagatgtgagagcagagggccgtgttcagacagaacgccaagcatccggcacgccaggaagcggcgggaaaaggccattggggaaggccgcgtggtgtacattcaaaatctctccagcgacatgagctcccgagagctgaagaggcgctttgaagtgtttggtgagattgaggagtgcgaggtgctgacaagaaataggagaggcgagaagtacggcttcatcacctaccggtgttctgagcacgcggccctctctttgacaaagggcgctgccctgaggaagcgcaacgagccctccttccagctgagctacggagggctccggcacttctgctggcccagatacactgactacgattccaattcagaagaggcccttcctgcgtcagggaaaagcaagtatgaagccatggattttgacagcttactgaaagaggcccagcagagcctgcattgataacagccttaaccctcgaggaatacctcaatacctcagacaaggcccttccaatatgtttacgttttc

SEQ ID NO: 753 - DNA, 3859 bp, Homo sapiens
atcgagggcatctgaccctgggtgcacgagtgaattaattgagttaatgttgactaagttcctggttagtattcacggagcaattggtgaccccaccaaaacgtcgttcaaggtgcaaggtccagaggcctcgaggagtgggatttacccatcggagccgtccgctcagacgccgttagtggagggttccgccgacttcacgggagtgaggaaagtcacttttggaaatcgactttgccttcgcccgcgaagcccgccagcgtccggactcgagttgcccccggagccactgccggaagtttaccagctcactttcggcgtcgcgcccgcctccgtggagcaggccggaagtggctttccggcagccgccgccgcagctccgtaaagcaagatggcactactcactctgaggctattatctccgttttatatctagtattcctcttctcaccagttactctcgatttccgtcccgcgccctaattttcttcagcaccacattctcatgtttttctttcattcagccttggtggagtatggtctggaggcaacctacggctagcctgagcaacgtggggcaccattttgtacggaaactgaaggcagggcgggggagtgtgaggcctcccgaggaggcccggcttgagagagagcgtgggagggagagcgttgttcaccgatgatgtatttccgcttctggtctgcctggtcgtttttggttggatcggcttgttgcggggagggaggggggagattgtttgcagcatagaagctccgcggacgggaaggtaaactgagctccccagagacgctcatcctacagcctcagctcgggcccagccttctctctccagctgccaccacagcctggaggcgcctgcctccaccctcccgaatggtgctcctcctagcaggcctcggtccaggatccaagccccctttgccccctgccttggagctgttgctccgggtttgtcacagtggactccctgtggcgggaagggaagaacttttgcacagacaaggcttcagctctaggaaccccactgacaacttgaatctcaacctctaacctagtgtgaggttcttcctgtgcccaccttttctgccttttgagaagagaaactcttctcctggccatctagagcccaggaagccccaagctggggccctggtcccagcatgtcagtcctctcttgtgcatagggctctgccctccccctgtcagcatggctgagctcagacaggttccaggagggcgggagaccccacagggggagctgcggcctgaagttgtagaggatgaagtccctaggagcccagtcgcagaagagcctggaggaggtggaagcagcagcagtgaggccaaattgtccccaagagaggaggaagaactggatcctagaatacaggaggagttggagcacctgaaccaggccagcgaggagatcaaccaggtggaactacagctggatgaggccaggaccacctatcggaggatcctacaggagtcggcgaggaaactgaatacacagggttcccacttggggagctgcatcgagaaagcccggccctactatgaggctcggcggctggctaaggaggctcagcaggagacacagaaggcagcgctgcggtacgagcgggccgtaagcatgcacaacgctgctcgagaaatggtgtttgtggctgagcagggcgtcatggctgacaagaaccgactggaccccacgtggcaggagatgctgaaccatgctacctgcaaggtgaatgaggcggaggaagagcggcttcgaggtgagcgggagcaccagcgagtgactcggctgtgccaacaggctgaggctcgggtccaagccctgcagaagaccctccggagggccatcggcaagagccgcccctactttgagctcaaggcccagttcagccagatcctggaggagcacaaggccaaggtgacagaactggagcagcaggtagctcaggccaagacgcgctactccgtggcccttcgtaacctggagcagatcagcgagcagattcacgcacggcgccgcgggggtctgcctccccaccccctgggccctcggcgctcctcccccgtgggggccgaggcaggacccgaggacatggaggacggagacagcgggattgagggggccgagggtgcggggctggaggagggcagcagcctggggcccggccccgcccccgacaccgataccctgagtctgctgagcctgcgcacggtggcttcagacctgcagaagtgcgactccgtggagcacttgcgaggcctctcggaccacgtcagtctggacggccaagagctgggaacgcggagtggagggcgccggggcagcgacggcggagcccgtgggggtcggcaccagcgcagcgtcagcctgtagccgaggggccagggttcctggcttgaatctgccaccacgggccggttggggcccacagtcttctcacgccctctcctctggggcctcgtcttcccgaaggtccccttctccagtgcttccctgggagaggccagctgtgttcgagtcctctgtgcctgccctggcgttctcagagcctcccccttcccctcagcaggcggctctctttgccttacccattcagaaggctcgccctcggcgctctgtctgcctctgcctgccagctcatcacgatctgcagggcattgaccctttgctttccctttctgctccctctctttccatctgtttggctttttccctcagggaacttggtctagaaggcactgggaagctcatcagagaaaatgggtgctgggcctgagtactcccgtcggaggggatggacagtcacccctcccgttggtttccagccccgccccccttcccaaggcaactctggagggtaccctaggtatgctgctgagccctgccccccgtcctgctccagcctgcccgtgtgtaacctgtaagatgtactgtgtgcctccggaagacaccacctttcccttcagcattccctttcatgacctgaggcactctgcgatgtgtgccccaaagcagaacttacagggcctgcaggaagctggtgtcagggagagaaacccaaccccactgtcaacatagggagcatcaccaactccagactggctcctgtgggtatggtgtttccgctgggctgggtcctcaacattgccaaggtgctagtgggtccctaagagggcccatgttgggggtgaagtcatgaggtcctgaaggcttaggcccctgtcattcccaccctcactcttgctgcacagttgtgtttactttttctgggtagaggatgctgaactgactcagcaccctcctgcagggcggggttagggaatttggtgctcaattgctctcccttgctcttccccaaactgaaaatacctactgcaggatccctcggggcacactgaagcttggctgccaaccctcttacttcctttgttacagggaggggttggcttggggtgaaaagttctgccctccgcagggagcagctccagctgcctggcagtgctcccagtttgtagggaagccacaccagatctgggtgccttgggagaaccagtccttccttttgacccaccccaggaagatggagtgctcttttctaggcccatgttctgccagcaaccgggatgcgtgggcaactggactctgcacgggggtctacaggttgagggaggttggtcacaatgagaacctcggggtttgaggtggccatgggcagacagccgaaagggagggagggtgtgggtgtgcgtgtgtgcatgtgctggtgtgtaagggggaaagggtctttcctggttttatttaaataaagtagtttatgtaac

SEQ ID NO: 754 - DNA, 3450 bp, Homo sapiens
ctaacacggctcctccgggtcacgtgggtgggctcagcggcctcccgtgcctcccctaggtctggagtctcccctgccctctcgttgggctccaagcctcttcctcagcccagcttcctgctttgtggcagccgtgctttctggaagctgagcagcttcttttttttttttttttttttgagacggaatttctttgtcccccggactggagtgcaatggcacgatctcagttcactgcagcctccgcctcctgggttcaagtgattctcctgcctcagcctcccgagtagttgggactataggcccccaccaccttgcccggctaatgtttttgtatttttggtagagatggtgtttcaccatgctggccagttcgagactggtcttgaactcgtaacctcaggtgatcctctcgcctcggccttccaaagtgctgggattacaggcgtgagccaccgcacctggcctcttgttcatgttttatgtgtaaattggtcctctgctatttctgttgctcagaggtggaaaggagaagggaacacgataaagtcacacatccacactgttgacaggggtttggcttccagggaacacacctctgtggcctcagggctatgtcctgaattctaaaacggggctctcacggctgacccgatgtcactgggtccccgtttgctgcttgagtctcttcggagcccagtgttgactcccgctcttcgtggctgccccggctatctggccatgaggagctgaccacgcacctggccggactcacatccgctccgctagggaagacctgggggcggaggtcggtctctgaccagccagcgtccctgcaggggactgcgagtaggaggcgggtattgcccacgccagggcctgtggtctgagagggctggcccttgacggacaggtgggcaagtccccctcccacatctctaggcaccagggcgtagcgtaccatgtgtgctgtgtttgtggttgggttcaggtactgccctgtaggcgtgtctgctctgagcctcctgggacagcctgaagtggttgctgcacagctgctttggggcctcccaggggtgtgttcctgctcccaccctggggtgctctgagttggtcttgggttagagaagtgcagtggctggtgtgtgcgcagcctaggggcctaggacctgcttctcagagcatcacggggcccaccaagaagtgccccctggggaggtgacagcgtcttccagaaatgccgccgcccacaaggaggactggcctgtgccggaagctggagatggtggggtcctgatggcacctggtaggtgagggtgccccagagaaacagagccaaggcggcggcctggagacagattctgtggaatctgcccactctgttgtggggcctgccaagctcagcatctgcagggtggaccgaaccccggggaaagagtcagtgctggattctcaagagtccagaggccatccagggcagagtgctcccctcagaggacctcagtcttttcttagtccttcacctgattggatgaggcccacccactcatggcgatcagctgatttactcagagctgactgatttaaatgttaatttcatctaaagaagtaactatacagaaacatccagattaatggttgaccaaaatctgggcactgtggctcagccaggctggcacataacattacccatcgcatgttagttggaagcttggcctttggaattaactcagcctggtcagccgttagcagccagcagtctctgttctgcccacacacctctgtggactgacccaggacacaggtgagcagcatccatgagaaactgtggtgcttctctcctatgggacagatggagccccgctcccttctgtgtggaaatggtccaggagcatcttgtgcgggtggtgggggggcgagggcagggcctccgcatgagggagagcagcgagcggcagccactccttcgccgagccagcagggccatctcctgtctgcctcaaccactactggactcagcctttctcccccagcagtgacatcaaaatagcctatttataggacataacaaagatgatgccagctgttaataaaaatgtccgctaatcaggcagttcacttgctgcagttttttggggtcccaagggcccagcccaggctcctgtgcccttggccaccgtgggccagtccctggggtcttgtgggagcctccgcgggcctgggagtggcaggacccttagagggcgagagttcacatgagagcgtggggttctgactcgcgagggttcacgtgagagcgtggggttctgagtcgcgagggttcacgtgagagcgtggggttctgactccctcgtgtcatttcagccgcggcgagtcctttgcacatgttggcaacacacgcatccgcatcggcctccctgcccacaaagcgccacaacggtgaccagccggagcagccggagctgaagcggatcaagacagaagacggcgagggcatcgtcattgccctgagcgtggacacgccaccggcagccgtaagggaaaagggtgtccagaactagcgaccgggagagcttttctttaacgatatcaactctgtggtgccaaaaggagacgcggcctcccgccagcactcgggggtgcagggccctgtggttggacttcacctctcagcactgaaaacccaaaacccagctggccttaacactccttaaagacagaagtcacacttgaacaaaacccacacacaacaaaacctgatttgggagacggtgtctccactgagcacctgctgggctgagcttctacctacgagtgaaactctgtcctcccgcgaggaccaggcatcgctgtgtgaggacggcacggccagcgcctgctgtgagtgggtctcccaagactaggcctcaggacgcggggggagccatccccgccgccctcacaggacccaccaggcagcggagacatgtggaattagagtattttgaggtgtcctttctttacaaaataatggggtcttgggcatttcacatcactccatttctactgagactttcagaatcacacaggccctttccgtggatttcatttggggcaaagaaacaacgtagttttgtttttgttttcagcctatggaatgatttccttttgtctgtcttgttcaagttcagacgaagctactctggcatctgcacatttccgtgttacagcagctgcctgatgaattttatccacctccatttcagcatgtggctcgcgtggacaggtggacggacgctgtggccgcatggaaccttgagaacccagggacgagccagtgccgggaaggaactgccgggactcaccgagctgcacttaactgttctctttctggctattttttgttgtttgtttctttgtgttgactttgtccctggcaaaattttccactctgagtaaaacaagtctcct

SEQ ID NO: 755 - DNA, 4532 bp, Homo sapiens
aatgctggggctgctgccgcggtcatgagggagccgctcccgggcagcgcttcctgggggacccctggccccccgagcgccgggaccatgtcccagctgcagctgtggctgcagtttgaggctctgaacaaggactcctcctattttgaggacttctccaacatctccatcttctcctcgtccgtggactccctgtcggacatcgtggacacgcccgacttcctgccggctgacagcctcaaccaggtgtccaccatctgggacgataaccctgccccctccacccacgataagctgttccagctcagcaggccgtttgcaggcttcgaggactttctgccctcccacagcaccccgcttctcgtcagctaccaggagcagagtgtgcagagccagccagaggaggaggacgaggctgaggaggaggaggcggaggagctggggcacacagagacctacgccgactacgtgccgtccaagtccaagatcgggaagcagcacccagaccgcgtggtggagaccagcacactgtccagcgtcccacccccagacatcacctacaccctggccctgccctcggacagcggggccctgtctgccctgcagctagaggccatcacctacgcctgccagcaacacgaggtcctgctccccagcgggcagcgcgcgggctttctcatcggcgatggggccggcgtgggcaaaggccggacggtggccggagtcatcctggagaaccacctgcgcggccggaagaaagcattgtggttcagcgtctccaacgacctcaagtacgatgcggagcgcgacctgcgggacatcgaagccacgggcatcgcggtgcacgcgctcagcaagatcaagtacggtgacaccactacctcagagggcgtcctcttcgccacctactccgccctgattggggagagccaggccggcggccagcaccgcactcgcctccggcagatcctggactggtgtggggaggccttcgagggcgtcatcgtgttcgacgagtgtcacaaagccaagaatgccggctccaccaagatgggcaaggctgtgctagacctgcagaacaagctgcccctggcccgcgtggtctacgccagcgccacaggtgcctctgagcctcggaacatgatctacatgagccgcttgggtatctggggcgagggcacacccttccggaactttgaggagttcctgcacgccatcgagaagaggggcgttggcgccatggagatcgtggccatggacatgaaggtcagcggcatgtacatcgcacgccagctcagcttctccggcgtcaccttccgcatcgaggagatcccgctggccccagccttcgagtgcgtctacaaccgcgcggccctgctgtgggccgaggccctgaacgtgttccagcaggcggccgactggatcggcctggagtcgcgcaagtccctgtggggccagttctggtcggcacaccagcgcttcttcaagtatctgtgcatcgcagccaaggtgcgccggctggtggagctggcccgagaggagctggcgcgagacaagtgcgtggtcatcgggctgcagtccacgggcgaggcgcgcacgcgggaggtgctgggggagaacgatgggcacctcaactgcttcgtctcggccgctgaaggcgtgttcctgtcgctaattcagaagcactttccgtccaccaagagaaagcgggacagaggagcgggcagcaagcggaaacggcgacctcggggacgcggggccaaagccccccggctggcgtgcgagacagcgggcgtcatccgcatcagtgacgacagcagcacggagtcggaccctggcctggacagcgacttcaactccttccccgagtccctggtggatgacgacgttgtcatcgttgatgcagtcgggctccccagtgacgaccggggacccctgtgcctcctgcagagagacccgcatggccccggggtcctggagcgggtggagcggctgaagcaggatctgctggacaaagtgcggcggctgggccgggaactgccagtcaacaccctggacgagctcatcgaccagctgggcggcccccagcgggtggcggagatgaccggcaggaaaggccgcgtggtgtccaggcccgacgggacggtggccttcgagtcgcgggcagagcagggtctgtccatcgaccacgtgaacctcagggagaagcagcgcttcatgagcggcgagaagctcgtggccatcatctcggaggcctccagctcgggtgtctccctccaagccgaccgccgtgtccagaaccagcggcgccgcgtgcacatgaccttggagctgccgtggagcgccgaccgcgccatccagcagttcggccgcacccaccggtccaaccaggtctccgcgccagagtatgtcttcctcatctcggagctggccggggagcgccggttcgcctccatcgtggccaagcgcctggagagtctgggggccctgacccacggagaccgccgcgccacggagtcccgtgacctcagcaagtacaactttgagaacaagtatggcacccgggccctgcactgtgtcctcaccaccatcctgagccagactgagaacaaagtgcctgtgccccagggataccctggaggggtccccaccttcttccgggacatgaagcagggcctgctgtctgtgggcattggtggccgggagtcccggaatggctgcctggacgtggagaaggactgttccatcaccaagttcctgaaccgcatcctggggctggaggtgcacaagcagaacgccctgttccagtacttctcagacaccttcgaccacctcatcgagatggacaagcgggagggcaaatacgacatgggcatcctggaccttgctcccggtatcgaggagatctacgaggagagccagcaggtgttcctggctcccgggcacccgcaggacgggcaggtggtcttctacaagatcagcgtggaccgcggcctgaagtgggaggacgcctttgccaagtcgctggcgctgacgggcccctatgacggcttctacctctcctacaaggtccgcggtaacaagcccagctgcctgctggcggagcagaaccgcggccagttcttcacggtgtacaagcccaacatcggccggcagagccagctggaggccctggacagcctccgccgcaagttccaccgggtcaccgcggaggaggccaaggagccctgggagagtggctacgctttgtcgctgacgcactgcagccacagcgcctggaaccggcactgccggctggcgcaggagggtaaggactgcctgcaggggctgcggctgcggcaccactacatgctgtgcggcgcgctgctgcgcgtgtggggccgcatcgccgccgtcatggccgacgtcagcagcagcagctacctgcagatcgtgcggctgaagaccaaggacaggaagaagcaagtgggcatcaagatccccgagggctgcgtgcgccgggtgctgcaggagctgcggctgatggatgcggacgtgaagcgcaggcaggcgcccgccctgggctgccccgccccgcccgccccgcgcccgctggcgctgccttgcggccccggagaggtgctggacctcacctacagccccccggccgaggccttcccgccgcccccgcacttctctttcccggcgccgctgtccctggacgccggccccggcgtcgtgccgctgggcacccccgacgcccaggccgaccctgcggccctcgcgcaccagggctgcgacatcaacttcaaggaggtgctggaggacatgctgcgctcgctgcacgcggggccgccctccgagggcgcgctgggggagggcgcgggggcggggggcgcggcgggcggtggtcccgagcggcagagcgtgatccagttcagcccacccttccccggcgcccaggctcctctctgacacgcctttaggcgaaacatgccccaagacacagggaccgtttctcccctaggagcagcggtggggagcagggccaaggtcccctgaccactgctcagaggagccctaggccctggccgcagtgccttcagcgcccgacccgggcccccacctggtcagccctggcggggcccactcaggacagctgggggccggggcgtggcagggccctctctgtgcctctcctcccaagtaggaaggggctccgggtggctgctctgggactgggcacccacaagggctcagtgggcccaaacccttgaaatccgtgaaaccgggtggtcccaagagctagaaactcaggaaaccccaggtgctcagggccccgcgtctcgggggctccgtggggcagacccctgctaatatatgcaattctccctcccccagcccttccctgacccctaagttattgcccgctcacctctcccaggccccaggccgcggagctggcagggtggcgcctgcggtttctatgtatttatagcaagttctgatgtacatatgtaaaggacttttttaaatatatgtgccttttgcct

SEQ ID NO: 756 - DNA, 3471 bp, Homo sapiens
ctgatgcccatgccccctcaccagctaactgtggcttgcacctttacctgttcccttcattttcccttctccagaggaagaggtgctctccacaagcctgtgaccaactgttcccctcagccggcacactggctcctcttctcctgcctgccacagacctctctccttcatgggcccactggggctctttgagcctattctctacccccttcattatcatgccttgcaaacaccatcatgagcaaaaatcaaagctggtgttagactctcttgctttccatagctgaccctggcttccctgctttctgtgatgaattcacggtatgtgtgggctttgccaactgttcccagcccttaccaggttcccattcatacctggctctaattcacaccttacaaatcggcgtccaccccacctttgcctgaaatggcacctcctagggcaattgatggctgcagtcatcaactctgatgccttctcagccttcttccgccatcacctctcagcgacctttggccttgatagctatgtgatcatctaccagaccctgcacccaggctcagcctgatcttgccccagtggccaggcccttgagtgggactgccgggaattgagtccagcttttctggccatctgaccgtggccagttagcctcttatgttctgtttgcttctctataaaatggggataataacactacttatgtcacaaggtcctcatgaagattaagtgaaattatgcacgtaaacatctcagaacaatgcctggcacagaagggacacctgtgaggttagctattaattcatagcctcaccagacttaccccacgtctgctcccctcctcctctgggctctggcttaggctctgccctcatgcatgccatcctgcttggatgctgggtagctttgcacttggctctgccttggcctgcaaataacaaatctgagctcaaatgagctttagcagaaaaggactttgattggctccaatagctgaataatctgtatccaggtcaggtgaggcttcatctcgggcttcactctgattcaaggccccttttctctcttgttcttttgggggctccatctcccaggcctatgagcaggaacaaccctcatgcttccaagatggccccaggaactctcaagatccattttcttggtgcaaatatagcagaaagtgactctctgcttcctggaagtttcaaactcaaatccaggaatagtctcctgtagcagcctgccttgggccgtgtgcccatatctgagccagtcactagagccaggggtttaaggagatcagagtccacttctggagaggatgagagtgaagtcagcaccaccaaaacatagggaccagctgtggagaaattgtgagtactggaaggacaggataggaggaatggatgatggggagaaaaccgactaatatgcagatgccctttcctccaagaggccttccctaagtcttcctccttcagtttctattacatgaaactctgtaactctcctctcctctctcctcttcttttttttttttttttttttgagatggagtcttgctcggtcgcccaggctggagtgcggtggcatgatctcggctcactgcaagctctgcctcccgagttcacgccattctcctgcctcagcctcccgagtagctgggactacaggcgcccgctaccatgcccggcaattttttttgtatttttagtagagacggggtttcaccgtgttagccaggatggtctcaatctcctgatcttgtgatccgcctgcctcagcctcccaaagtgctgggattacaggcgtaagccaccacgccccggccctcttcatttctttttgcctctctgcttccagagcaacataaactccctgtgggcaggaactgggattgttgatttccactgcttccccagggcctgatatctagagtcgaaagaatgcacatctcaaaactatgtcctggttctttttctactttcttgcatattctttttcaggcaggagtgcagtggcacgatctcaattcactgcaacctctgcctcccgggttcaagcaattctccttcctcagcctcctgagtagctgggattacaggcatgcaccaccacacccagctaatctttgtattttcagtagagatggggtttcaccatgttggtcaggctggtctcaaactcctgacctcgtgatccgccggcctctgcctcccaaagtactggtgcatattctttttctgtctttcctgctactccctcttgctcttcccacccctaaactatgtagcctcaaagatcttacctggctgactgctgggctttcaagatagtttctggaagaagtctctaaatctaagccttcaactctcatctctgttctgaatttcagacctggaattctaactgtccacaatacatggctcctcaatatatcttcctgaaattacaaatgaccatacggtacaggtgttactatattacctgtaagaccacactcggtgtcatctcctgcaaactagtcctctcctgactcctctgtttctgtgagtgattctgcgatggcttgaggtcatccgtttgctttgaaagatcacacaccaggatacatacagagatgtgacccggatggatggacctttgcctcacaatcagggtagaagcctctggttttcttatttctttgtcctcctctgtggtgtgacacaggttcaggaggaggtacccagacacagaagagatgctttccctgtgcaggcttgctgacagtcttgcccaccactcctggcctcctccctctacatgtccacattcgctgctctgaccctgagttggacccagctaggaattgtgacttcagttactggtatttcctctgagcctctagtcatggtcatgggctaatctgtatatgaaaacccacttgaaagaaatcccagtgctgaagaaagaattgaaacatacagattgtttctttgctcaagggagtgtggatttcagtgctctcactgagcagaggctgagggtgaccaccttggatcttcctgcaggacacagcccagagaaactgagcctgaatttgctgccatgttttgaggacattatccacgctagtctctttcatctgggccgaggtgggtaattttccttagagtcaagtactagaaaaagttttgcttcttctaagagctggtacattgccctcttgtgaatgagagccatgtatgtgaccacaacaccctttcagttgaccactaagagactgaaggccaattccggatcaactttacagccgcctacggcctgctataccacccatggcatagtttctgtggtctgatgctttattttttattgcattttactaatttatggcatgcatatcatatgagcagtctcaaatcctccccagaacaaggtgaggaatatattaatatttaaaataaaataaacaaaatgtcagtgtg

SEQ ID NO: 757 - DNA, 4681 bp, Homo sapiens
ttgtaaaatagttaagttttaacagtccctcccaaactttgtgttgattattcacttgctaaagagatgtgaggaatcagccttcagttttttggcagtagtatattttggaagtgaagaaattggaacacctgtttctaatttggtcttcatcattaaagacaaaaccaaaacactccaggcagtactgtttatagtgctgagccaggtagcacacagacatagtagcctaaaggctcacataattcgcatgctgaggccagggcagggtaaaaatagccttctgcttctttcaacccagtatcaggaagcactaccccagtgttattatttgttttgtcaaggtaagtctaaataaacaagaaaaacttcttcggaaggcatggcgaagggagtattttaaatgaaaatgattacagaatttgaattagcatgcatctctttgtgtgcaacagtaatccaagaatgtatatgttaccactacaaccatttgtttctaatagttttttcatgttatataacataaatgtatccacaaccttaattaagaactattcttcccccaaaatcatagtcctagtgtcaagaaacatactccagtgtttattgtaaaataacaaccacaccctcaaattgaaaaaagtgaatgtctaggactttattacaacttttcagaataatctgtaatgaaaactcatgcttaaaaatttaatggaaaagactgagccccaaattttgaatagtgattacgccttacttgaagtgctaataaaggtaggagagtacatttgttggaataacagaaatggtgatttcagcctaaaagtttctgagggtaaaggatcacatgaccttcaggaaactctctgcctcctgtaggtgctttcctatctcccccatccttccctaccccttttcccttttccttcctctctttttctctcactgtcactctgtctacacacactggcatcttttgaacactaaaagtaagcactgttttttaaaaaagtaattatttgttggatcagatacttttatcccaagtgaataccttcactgagatgtggccaatgcaatagtttcacagtaaaaacagtgcctataagaaaatagatcacatactatttttcaatgatattaagtgtattttgtaactattttcatttggtccttgtaacatgaaataatacatggaacttacctttataataaaaatggagtgccctggttcatcatagaggtgcatctagtttgcccttaatggaagtatacttgctgtgtggattgatagcaccttcttgaaatggaggagcacagctggcctcatggatgtgcaatttttgcagtcccacagggccttgcatacagaagcaccccgagctcagttgaatgtctgtttgattttttcttatttatttttttgagacacagttccactttgtctttttgtcacccaggatggagttcagtggcacaaacatggctcactgtagcctcgacctccctggctgaagggatcctcccacctcagcctcccaagtaaccgagactacaggcatgtgccagcatgtccagctaatttttgtattttttgtagagacagggtttcaccatgttgcccaggctggtctcaaactcctgggctcaagcgatctgcccacctctgcctcccaaagtgctgggattaaaggcataagccaccatgtccaactgaaattcttaataattaataatttttgagcaagaggtccacactttcattttgcactgggttcccaaacaggtcctgggtaggaaggatggctgaggataaaacaggagttgctttggcctggctgaacagttgaaccaatgatcagagtttcattttatgattgtgttactctgaacagatttgctatttttttccagctacatttagagttcctcatgtatatatcacccctctttttccagtccatctaacctctccttttttttgtgcctagaatcagttctccttgccttcaaaatccctgataagtgtccatttctttttgtatcctttgatgtagaagccacaagaatggctttagcagcttattttaatcttatgaattattcattcaggattttttaaatgattcagatgctttcaatctgttaacagtatttataaaacatgtttcagtgatacaacataggtgaactaaaccaaagatgcaaatgccttggaggaaaagaaattgtattatagagaatcctgagatatatccttttgggttgtttaatttaaagcctatcacaaaacaaagagaattgtcgcactttaattccaacctcctgcagtacttcacaacccttagcataagattctgaaatttgtaataggtggtacctagtttgatgcagggttttgcagcagttgtgcgaatgcctctgcgcaacggcctttcagtcagactaaatgagaaaatccaaactgtcctatcaaaactgacccacaataactgtactctgaggcgaaacagagcaaatgtgggtttcctgttttcattgtaaaacattccaggttctcagattgaagagctacattcagctgatagttgacatctgttccctcacacgtagtggctctcaacacgggctgcactttggaatcacctgaggacctttcggaatcttcggttgaatcatcctggctgtcctggtgatgcttcttatgtgcagctaggctggagaaccactacagggctgacacctggaatgggagcttgtaacttttacaaaataatagatgtttatcatcttttgcaatttttacttttaagtctatactaaaatgagccaaagaagtcttaacaatgatgtatggcacaattggttggttgaggctatcattccatgattacaaataggtggttatgtggggtggttttgcacttgtggcaattggactgcaatttggccttaaaatgacacaattcctcgttctcagatggagaggaattgccttgaaatttgcatgtaccagactaagtgccagtatatatatgactgatattttcgtgactcatagaaggtgtccatggtatagagtttatgcctacatctctatctttattttgggcacacatgagcttttgttaattatttctttgtacttgttagaatctgtttttgaaaaaaaaaaaaaaaacttttgctttgatttgtggtggattcaccttcttaaaataataaatttagaggatattaggaatgacattcaaaacaaatatagtgagaggtgattttttaaaaatttttgttcctggtttccaaattatgtttactttgatttgattatatgttggtatctcccaaatataggttaacttagctatttaaatggtatcttttgacatttaaaaagaattaagtacctgtcaaatcttgcattgaggttgcagttgaataagataaaagcttaggatgtcaaaaaataatatagagaaatattataagattttatgattattgaagtttttgatgcaaaaggaaaatatgctgaatagttcttccaaaaaatattatttccctcaatattttatttgtagccatgtaatttaaagagaacagaaaataactgcaatcaaaagtatggtttaatgtcaatcaaagtggcacaacagaattgataagatctttataacaatcaattggctgatattaaaatattgattttaattgatcttttcaattaaaatctttagggcctgtaactcataaaatcagcatccaccacaatatatggtcattattggtttgtaagcatagatcaccattgactcctacctggagagacatgtctatttctaaaaatccagtagtttctttgcattctcagtagtacacgttgtatatatatatatgtaacaaatttggtagttttcagtatgtgtgatgtcctttgggggttgtttatcttgctggtccataggaggggtacactaccccaagaatcaagacatctgagttctagttctagttctagctctgccactgaagagccaccttacctggggcaagttagccattgtctcccagtcatgtttaccacccatgaaaggactcgtcggtttgatgtttccattaagctcaatgagtaactctaatagttactcttgaatctggattgaaaaacaccatgcatctgatgagataattcataaatgttgccccttttttaaatgatacaaccctaaaagtgactgaattgcccaagtgcttgaacatggcagaggtagttactcttattttgcagtttgtgcacttaaaaattcctacagtgattgttactttactggggaaaaaagatgaggtgaaacttcctcccaaggaattaaaatatctgtagaagccatggcttgcttttataatgtggaaatcatttgatttgctgtaattcacgcagatccctccttttgtcagggggaaatgatttgcatcatgttcttttttcataatgcttttacttcctgtttggatcagttgtatgtaaatgtacatttttgttactttggctgtgcccgttagaaattctatcttccataaagtatttctcccattgagtctaatgatgtatactttgcctaggtctttccaaaattaaatttatgtaaatgtctattttatataaaatatgattaaaataagt

SEQ ID NO: 758 - DNA, 3225 bp, Homo sapiens
ttataaaatctacatattttccctctttctgggatatttactacagtttgagaatccagctttgttggtatctcctttattaagtttagtagcagccttaatgcttgctaagtgccttcagctgaatgtgaagaaaggaagttttgtagctaaaataataaaagtgattaatttttacttggtgtgtactctgacaataacattgaatattataatgaagatgtttgtcccacacaaagaaaatgggcacatgctgaaattccttgaagtaaaatttggactaaatatgaccaagaattttacaatgaattggctcctctgtcaagaatccctgcaggcaccatctcaagatttttttctgcgattgacacagtcttctttattacctttctacattctagtgttaattatttgttttctttctatgttgcaagttacttttaggaggattaatggtaagtccctgaaggaaactgttactcttgaagatggacgaattggagaaagaccagaaataatttatcatgtaattcacactattttattgggttctcttgcaatggttatagaaggcttgaagtacatctggattccttatgtgtgcatgttagcagcatttggtgtatgttctcccgaactttggatgacacttttcaagtggcttcgattaagaactgtacacccaatattgttggctcttattctgagcatggccgtgcctactataataggtctcagcttatggaaagagttttttcccagattaatgacagaattaatggaactacaggaattctatgacccagatacagtggaacttatgacctggataaaaaggcaagctccagttgcagctgtgtttgcagggagtccacagttaatgggtgcgattaaattatgcactggatggatggtgacaagtttgcctctttacaatgatgatgatcttctcaagagaaatgaaaatatctaccaaatctattcaaagcgatctgctgaggatatttataaaatactgacatcttacaaagctaattacctaattgtagaggatgctatctgcaatgaggtgggacccatgagaggctgtagggttaaagatttattagacattgcaaatggccacatggtttgtgaagaaggtgacaagctaacctactcaaaatatgggcgattttgtcatgaggtcaaaattaactattctccatatgtgaattatttcactagagtatactggaacagatcctactttgtatataaaatcaacactgtgatatccttccagtcttgaaaaataacagagccttcatttcaaagactacctgaagtaaaatgcagttttcttctacctactcggtgtcttttgcagatcagagtatggacatttgaaatattgctgcttctttcccccttctgctgttaactggatccagagttctgtgggaaatagaagatcaagcattactgtcctttgattaaatgtgatatctaccactctgcaatattccagacaggtgtcttccttaccgttacatggtctttaacacttttactgattgcaatattttccccataaaatcttcattctattataatattgatcttgaatttgaatatgtgcaaggtcagatacatttctcaaacataacatttaataaataatgtgatataattatttaatagaaagaataattccgaccttcaagcaagtttctgaaggtattttatgatgtataacaactgaagttttacaataaaaactaatttaaatgttagctgaagatatgtggcatttaaattaaaatggaaattatataaaggaaagtgatttttaaggatatacataaagatatatttagaattttcatgatactgttctcctcatctactgcttatgttaagtgagaactttcttagtaatacataatgcatgatgttactgcattttctaaatgactagtaagtgattagttttttcacttatgcctattaatttgataccaatttaatcatgataaaacaataaccgttaacatatattttgttaaatggacatttaaaagaatgttgttcaggttttttttttaaatactgatatggggcatacaatctattcacatgttttctactgaagtactaagtaaaaaaattaaatcattatcagaataaaaatatgtgttctaaaattagcaacaatttctggggatacatgcagatgttgttaaacgtacctctgcatacagatatattataaaacacaagcaatgttatttatgaaactgtgatgcagtcttcaacatcaagaaaaaatgacaactataataaaatttacaacacagtttcacagtctaaatgctatgttcctttaagtattttcatatttttaatcatttattaagaggaaattgtgaaaagttaatttggccttatagagagattcaggatagatgtagcctatagatgtgtcattttaataagttgggatacatgtttagtttttccttatattcctgttcagtgaacagattttcataattctcacttgttaaagtgctgcaaaaattgcattttcagtactctaaattactacattagaagagagcatttctccattgtctttattttctgttatatatgtgttgtaaaagtacactacattagaagggagcttttccgttgtctttattttctgttatacatgtgttgttaaagtacatgcattcttagactaactctcagatgctttgctcttttggagctgaagaattgtttgatggtgatgtcatatatctgatagattagtttcagtggttctcatttcacttttatacgtaatttcttaactatattaagatagttgcaggcagtgtacctcaggttgactctgtacatctgaatagtgagtcactagtattttgcttcaagccttctgaaaatataaccatagttacctaagcacacagtgaatagtcacatggtagtacttgtgattagagcatgtaaaacaatgtaattgaaaagtcagcttccatattttgtaggggaaatagaacaccctactttttatctagtgtgaaatatttaatcgaatttttgttgatttatattatgttacctgtgctgaattaggtttgggacttgtgttttgtttgacatattagtaagttgcttttgcttctttctgtcaacttattttttaaataaaattgatctggaaaaattgtt

SEQ ID NO: 759 - DNA, 3254 bp, Homo sapiens
gtgctagtatagggagggaccgatggtgggcagggccctagaactcccaagagtatatgccctttgtcttttgctaccaggatgggtagggaaggaccatcaggtgggggtagggctgggcatatctgagctcagaccctccttgggcgggtcttgctgtggctgctgtgggggctgggggtgagattcctaggtcactggaattgtgtatgtaggaggattacggctgcctctgctgagtcatgcaggttgtcagggaagccggggaaagccggcagtcacaggcctcacccagctcccacacaaaccgaagggctggtctcactcccaccatgcccccctcaacaacccccagaccgtaagcgatatgaggctgtctgcctcccagctgcataagaaaagggcttggttcttccctagcctgtggagtctgcacatcagatttgcaccctcccccgagttctggccaggaggcttctcaccccgttcaaactgttacaaagttcagctagagatttccttctctctgtgtagttttatcccctgcttctcttccattggatccctgtggttccaggcaggaacggcctgccaggggagcccgcgagctcccagggcctttctgctgcttcctctaccccagtatttcgcttggctctccaaattgactcagctccagattcctcacctattcctacctcttggccttcaatgtgtggcttctgcttgcacccgtgaccctgtgctatgactggcaggtcggcagtattcctctggtagagaccatatgggacatgcggaacttagccaccatctttctggcggttgtgatggccttattgagcctgcactgcttagcagcctttaagagactggagcacaaggaggttttagtcggcttgttgttcctggtgttcccgttcattccagccagcaacctcttcttcagggtgggttttgtggtggcggagagagtcctttacatgcctagcatgggctactgcatcctttttgtgcatggactgagcaagctctgcacttggctgaatcgatgtggggccaccaccctgattgtgtccactgtgttgctgctgttgcttttctcttggaaaactgtgaaacagaatgaaatttggctgtcaagagagtccctattcaggtctggagttcaaactctgccccacaatgccaaggttcactacaactatgccaatttcctgaaggaccaaggtcggaacaaggaagcgatctaccactacagaacagctctcaagttgtatccacgccatgcaagtgcgctcaacaaccttggaacactgacgagagacacagcagaggcaaagatgtactatcagagggctctccagctccatccacagcataaccgggctcttttcaatctggggaatctcctcaagtcccaggagaaaaaggaagaagctatcaccttactgaaggattccatcaaatatggtccagagtttgcagatgcatattcaagcttagcttcgttattggctgagcaggagcggtttaaagaagctgaagaaatataccaaactggaataaagaactgtccagacagctcagatttacacaacaactatggggttttcttagttgatactggcttaccagaaaaggcagtggcccattaccagcaggccatcaaacttagccccagtcatcacgtggccatggtgaacttgggaagactctacaggtcactgggagagaacagcatggctgaagaatggtacaagcgcgccctgcaggtggcacacaaagctgagatattgtcacctttgggagcactgtattacaacactggccgatacgaagaggctttgcagatttaccaggaagctgcagcacttcagccttctcagagggagctccgcttggcactggctcaggttttggccgtgatgggtcagacaaaagaagctgaaaagatgaccaatcacattgtgtcagaggagaccggatgccttgaatgctatcgcctcttgtcagccatctatagcaagcaggagaaccacgacaaggcacttgatgctatagacaaggctctccagctgaaaccaaaggacccaaaagtcatttctgaactttttttcacaaaaggaaaccaattaagagagcagaaccttctcgacaaagcttttgagagctatagagtggctgtgcaactaaacccagaccaagcacaggcctggatgaacatgggtggcatccaacacatcaagggaaaatatgtgtctgcaagagcttattatgagagagccttacagctggttccagacagcaaactgctgaaggaaaatcttgccaaattggatcgcctagaaaaacgattacaagaagttcgagaaaaggatcaaacatagcaccaccgtctgacccaacctcataggataatgtggtgcctctgaaaggggagtgatggaagccttgctttcacatcagcaggggcacaactaatgagattttctctcattccgagttcagggtgacacattttgggacatctgctggtagcccagtgctgaaggacttgcttttccatgaagaagacgaaaacagcaaacaagggcaagaaggtctgagagggaaggagaatgatatttacacattttacagatttttgtttggtttaactccagatttctcttgatatatctctgtgcttttgagacctggagatctaattctgtttagacattttttgtcccagaaatacagaagcttgaaatgctatgaaggcagagcttctattctttatgggatgaaatatttcaaaagaggataaatcctctgtggtaagccatttggaaaatcctaccaagaattggcttatttaattttccagaaccaggaatgagtatctaatagcttttgtagaaccttccagaatatgtggggaaaaagggctattgctaagtgagctttatctaatatcctcctaagagttttactagtgcttttttgaggaattacagggaagctcctggaattgtacatggatatctttatccctagggggaaatcaaggagctgggcacccctaattctttatggaagtgtttaaaactattttaattttattacaagtattactagagtagtggttctactctaagatttcaaaagtgcatttaaaatcatacatgttcccgcctgcaaatatattgttattttggtggagaaaaaaatagtatattctacataaaaaattaaagatattaactaag

SEQ ID NO: 760 - DNA, 1949 bp, Homo sapiens
tccctccgctccagttcgtcggggcgggcgcggcggcggcggcggcggcggcggcgaaggaggagcgcggccggggcgatgcggcgctacctgcgcgtcgtggtgctgtgtgtggcctgcggcttctgctcgctcctttacgctttcagccagctcgccgtgtccctggaagaaggaacgggcggcggtggcgggaagccgcaggccgcggtggcttcctggctcgcgggcggcggacgcggcgccgtgagaggcgccggcgtcgcgggccccgcagcgcatcccggcgtgtcggacaggtacagtctgaaaatacagcctgttgagaaaatgcatctagctgtagttgcctgtggtgaaagactggaagaaactatgaccatgttgaagtcagctatcattttcagcatcaaacctcttcaattccatatttttgctgaagatcagctacatcatagctttaaaggcagacttgacaactggtcatttctacaaacatttaattatacgttataccccataacctttccaagtgagaatgcagcagagtggaaaaaactctttaaaccatgtgcttcgcagagattgttcttgccgttaatcctgaaagaagttgactcactattgtatgtcgacactgatatcctttttttacgaccagttgatgatatttggtctttactaaagaaatttaattccacacaaattgctgcaatggcaccagaacatgaggaacctcgaataggatggtataatcgctttgctaggcatccatattatggaaaaactggagtaaactctggagttatgttgatgaacatgactcgaatgagaaggaagtatttcaagaatgatatgacaactgtacgactacaatggggagatatacttatgccattgcttaaaaaatacaaactaaacatcacatggggtgatcaagatctattgaatatcgtgttttttcataatccagaaagcctttttgtttttccgtgtcaatggaattatcgaccagatcattgtatatatggaagcaattgccaagaagcagaagaaggaggaatctttattcttcatgggaacagaggtgtttaccatgacgataagcaaccagcatttagagctgtttatgaagcactgagaaattgttcttttgaagatgacaacatccgttccttattaaaacctttagaactggaactacaaaaaacagtgcatacatactgtggaaaaatttacaaaatatttatcaaacaactagcaaaaagtgtaagagatcgttatgccagatcaccaaaggaaaagtgattcttggtgactgcttaatcaaatggatgaaaacaaagaatcagaagataagtgtgaaggaatcgtcttggatgaagtattcaggaaggaattactcatctccagaataattttttttttcctaaagaagttaagtaagcagtactttcaggtaatgaagaataagttaaaatcttgggcctcaacattgaacattttttatctctgatgttttgtaatgttacttgctatcattccagtattgatgaaaatactattgaatgggtttaacctgcagacttctgttgactcatactctcaagagtggtaggggtgtgtagatggagaaaatgtacctcaaacagtgccaacactcaagactgtgagtagagcaataattttatgtcagcactaacctcactttaaaagtgtgagaaaaaagtttgtttacaggagcagaaacaggtctgttgtttctgaagaaatgtgatgtaactgatgtaaccattgacaatctatgtgtgcctttatacatttcatctctgttttaaaatatttttatgacaatcatgtttaaaattatttttagattacaagtaagctgcatgttaaaaattgagctgtgtaaggtagaggaaaaatagtgaaaactttgggatttt

SEQ ID NO: 761 - DNA, 2116 bp, Homo sapiens
acactgactaaagatattggaagagtgaagatcagagaattttaagtctgaaatttggcatcactgccctgaacaatataaccttagttggcataaactactcatacagacaaaggcattatccatcacaataagtaactttttgtctttatttcaaccggacaatcgtgattagaaaagctcctgtgacaaaattcaagaaaacctgacataaatgaacaacaatacaacatgtattcaaccatctatgatctcttccatggctttaccaatcatttacatcctcctttgtattgttggtgtttttggaaacactctctctcaatggatatttttaacaaaaataggtaaaaaaacatcaacgcacatctacctgtcacaccttgtgactgcaaacttacttgtgtgcagtgccatgcctttcatgagtatctatttcctgaaaggtttccaatgggaatatcaatctgctcaatgcagagtggtcaattttctgggaactctatccatgcatgcaagtatgtttgtcagtctcttaattttaagttggattgccataagccgctatgctaccttaatgcaaaaggattcctcgcaagagactacttcatgctatgagaaaatattttatggccatttactgaaaaaatttcgccagcccaactttgctagaaaactatgcatttacatatggggagttgtactgggcataatcattccagttaccgtatactactcagtcatagaggctacagaaggagaagagagcctatgctacaatcggcagatggaactaggagccatgatctctcagattgcaggtctcattggaaccacatttattggattttcctttttagtagtactaacatcatactactcttttgtaagccatctgagaaaaataagaacctgtacgtccattatggagaaagatttgacttacagttctgtgaaaagacatcttttggtcatccagattctactaatagtttgcttccttccttatagtatttttaaacccattttttatgttctacaccaaagagataactgtcagcaattgaattatttaatagaaacaaaaaacattctcacctgtcttgcttcggccagaagtagcacagaccccattatatttcttttattagacaaaacattcaagaagacactatataatctctttacaaagtctaattcagcacatatgcaatcatatggttgacttttgaatggaaaaccccacaatattaagaaaagcattcatgtgactttattagggacactaaactacatcattaacatgtcacagcttggttgacaataatcaccaagaaaatctctttggtttttaaaaataaataaacatatattcataaaactcaaaaaacagttatactgaacgttgagatggcagaaactttcagaagcaaaaattaagcatattgaaaggatcccactcatatgaaactaacaggctgttttctgtttaaactcaactgtgagtgcttctgttcagaacacgttatttcatgactaggataaagaagcaaatggtttatgacttgtctgctttctggtagttagaatacaagggtcaatctatggctagtgtttattggtaattttaaaatctttaaaaataagtagctgggcacagtggcttacgcctgtaatcccagcactttgggaggctgaggcaggagaatcgcttgagcccgggacggaggttgcagtgagcggagatcgtgccactgcactacagcctgggaggcagagcgagactctgtctcataaaacaaaacaaaaaaataaaaataagtaaaaaaataaataagaaatatcctcattcacatcttacctaaatgcatgaataatacagtgaaaaaaatccaaggttttataaacatattatttatttgaaattatctggctcatgttattggggagaagcaatattcattgaccatatttttaaagcagatgatacttataaaaatgcttaaatatttggattaggctttgtcaaagtaaaaagctatgtcattatatgcccatcttcatcacattgagcatattttcttctgtattcaatataaataatgttattagtgac

SEQ ID NO: 762 - DNA, 1880 bp, Homo sapiens
attagacagcacactgctgactgttttcagttgtttctgtaacagcagaaagtgcactcactaggagtagtcagaattcaaaatgctgaagagaaagccatccaatgtttcagagaaggagaaacatcaaaaaccaaagcgaagcagcagttttgggaatttcgatcgttttcggaataattctttatcaaaaccagatgattcaactgaggcacatgaaggagatcccacaaatggaagtggagaacaaagtaaaacttcaaataatggaggcggtttgggtaaaaaaatgagagctatttcatggacaatgaagaaaaaagtgggtaaaaagtacatcaaagccctttctgaggaaaaggatgaggaagatggagagaatgcccacccatatggaaacagtgaccctgtgattgggacccacacagagaaggtgtccctcaaagccagtgactccatggatagtctctacagtggacagagctcatcaagtggcataacaagctgttcagatggtacaagtaaccgggacagctttcgactggatgacgatggcccctattcaggaccattctgtggccgtgccagagtgcatacggatttcacgccaagtccctatgacactgactccctcaaaatcaagaaaggagacatcatagacattatttgcaaaacaccaatggggatgtggacagggatgttgaacaataaagtgggaaacttcaaattcatttatgtggatgtcatctcagaagaggaagcagcccccaagaaaataaaggcaaaccgaaggagtaacagcaaaaaatccaagactctgcaggagttcctagagaggattcatctgcaggaatacacctcaacacttttgctcaatggttatgagactctagaagatttaaaagatataaaagagagtcacctcattgaattaaatattgaaaacccagatgacagaagaaggttactatcagctgctgaaaacttccttgaagaagaaattattcaagagcaagaaaatgaacctgagcccctatccttgagctcagacatctccttaaataagtcacagttagatgactgcccaagggactctggttgctatatctcatcaggaaattcagataatggcaaagaggatctggagtctgaaaatctgtctgacatggtacataagattattatcacagagccaagtgactgaacacgcattcccaactatatatctacagatgcattccattttaactcttcttgagctaaaacgtcaaataggagaggaagataagataaatatttgtaaataaaacctaaagtttaaatgttttaatctgaataattgtacataaaattttgtatctctaacattccaaattactgtcaataaaatatatatttattattttaaatgctatgtgttaatatttcacttgcttgtattagaaaggcaaaatgtaagactttggtatgtgtgacatatgctttatttggctttattttacaagtacagtatctgcaaaaaacaaagtaaccttttttcatacctgccagttttgaatttatatatgttattgaacaaatagtaatagaggattcgctgttgaaacaagttgtccaagcaatgttatattcatttttatacttattgggaaagtgtgagttaatattggacacattttatcctgatccacagtggagttttagtaattatattttgttgatttcttcattttgttctctggtataaaagtagagataatgtgtagtcacttctgatttagtgaaaccaattgtaataattgtggaaatgttttgtctttaagtgtaaatattttaaaatttgacataccctaatgttaataataaaaagaactatttgc

SEQ ID NO: 763 - DNA, 3204 bp, Homo sapiens
atgtttatttttgaagcacttctgcaaaacagattttctgtgggcttcccggtgtcagggccgaccttcagacagacctttcctgagaggcagctgcaggagtcacatgggagaagccacctccaagcagagtctcctgagaagctgctgaaaggcctgccacatcgagaaaagcagctcctaaaataaggggaagcaggacgggctccagcagagccggggttggggagcacttccctccggaggcactggccgcctccagtctgtctccagacgccactctcacctgcacgctgcatctcatcagggagcttctctgccaaaatctggcctaaagagggtgggaggggaggggggtgagcttccaggatggggcgtggagctctcctgctgtggaagtatcttcaacgaacactccacggttctgacagagattgccaccaccttcccccgactgtcctgagctcatctggatctttctgtctctgaaaagatgctgaaatcccagagtcacttcctagcctggttgtaaattgtgtcttcctgtgaatttgttaaaacaccctaggaaagacagtttccaaatacaggcagccttgtgtggttatgcctgatttctgggataatcctctgaggttttcctggtgggcatgcatcacacagaaggtccacatggaacccgccctttgagaccaggcatcttgatgcagaaaactcatgccactttcctcagaatcgcactcacaaacacgcagagggacgtgaagggatggacgtccttccacacgccagccgatgcagagttgggggtggcatcacacagacccggctctgtcctccaggctcggccactcctagctgtgcgactttgggcagggaaacagaaggcaggaaaggagctctcttgcacttgcttcttaattgtcttcagcccaacaattcttcatatttcggggaggcacattctggtctccagaaacagctagaagacacagcagctacacacgcagccacactaaatctgtttgggtcatcatccatggaaataatcgtagagatctcttagcctcttctagcaaaaggagtgctcgcccgccttctcaggatgtaagttaacgagcaaggacttggctccagagcctcggacaggccctagcacacagccagtccgcagcagatgtctgctgaatgaacggtgaatgaacaaacgtgctgagaaacacacgcggggtctgaaaagtgcgctcgagcctggaacccgaggccccgctgacgagctggccactcacgcaaaacatactggcatcgaggtcagaagacaacacacgcacatcagaacggggaggcctttctctgaagggccacagggcacagcgaccaggctctgacagaggggactgtgcagcacggagcagcaaactgagaagccagcagcggcggctgggggcagacacagcaggacgggtgggggcggacacaggctccgccaccgacaggggaccctcgtgtgactctctgtgaccctgagcaagtctctccacctcccttgcctcggtttccagaagtttaaatggagatggcctcagaggctgctcgccgggtggctgtgatgagcaccggaaaagccaccacacacccggggtccccggttatgctggcgcctcacgccacactgctttatcaccgattgcaagtctgcagccacgcacataggaacaacggcagggcactgaatcctgcaggataaacagatccaaggaggcacccctgccagaggaggcactccaggcaccccaccagaaccaggggttgtgaggaaccgaagggccgtgcgggcaatggagctggagcaacagactctcagggaaggttaaggagaaatggcagactggacggagggaggtgcacctgctgaactacgatgcgtctagagaagaggcatcaatgggggctgagcctcatcccggttatgcgaccgcagtgacgtgggcctccataggtactgagccgtctgagatgactcctacacaagagcaaaggccaacatcagaaaggacggccaaggggcactgaccaggcacacgctcagcctcactgcggcctcttcctcgctctgcacctgggagcctgccttcaaggaacggaagctgccctccaatcaagctgtgctcctgcatctccgcagagcgagggcttcctttagagatatccagacacatgcattttcttttccttttctttttttttttttgagatggagtctcactctgtcgccaggctggagtgcagtagcatgacctcagctcactcactgcaacctccgcttcctgggttcaagcgattcttctgcctcagcctcccaagtagctgggactacaggtacacgccaccatgcccagctaatttttgtatttttagtagagacggtttcaccatgttggccaggatagtctcgatctcttgacctcatgatccgcctgcctcagactcccaaagtgttgggattacaggtgtgagccactgcgcccagcccacgttttctttaggatgctgggaggtgcagagccgtgaggaggtggagcgaatgccacagatgttacagctccgtgctctgtggcgcaggcctttgttttgatgacaaataccagggtttgggtaccactgtgaaggaaacggaagatctccgtgctgtgtgcaggttccctggggtggcctctgaacctctcacattcccccttggctgcacgtctgcaatttcatctcagaaccaagcctcctccacccctaccaatccggatgagctaaggaggccttgctggggtgcacatcgaacacgaaggggacccggtgcccgtcttccctctgcccgtggggggaccttaatgagaggcgcccgggcataaggacccccgtgcagcaccgtgcgccctggcgtggcgcgcacgggaacgctgaggtggctgtgctcgggcaggcaggggtgatctgctaggtggcggcggtcccccgtttccgccaatcactcacctccccctcgctcggcgatctctcgggttttgcttccacctcttcatttctaaatcagcgtctagtgcctcgttactcatctcagcagtgactggcagacgttaatgaattactgattttcacctttaccagccaatattgtatatttatgttggaaagaaaggtattttttgaatc

SEQ ID NO: 764 - DNA, 2279 bp, Homo sapiens
tggagagtgcctgcattcctgcccatccgggtactatggacaccgagccccagatatgaacagatgtgcaagatgcagaatagaaaactgtgattcttgctttagcaaagacttttgtaccaagtgcaaagtaggcttttatttgcatagaggccgttgctttgatgaatgtccagatggttttgcaccattagaagaaaccatggaatgtgtggaaggatgtgaagttggtcattggagcgaatggggaacttgtagcagaaataatcgcacatgtggatttaaatggggtctggaaaccagaacacggcaaattgttaaaaagccagtgaaagacacaatactgtgtccaaccattgctgaatccaggagatgcaagatgacaatgaggcattgtccaggagggaagagaacaccaaaggcgaaggagaagaggaacaagaaaaagaaaaggaagctgatagaaagggcccaggagcaacacagcgtcttcctagctacagacagagctaaccaataaaacaagagatccggtagatttttaggggtttttgtttttgcaaatgtgcacaaagctactctccactcctgcacactggtgtgcagcctttgtgctgctctgcccagtatctgttcccagtaacatggtgaaaggaagcaccaccagcatggcccctgtgttatttatgctttgatttgaatctggagactgtgaaggcaggagtaagtgcacagcccgtgacttggctcagtgtgtgctgagagaatccgtccccggcaccatggacatgctagaggtgtgaggctgcagaacaccgctggaggacggacttgtgcctatttatgtgaaagaagatgcttggcaggcaatgcgctactcactcgtgacctttatttctcacattgtgcattttcaaggatatgtttgtgtggatatctgcttagtgttaccacatggtattctcagcatgttaccttcacactgttgtgcgatgaaactgcttttagctgaggatatgctctggaaattcctgctcagtttcactgcagccctaatatgtacatatactgcaggagctacatataaagctcttatttactgtatatttatgctttcttgtgggtaacaagtcatacctgattaatatgatgccactttgtttctagtggttcctaacccattgtctgataaatgacttttctagtttggggaattgacacttgttttgttgcctcttgaaactttttttttttcccctcattgtgggcttatttctcattgtaagggtaggataaactagtttttgtatatagagtcaaatgaccagtgtcaaagagtttgcatattgggtagaccttctccactccacatgtcccacacatatagataaagcagcaggcggcatctggcaatcagaagcccaaactgcctttgagtctaagatgtgatgactttgatgaaacacaactgaaaacatgagggactatatccagtcacttgtagccagtttcacaggccagctacagaattgtccaaacaaacattatttctgactgcaattttttttcccccaaatttaaagcaatccctggctttaaatgacaaggcacctaccaatgttcttgggtcactgaagaagctactaccatgagcctgtgcatagaattttaggagataaaaggatgaatttctgtgactgccagtcagatcttaacaggtttctgttgagccagaatctgtttcagatccaagatggagaggaacactatggaaacttcccaggtgactttcagagcagttgtttcaaacacatcattgtccttttaggggaaccagtttttagaaggttgtgaattggctttttcacaaagcatgattatcttcctggctgatccaggagaaaattagaacagaaaaataatggttgtggattttgaaacaaagcaaggtaaagccttttttttttcaccttgcattggcaaaactacctcttcagtgtttttaacttttgattcaaaagcatcttaccaataaggataaatatcatatacatcgttatgaaaatattgctatgagataataagccacatatgaatgttgtatacaactttagggtttacatttaatcctgaagtgttacctcctttcatgtctatttacactattttcccatttactaagtggggagggggtctccttatatagtgcttcatcgttaataagtcaatacctgttgttcctgggatgttcttttttgtgcattaaaaacttcaaaatt

SEQ ID NO: 765 - DNA, 2118 bp, Homo sapiens
aacaaaaaggcctagttatagatcctaataaaccatctttgccacagtacggcacaccaactagagctctcaccactattcctggctgggagacctcacaggcccatgtccaccactttcctcaactgccctctggccatgctgctcatctgggcctagtacagaagcagtgtggctttggggcccatcctgatttctatgaaatactgatcagaaaacttttaatttctttgcaggaaattgaaaaattggagcacaaattgaaccaagcccctgagaagtggcagcagctgtgggaaagggtaaccgtggaccttaaagaagaaccaagaacagatcgctcccaaagacacctgtcgagatccccaggaattgtgtctaccaacctaccttcctatcagaagaggtctctgctacatctcccagacagcagcatgggggaggaacagaattccagcatctccccatccaatggagtggagcgaagagcagccacgctctatagccagtatacatccaagaatgatgaagacaggtcctttgagggaacactttataaaagaggggctttgctgaaaggttggaagccccgttggtttgttttggatgtaacaaaacatcagctgcgctactatgactcaggtgaggacacaagctgtaaaggccacattgatctggctgaagtagaaatggtcatccctgctggccccagcatgggagccccaaagcacacaagtgacaaggctttctttgatctcaagaccagcaaacgtgtgtataacttctgcgcccaggatggacagagtgcccagcaatggatggacaagatccagagttgtatctctgatgcctgatgcccatggtcaacccacgcagaagaaacagaagaactcatgctgccagatagatagaaaaagaagcatggatccttgaggagctgacaacaagttatcccagggcctgaggttctcctgcccagtcccctcttgcaggggttgctatatctacttaacctgaataggtgtttcacacaggtctggtcaacagccccatgcactccctgtatcttgcactaaatttttctaacagggtcttagtggttaatgatcagaagatgtctcctgagccaactgtgaacctcacccaggcaaaatggctaccacctacttgggtccttcttcatgaaagctatagatccttttttgttctctgaggtcataatttcctcggagacctgtttaacaagcaaaaatcaaaaccctccaagattgtctcatattctacctggactaggtttcctatgagagacatctacttgtaatgcctgacctttgagatgctcagttctctggtgctgccaaaagatgtttccatggtccgtgctctgccagtggggttcacaacaagagacgtcattgttcagtagcaggcaaagagggagcacacagcattattctgatggaaaaagattatccagggaatggtacaacaatgaccagcccaatgcaggaaaacactacttccaaaacactgaattctctagaccagaggtgctctgaggatccagggccttgtgttcttatgtatcttctgcttcctgacagcttctttttcaaaataacatgcaaaaaaagctgaatgcactaactcacaaaacaaacacttgcactgaattcccaatgaagtgaagatgttggaaagacagaggccagctatttaggaccatacgcacctgtgacaagggctgtgttgaccacagtcacactgtggcatgactggatacccaaactacacttctacacatgaaaagtaagaactgtctttagattttctttactttgataacttgtgattgtttagcttaagacccaagaaatgctgtttgctcatggtaaacagaaacagcatcttcgctacaaccactgacaccagctggcgtcataggtagctagatcattgcatttgttttgaaatgttaatatgttaaatactaaactaatatttcaaaaatgtgtatatatgatttctatatccttgtttttcagatagcctgcttataatttaatataaattaactgatgcattcataagatttcaataatgaaatggttccctttt

SEQ ID NO: 766 - DNA, 2688 bp, Homo sapiens
aagttgcaaaccttagcggtgggtctcaaggggaattcagctgccttgctcagaatgaggcaggggtgctcctgcagaaggcatctttagtgatccaagattactggtggtctgtggacagactggcaacctgctcagcctcctgtggtaaccggggggttcagcagccccgcttgaggtgcctgctgaacagcacggaggtcaaccctgcccactgcgcagggaaggttcgccctgcggtgcagcccatcgcgtgcaaccggagagactgcccttctcggtggatggtgacctcctggtctgcctgtacccggagctgtgggggaggtgtccagacccgcagggtgacctgtcaaaagctgaaagcctctgggatctccacccctgtgtccaatgacatgtgcacccaggtcgccaagcggcctgtggacacccaggcctgtaaccagcagctgtgtgtggagtgggccttctccagctggggccagtgcaatgggccttgcatcgggcctcacctagctgtgcaacacagacaagtcttctgccagacacgggatggcatcaccttaccatcagagcagtgcagtgctcttccgaggcctgtgagcacccagaactgctggtcagaggcctgcagtgtacactggagagtcagcctgtggaccctgtgcacagctacctgtggcaactacggcttccagtcccggcgtgtggagtgtgtgcatgcccgcaccaacaaggcagtgcctgagcacctgtgctcctgggggccccggcctgccaactggcagcgctgcaacatcaccccatgtgaaaacatggagtgcagagacaccaccaggtactgcgagaaggtgaaacagctgaaactctgccaactcagccagtttaaatctcgctgctgtggaacttgtggcaaagcgtgaagatagggtgtggggaaaaactctaccctggccacacgaaggactcacgcaaccacctcggacagaacctaagctttcttcattttatttatttatttccccctccccactccacacacacccttccaacctcctccacctccaccttcaagcataaggacgtccgcgtgttttctctttcagttagctggaggacaggatgttgggaaaggaaaggacagatgtctaaaggaggttgcagagcaggccaggcagacagtgggggctcccttgaagagcttcctccctcccaaacctgggtctcaaagacctagaaagaggcaggcacagcccctgcggacagcagggagccagaaggtttgtagcctattggtgcaaacattgggcaaattcctgtgtctttcctagaagcgcactatcacaaacacaggagtgttttgctcctttgtctcctcttccccatctatgtccctttagtcacagttaggacaaatggggaggggacaccatgctgaggcagaaactagcccagaactcactcagttcttctagtgggtgagtgcagagagagaagaactcagatcaccagtagggagaggtaaaaaagcaaacaaagcaggctctaaggcacacaacattgcagaaaatgaggaagggaggggagggaagggacagaagcaaaaaggagcctgtggtgttccccagtggggcagggtgagcaggggcttccaggctgcatgaggctcatggaccagctctgatcccatgcatgtgcgcatgctcagagccctgctgcccacaacagagcactgcgctgcgtgggagtccccacttcccaggctatcagagtcaacgtcctgcctgtgcagctgcagcaaagccagtgagaggtgggtctcgccatgcagtaaggccaccctggcacctctttatctaaatccgaagtcccctagccccgcactaactaactgctgctgtgggccagggccattttgagcatgaatggcccaggttttttgccttctaggacctttgctgctccaccgaagggccagggactatggttaacttatcaacatcaacccattaactagtcactgtgccagagagtatctgtcaggctgtcaggctgtcaggttgtagcaacctcttcattccagagctagcccagggaccggggtgggacaatgggtttatgcgtgtccacagtacaccctccctctcccagcctccaccccagggtctgcaggtcctccggcatgtagtatttatctagcaaggcggggtggtggaggcagcaccctggcaaagcagctcacacactgcagccacactcatcagctgtggtgaggcggctggagcaaagtcaaagtcatgcagcaaaatgaaaactctgggactcttcggcaaaatcctcattaagccgagcagctttggccaagtaatttttgcctccttccctcgcgtggcctgagtttaggagcaagggtggccagagtcccttacccacagataagcctcccctcatgaaatgccactcaccccgggctaccattgacatcagggctgcatttccagccagcctggaagtaaaatttgagaggaagacaatattaatctgtgtccccacctagtgagctgtggacaggtttaagttgggtctccttcttcttcaccacaaaaacaggctctaagaaatcatgttactaaaaaatcagtgtaaagtctgtttaaaataaaaaagaatgttttctatgtctgt

SEQ ID NO: 767 - DNA, 2859 bp, Homo sapiens
ctctgggcggctgctgccgctgccgctgctgctgctgcgggggtcgggcggcggccaggggatttgggcaggcaccgtggatccccgggaaggggacgagttgacagatgtgcgtgaggaggtctctggtcggcctcaccttttgtacctgctacctggcttcttacctcacgaacaagtatgtgctgtctgtcttgaaatttacctaccctacattattccaaggatctcatgttcttgtgtggcttcctgcttcagtgctgtttgtgggtataatctatgctgggtccagagcattgtccagactggccattcctgtgtttctcactttgcataatgtagctgaagttatcatctgtgggtaccagaagtgttttcagaaagagaaaacatctcctgcaaagatctgtaggttgcaccttgaaagaacaagacaaaaccaaacttcaagactatcctcctgtttaaaaggagactagcaggtgtcaaagagaggcggtaaagctcatgatacctgatgtaatcagtgccctcctcctcctggccgcagcaggatgccttcccttcaatgactcccaggtgatctcttcagcgtcctggacttcccattcctgtacttctacagattccatggtagctgctgtgccagtggatttttgggattctttctcatgttcagtacagtgaagctaaaaaaccttctggccccagggcagtgtgcagcctggattttctttgctaagataatcacagctggcttatcaatattgctgtttgatgcgatcctgaccagtgcaaccacgggatgcctcctgctcggtgcgcttggagaggccttgctggttttctcagagcggaagagctcctgaacaagacggtcaagagaaagactcacaggctgctgcgggagaacagcttgtacacctgtgtacgagcccctggtctcatagctccctgttggatgtgtcagaaagaggaatgcaaggacagtgaggccaggtgggcagtgccatcaccctcacccaagtgaatgtggtggtggctgatgaggccgaggccctggtgcttcaaggagcaccctttctgggggtctgcaggtcactgcagaggagcggtctgttacatcttcccatttggagaacctctctcaaccgtgctgtagctggttctgcagaaacaggaagtacaggatttcatgggctggctctgctcgcctcgactgagcttcacacctctggatgccacatgctctctcccaaacactgctttcagtgcaaggtagtgggcctaaggggtttggttgtcttttttttttttcatttttaaaattttaaatttttatttattattattttttagagacaaggcctcgctctatcgcctaggctgaagcacagtggtgcgatcacagctcgctacagccttgacctcctaggatcaagccatcctcctgcctcagcatccacagtagctgatgtgcaccaccagacccgtctcattttttctatttttattattttagagatggggatctcactgtgttggccaggctggtctcaaactcctgggctcaagcaatcctcccaccttggcctcaaagtattgagattacaggcatgagccactgcacccggcctttctcatttttatttttaaattgacagacgtaacagtgcgcatttatcacgcacaacacaatgctttgggaatggttaaatctagctcacaaatgcattacctcacacggttgtcatttttgtggtgaggcttggttgtatgttttgtttcattcatgtttttacatccttggagtctcctctgggtccgtcctttctttgctgtcatgctggcttgcctaaggcccaccgccacctgcgtacgagcattttaaactctagagtgagtgacagcctttttatggttggtgttactatttatttcctgcctctaaacttctcgtggtccttataaacttgtcaggatgtgtgttgcgttgaattctgcatgtcctttttttgcccaccctcaggttaagctggtactaacttatccccagaggaaacagggtttatgagcactgacagatgtcttccctgggcaaaaaaaaaaaaaatagtatatgtatacacacacacatacacatttatatttatatttcttaaagcttttagtccctttcattccctgatatctcagagatttcaaatcattgaacactgaagtatatttttcaggccagatgaaaaattgtattaaaaccctattcctggtcaggcgcagtggctcacgcctataatcccagcactttgggaggccgaagtaagcagatcacctgaggtcgggagttcaagacaaacctggccaacatggtgaaaccctgtctctactaaaactacaaaaaaattagcctgatgtggtgttgtgtgcctgtagtcccagctacttaggaggctgaggtaggagaattgcttgaacctgggaggcggaggttgcagtgagccaaaattacgccactgcactccagcctgggcaacagagcgagacagtctcaaaaacaacagcaacaacaaaaaccctattccttgcctttgtaggagtcaaaataaatgaacttcttttttcttttttttattattatactttaagttctggggtacacgtgcagaatgtgcaggtttgttacataggtatgcacgtgccatggtggtttgctgcacccatcaacctgtcacctacattaggtatttcccctaatgttatccctcccctagccctccatcccctgacaggccctggtgtgtgatgttcccctccctatgtccatgtgttctcattgctccaaaataaatgaatttacac

SEQ ID NO: 768 - DNA, 2394 bp, Homo sapiens
cttcttcccggggctcttcgcgctctgcacctgggcgctgcgccgctcccagcccggatggagccgcaccgactgcgtgatgatcagcaccaggtaccggcgccgccgagacgccccccgaggcccggggcgctgcccaccgcaccccacccggccgcggggcccagggcggaaaaggggggcggcaggaagcccgggggctgctccctccgcgtcccggcggcccgagtttccgaagcccctccgcgtcctcccctggcgggagcggggccggggcgggcgggaatggccgatgagcctccggagcccgctccccacatctgcctgcggctggggagagtcaggccgaagggccgggccgggccgggctccctgcggtcctcggaccggactgagcgcgcgcgctgttctcctctccgcccgcgctaggctggtttcctcggtgcacgccgtgctggccaccggctcggggatcgtcatcattcgctcctgcgacgacgtgatcaccggcaggcactggcttgcccgggaatatgtgtggtttctgattccatacatgatctatgactcgtacgccatgtacctctgtgaatggtgccgaaccagagaccagaaccgtgcgccctccctcactcttcgaaacttcctaagtcgaaaccgcctcatgatcacacatcatgcggtcattctctttgtccttgtgccagtcgcacagaggctccggggagaccttggggacttctttgtcggctgcatcttcacggcagaactgagcactccgtttgtgtcgctgggcagggttctgattcagctaaagcagcagcacacccttctgtacaaggtgaatggaatcctcacgctggccaccttcctttcctgccggatccttctcttccccttcatgtactggtcctatggccgccagcagggactaagcctgctccaagtacccttcagcatcccattctactgcaacgtggccaatgccttcctcgtagctcctcagatctactggttctgtctgctgtgcaggaaggcagtccggctctttgacactccccaagccaaaaaggatggctaaatgctcctgggagtcaggcgcagcctcacaccagctgcctcctccactcagcattccatggaccaaattgtgccctgggtagcctcagactttgggtattgataagccgatggatttgagtttttctaaagaatattcatattacctccttcttctaacttgccctatttgcaaacgcacttttgtagtaacaactattgggtcctgtcagacctccacggacagcaaagtggttttaatgcaagcccaaggatccttcttaaggtcttatctcaagagctctgggaggtggaagcatggggtgggatcggtggaccagggtggtaagtgtctgcacatctgcctgtccctgtatcagcggctacccaccttccaaaccactcaggacagtacccgtggcactgggcccgcagaagcaagggatgacttggttcttggaagtaatgtcgtcttgtgacattggcctgggacaatcattgtgggtaggtagttattgatcgtttactagataacccattggttctttgcctcatcctctcatccatgggtcagagttgaattcttatgtctatagacttccaatcagaagtctcactggtggggctgggggtgggggcaggcaggaggcatggatgggaacctgagtaggtagtgtggccaagagatcagcacaacctttgcaggctgacttgctaagtctgacagtgacaaacttgtgagcttactgcagtcagtcacagaggctgttctttttcacacaccccttcatgcccggctttccccatatccacatgcagagggcgagctcataaaactacagggaagcgtgaaatgatggctttggtagctgtttactgggtaaccccactgtgacactgtccttttcatgtgatgtggaaacctacttctgtcctccaaaccatgaaatgtgtcatctagactgcagagtacttgagtgctttgcctcccgatatgccagagcttgtggtccaaagcccattcctgtgtgtccgtcctgccatttagccacagaaggctgcggagtgaggcggcagctagcctggccagtggctgtcccgtggaccgacacctgcgcccccttctgcaagcaggattttctggtgccaacactcattcatcattcccgatcaactaggatgaatttaagactgtgctaccatgtgttctcaagtggtagtttaaaaagtggatttttaaagtgcctttcaattgtctgtgaacgtctaaaggactgatttgtctcattttgactgttgagtctttaatgggtgccatttaaaaaacaaaatgct

SEQ ID NO: 769 - DNA, 2432 bp, Homo sapiens
tgtaaccagcgtgcagttttctccacatggaaacttattggcgtctgcctcacgagacagaaccgtgagactctggattcctgataagagaggaaaattctcagaatttaaagctcatacagctccagttcgaagtgtagacttttcagctgatggccagtttctagctacagcttctgaagacaaatccataaaagtatggagcatgtatcgccagcgcttcctgtattccttgtatcgacatacacactgggtacgctgtgccaaattttcacccgatggaagactaattgtgtcatgtagtgaggataaaactattaaaatttgggataccacaaataagcaatgtgttaataacttctcagattccgttggggacctgtctttactgtttcattttcaaaaggtggagagctatttgcatcaggaggtgcagacacacaggtcttattatggaggactaactttgatgaattgcattgtaaaggtcttaccaaaagaaatctcaaaagattacattttgattcaccaccacatcttcttgatatctacccaagaacaccacatccccatgaggaaaaagttgagactgtagaaattaatccaaagcttgaggtaatcgatttgcagatctctactccccctgttatggatatcctttcttttgattctaccacaacaacagaaaccagtggtaggactctgccagacaagggtgaagaggcctgtggatatttcttgaacccttccttaatgtcaccagaatgtttgccaacaaccacgaaaaagaaaacagaagacatgagtgacctcccctgtgaaagtcaaaggagcatacctctcgctgtgactgatgctttagagcatattatggaacaactcaatgttttgacacagactgtttcaatcttggagcagcgactgactttgacagaggataagctgaaagactgccttgaaaatcagcaaaagcttttcagtgctgtccaacagaaaagctgaataaaaaattcattttcatttgttgggcagaggcccaataaatgaacaaatgtacatacactcaggaaggtagtacaagatactccatacaacacaaccatgtgctatttatcatggcatttcttaaaagggtgagcaacagaacaaaaggcagaaaaggcatacctaaggactaatttaaacacatatcaatgtgaaggactaatttaaattactatcatttatgattgcagtaataaagtgataagcattcaagcaactctgtatttcccccatattattttaaatgtccattttcatttataggccaaatcctgccaggaaagtaaccagatctctggatttcactgttaagtcatttcagattgaccatattcagacagtcatggggtgaaataattcacttacctccaaaatagcatcctatatgccaataatgagttattgatctgactagttgtatgtctttctgttcaaaatagaaattatcctttcttactaatgccttgaaagaatgaacaaataaaaattcccagaccacagaatttccacagcaagaatacacttattttaattaacaatagcacagatatagcatagggcagtgggttttttagttaatttatggcgtactttgtttatccattggccaacctgaaggaaatgaaactcacctatctttctatcacagatgaatgtgctagatgaatgatttgggttgtatctgatcatggttcacaaaaattatgttagtgtgttttcagtatgctaaaaagtcagagtgatacaaaagtgatatttaaaaatatacacacatgtatgtacacatgcttcagaaatattgttgcttagggtgatttgggcagctaaatagtaagtactttttaaaatttttgcatcatcatcttcctatttaatgaattgtgatttaaaacaaaatgaaaataagccaggtattctaaaagatcctggatacaaattaagaattttgctttattttaaaccaaattgagattaaattgaagaaaagcaagcaaattaatttcagcttgattatcaacctgtatcaagaacaaaaatgggaggaggtgtccacatttatggtgtgtataggtaacatggggaaaatgctattctgtgttttggaaaagaagaaatagtgccgtcctatttatttctatatttagaaatttttctcaaagaaatttcaattgtatctatgagatgggtttctaagtatcttattgtgtgttataagtgccttttaatatcatactaagtgtgagcttctggacattttcaagagcttacaaaaactaagtggcattgtatttttataaccccattgagaagactaagtaagaaatgaaatgtcctatcaattttattttgtcatgcttcaaacaataaagacatttctgctttaaaag

SEQ ID NO: 770 - DNA, 2976 bp, Homo sapiens
tgtccccttcctcggacccctgggcccagacccctgtgcttgagttgcccctcctgggttcttaaatggtgctgtgccatgcaaataaggcagagagagttcttgtgttcccctctgggagtctgcttaccaagagttcagagacccacattcggttcctgcagtgttcccagaggcagggatggcagctggctgggtatggccaggtgtggaggaaggagtcctcatataagcctggcgggaggaatggaaaattgggaacacagaaaggcccaaggaatggtcagtgtcacaccagacttgggctggttctgtgggtcatgtggccaccattgactgcccatgtgcggtggagccagttccgtgccaggcgctgggggtgcacgggagaggggctggctctgtgccaggcgctgggggtgcacgggagaggggctggctctgtgccaggcgctgggggtgcacgggagaggggctggctctgtgccaggcgctgtgggtgcacgggagaggggctggctctgtgccaggcactgggggtgcacgggagaggggccggcttctgggcagcagggactgtccatgggcaggcagtgcacagtgaggtgcgtgggccgcccaagagtaggtctaagctgtgaactctcccaagggtgagaaggagttcggaggaggaagcggtggggaggagcagggttttgaaagacaaagggggcagctgtgcagggacccgagggtgagggtcctggctcatcccaggaaacactgatggggttaatgtcaggagtggggggcgaagggagctgggccgagaaccaagaggtgagacaagacaaggggcgagtccaggtgaggaggagaaggacgggcagagcctcattgggccgtgtccagagcttcgcagcactgggagcccagctgctacattaaacaggctggacgcgatgggatgctggccgagaacgcttgatttttttctccctgctgtcccttcagactcttttgatgacctagttctttttccgctcctggataaaatcccctgcaagccccttaatttctcttgtcattaaaaaaaaaaaagagagagagagagcaagagagagcacgtcagagcactttgcctccaaaatagtgtcatttcagtgcatcagaactgccaagtttattgacagttaacacttcccatcacttcacctgaccctggttgggaggactgtggggatccctgtttcccttgagctctgcccccacccatcagctagtcctgtctccccaccagcttgctggccaacagtgaggaggggatttgggacagggggtcggtgcttttggtcccccaccaatgctctaacctggtggggtctgagagcacctgactgagaatttcctctgaggaccccccattgcagttccctgatggagacacctgccactgcagccccaggtgggcccgcggccatgagccgtgcataggcctctctgtggggctccctctgcggctctcttgggctgagtcctgtagtagtttcctagggcactgcagtccaacaagtgccatgaaatgggagggttaaaacaacagaaagttgttctgttatagtcggaggctcgaagccttaaatcaaggtgctggcagggttgtacccgccccgaggctggggagaacccttccttgcctcttcctggcacctggtggggccatcagccctccacgttccttggctggcatatgcttcatcgcagggtagcctctgtcggcccatggtgttcttcctgtgtgtctctgtaccctcacctggcattctcttcctcacctctttctcttcttataaggacaccagccacactggacaaaggcccaccccaattgagtgtgacctcatcttaacttggttacatctgcagagacgctacttgcaagtaaggtcacactcgcaggtaccaggttaagacttcatatctttctgcacagttcaacccgtgacgttccctcaagacctcctttttttttttgagatggagtctcactctgttgcccaggctggagtgcaatggcatgatcttggctcactgcaacttctgcctcccaggttcaagtgattctcctgcctcagcctcccaagtagctggggttacaggcatgtgccatcacgcctggctaattttttttgtatttttagtagaggtggggtttcaccatgttgaccaggcttgtctcgaactcctgacctccggtgatctgcccgccttggcctcccaaagtgctaggattacaggcgtgagccactgcgcccggtccctcaagacatcatgacactggctctctcccatgagatccacacctggaccttcatccaaccccaggtcccagccccatccctggctgtcacccgcgctagagggcagaacacccttctccaagacagccttctctgctcttttcccctcggaccctttgtacctttgaagggagggttgcaaagctggtttgagaaccccctttgacatcctgcagaggaggtcaggcacttttctttgaaaggtggagattcttgttgcctgttgttttttctaaacctatggagtgttcagctggaactgaggcagagagtcccatttgaggatcccgtctgtgttacagtggtgttgctatttccaaggaagtgctgctttctttttctttttttaattttgtgaattttcaagtgctgttttgttggaagacagtgcaacgaactgagactaatggacagtgtcatcactcagcttactgggctgaggcgtctgtggagaggtggcaccggggctgcagagggcggctggggttccgtcgtgtcgggtgtcacttcaccttctgtttggccgctcgatgaggtctcgtgttgagatattgtgtgccacaacccccacagtcttcacctccgtgtgtgatgaaacttcccgtggacagccaataaaatgacgtcctctgtt

SEQ ID NO: 771 - DNA, 2811 bp, Homo sapiens
tatattatcctttggtgccaagagtggatgaagaaactttcggaagcctaaactagtggatacatgaaacttaggcaaattattacactacatgggtgtgagagataatgaatattatctactaggtatcagcaaacagatatccaaggtgatcaattcaggacacttccactgaagatatgttaagtgtacgttcagctggagtgtcatcgtaattgtgtgccttctcagttattgggcaagttaaagggcatgatgaatgtttgtagtataatggtgtaaatccttttgatttgttgcatgaaagacatgtgggatcatgtagcacctgttttgacattgattctcacgtgtatgagttgctcctctgtttttagatcacatttgtcctcatcactcagcatatccacattgatattgacacggttttattttgggtttcgacacatgacaaatcataccatgtttgaaattgtaagggtatatttcatggagcctgtgttcccttttttcagtgtacttctgtcaccttctggtccccagagacaaagtagaagccatcaaagcctccactaatacaggcaggaggacagaggttgatgctaacaccgtgtgaatgtatggataactttatcatatttacatgtgagtgattatgtatcccttttgcttttcagtgtcttctcggaaaaaagcagccttgaaggctacaagtgatgagaaagattctttttcaaatataaccagagaaagaaaggatggagagacatctaggacaggtatcagcaaacaggtgtccaatgtgatcaattcaggactcttccactgaagagatgtgaagttgtcttctcagaaaccaccagccttgaaggctacaagtgacgaggaagattctgttttgaatatagccagagaaaaaaaggatggagaaaaatctagaacagtgtcttcagagcaaccaccaggcttgaaggctacaagagacgagaaagattctcttttgaatatagccagaggaaaaaagtatggagaaaaaactaggagagtgtcttctcggaaaaaagcagccttgaaggctacaagtgatgagaaagattctttttcaaatataaccagagaaagaaaggatggagaaacatctaggacaggtatcagcaaacaggtgtccaatgtgatcaattcaggactcttccactgaagagatgtgaagttgtcttctcagaaaccaccagccttgaaggctacaggtgacgaggaagattctgttttgaatatagccagagaaaaaaaggatggagaaaaatctagaacagtgtcttctgagaaaccatcaggcttgaaggctacaagtgacgagaaagattctgttttgaatatagccagaggaaaaaagcatggagaaaaaactatgagagtgtcttctcataaacaaccagccttgaaggctacaagtgacaaggaaaattctgttccgaatatggccacagaaacaaaggatgaacaaatatctgggacagtgtcttctcagaaacaaccagccttgaaggctacaagtgacaagaaagattctgtttcgaatatacccacagaaataaaggatggacaacaatctggaacagtgtcttctcagaaacaaccggcctggaaggctacaagtgtcaagaaagattctgtttcgaatatagccacagagataaaggatggacaaatacgtgggacagtgtcttctcagagacaaccagccttgaaggctacaggtgatgagaaagattctgtttcgaatatagccagagaaataaaggatggagaaaaatctgggacagtgtctcctcagaaacaatcggcccagaaggttatatttaaaaagaaagtttctcttttgaatattgccacaagaataacgagcggttggaaatctggaacagagtatcctgagaatctgcccaccttgaaggctacaattgaaaataaaaattctgttctgaatacagccaccaaaatgaaagatgtacaaacatccacaccagaacaagacttagaaatggcatcagagggagagcaaaagaggcttgaagaatatgaaaataaccagccacaggtgaaaaaccaaatacattctagggatgaccttgatgacataattcagtcatctcaaacagtctcagaggacggtgactcgctttgctgtaattgtaagaatgtcatattactcattgatcaacatgaaatgaagtgtaaagattgtgttcacctattgaaaattaaaaagacattttgtttatgtaaaagattaacagaacttaaagataatcactgtgagcaacttagagtaaaaattcgaaaactgaaaaataaggctagtgtactacaaaagagactatctgaaaaagaagaaataaaatcgcagttaaagcatgaaacacttgaattggaaaaagaactctgtagtttgagatttgccatacagcaagaaaaaaagaaaagaagaaatgttgaagaggtgcaccaaaaagttagggaaaagttaagaatcacagaagagcaatataggatagaagctgatgtgacaaaaccaattaaaccggctctcaaatcagcggaggtggaattgaagacaggaggaaataattcaaatcaggtttctgaaactgatgaaaaagaagacctgctgcatgaaaaccgcttgatgcaagatgaaattgccaggctcaggctggaaaaagacacaataaaaaaccaaaacctggaaaagaaatacttaaaagactttgaaattgtgaaaagaaagcatgaagaccttcaaaaggctct

SEQ ID NO: 772 - DNA, 2997 bp, Homo sapiens
actaagccccatcgccttatttctggggtacatccagacctggcagggatcctgccacactgtgcagcaaaccagcatgtaggctgggtaggagagcaagagatagagccatcagagtgatggggcttcttcacagtaagaacatcggagcttagaatgagagtctctttccaaaaacaggcattgttcatcttacgctaaacatcattgtctgcctggctacagtcaccaaaacaaaacagaaatgcaaaattatgcatcttcccatagtcctgaggcttcctttgccaatggaagggctagcaatgcattctccctctcatgaaagttaaatttccagagacttccttagattgctcaaaatgttaaagatatgtccatgtctgcaattcgccagtttcaggtcaaggcctactttcatcaatattgctcccagaagttttctgacaccagaatgccattcctggtcccagctctatttttaggccaccacgataacttctttggtttctcaactgagcatgcaaccatttatttaaaagactgtcattaatgagtagatgttttcgcgggtcgtgtgatgtgctttccatttactagtgttgctgtggctaagtacaatcaaattgaaccaccaacccttggttttgtagtaatataactatttattttcctagtgtagatgctttcagattagaattggcatttgcactgatttttttatgtagatttatataaatatatagatacatatatatttgcttgaagaatcaccaagcaaattggtgagagggtcttttccaatagaatttacacctccatttgttgtgttgtcttgcacttcccaatgttgatgtctctatggctccaatgaactggtgtattttgcagcaaatctgatgacttgtatggaaatggcatgaaagttacccagattacatctggtgcaaatgcactcggagcctggggccagactggtgctaacactgcaaactttgtccagagctctctccaacctgaaggcttgctgggggtgcaatgtcaccttcacacatgctgggccctttcagaaaagtgccagatcgtgtaactggtgctatttttcatgctctggtacaatgtgtagcaccacgggggtctcagctttaccaaaatcaaaattccatttgtcagctaagtgcagaggcatttgttttttgctctcctcccacagaattgtcggccatttatttgcaggccttttgcgggatttcttggctatttatttgcaggccttttttcccagccccaaattcttgggttggctctgtctgcttaaagagcctgtcttcacaaagctgcactcgggtgcctctgtgcgctgtcttagatcctactgccggcccttcaggactccgagccaggaaagaactctccaacctctggctcgagactctactttttttctcattcttttccttactctcctcctccttctacttccgactaattccatctcttttttttttttgttcctctccttttcctattcctccttcccaccatctctgagttgttgactttctcctataatccttctctattccctttctctttttgtccacctctcctttagtctctgtttctctgcccttcttattcctcttctgtcctttctcctctcctcaaatctctgatcatcttctcccgtacatccctgtattgatttttctgtcctctaaagggctcatggctgattcagacagcaagtccatgcactggactaatgacacaaatactttaggtcgccgtttcacctactcagcccagaaagtaaagctgagcgtgaggccctgacctggagcctgctccagcccgcctcccggagccagcctgcaccgttgccctggcagcgatgatgcatgtgctgtgggccctgccggcgcctgagtgcctctgcctgaacactgctcctaagcgagcccactcccagcactaccgcatggctctgaggacattttctttcaataaaggcagactctggccccaattattctgatagcaaacctcttcctcctcattgaagccatgccatcaccttggtttggagagagacatttttttcccattcataagctttctttttcccatttttatgtgaagccccctctgcttttcagctggtgattgctctggtgagactgaatggacttgctggtgaaatgaaatctcttctttcctgtcttggtcctgcctaaattcctacaaatatatttaagccaaggactcaggctaattcctaagttgatcacattaatttgttactcctagagggaaaaagatcaattcccttgaagcatgtggagtacctcctgtgacagctgacttgccaggggactccctacagaattctgtgatatacattttacttctgtgtatgtatggtatatatggtatgtataccatgtacacacgttacattgagtatgaatgactgtggttggaaacacacacacacactcaagtctgtaaatatccttcctcactgaaacctgtgctttggaaatcatttcttgtacagctgtgcagtttcttgtaacagctgaggacaaagctaagacaggcggacaatttagacaaagatcatctaaagagtatagtatctccctagcaactcatgaggacagacaaccaagtggcaaggttgactcccaatgggatggcagacttttcttctctcctttttgagtttgtgtttcctaagtgtttcttaacttctgagtgcaccaggctgtacccgttagatcctttcaatatgacagttttgtgcttctctctgacaggatgtttctccaccgagctgtagcacaggatgggagggaggtgggaatactccttgcctaggctggagtttacagagacactgcacagcttacactcctgttaagtgtaaatattcaacacttccattccatttgtgtaaaaaataaagcacacacgattataaaatcaagatgt

SEQ ID NO: 773 - DNA, 2529 bp, Homo sapiens
atttttaggccaccacgataacttctttggtttctcaactgagcatgcaaccatttatttaaaagactgtcattaatgagtagatgttttcgcgggtcgtgtgatgtgctttccatttactagtgttgctgtggctaagtacaatcaaattgaaccaccaacccttggttttgtagtaatataactatttattttcctagtgtagatgctttcagattagaattggcatttgcactgatttttttatgtagatttatataaatatatagatacatatatatttgcttgaagaatcaccaagcaaattggtgagagggtcttttccaatagaatttacacctccatttgttgtgttgtcttgcacttcccaatgttgatgtctctatggctccaatgaactggtgtattttgcagcaaatctgatgacttgtatggaaatggcatgaaagttacccagattacatctggtgcaaatgcactcggagcctggggccagactggtgctaacactgcaaactttgtccagagctctctccaacctgaaggcttgctgggggtgcaatgtctccttcacacatgctgggccctttcagaaaagtgccagatcgtgtaactggtgctatttttcatgctctggtacaatgtgtagcaccacgggggtctcagctttaccaaaatcaaaattccatttgtcagctaagtgcagaggcatttgttttttgctctcctcccacagaattgtcggccatttatttgcaggccttttgcgggatttcttggctatttatttgcaggccttttttcccagccccaaattcttgggttggctctgtctgcttaaagagcctgtcttcacaaagctgcactcgggtgcctctgtgcgctgtcttagatcctactgccggcccttcaggactccgagccaggaaagaactctccaacctctggctcgagactctactttttttctcattcttttccttactctcctcctccttctacttccgactaattccatctcttttttttttttgttcctctccttttcctattcctccttcccaccatctctgagttgttgactttctcctataatccttctctattccctttctctttttgtccacctctcctttagtctctgtttctctgcccttcttattcctcttctgtcctttctcctctcctcaaatctctgatcatcttctcccgtacatccctgtattgatttttctgtcctctaaagggctcatggctgattcagacagcaagtccatgcactggactaatgacacaaatactttaggtcgccgtttcacctactcagcccagaaagtaaagctgagcgtgaggccctgacctggagcctgctccagcccgcctcccggagccagcctgcaccgttgccctggcagcgatgatgcatgtgctgtgggccctgccggcgcctgagtgcctctgcctgaacactgctcctaagcgagcccactcccagcactaccgcatggctctgaggacattttctttcaataaaggcagactctggccccaattattctgatagcaaacctcttcctcctcattgaagccatgccatcaccttggtttggagagagacatttttttcccattcataagctttctttttcccatttttatgtgaagccccctctgcttttcagctggtgattgctctggtgagactgaatggacttgctggtgaaatgaaatctcttctttcctgtcttggtcctgcctaaattcctacaaatatatttaagccaaggactcaggctaattcctaagttgatcacattaatttgttactcctagagggaaaaagatcaattcccttgaagcatgtggagtacctcctgtgacagctgacttgccaggggactccctacagaattctgtgatatacattttacttctgtgtatgtatggtatatatggtatgtataccatgtacacacgttacattgagtatgaatgactgtggttggaaacacacacacacactcaagtctgtaaatatccttcctcactgaaacctgtgctttggaaatcatttcttgtacagctgtgcagtttcttgtaacagctgaggacaaagctaagacaggcggacaatttagacaaagatcatctaaagagtatagtatctccctagcaactcatgaggacagacaaccaagtggcaaggttgactcccaatgggatggcagacttttcttctctcctttttgagtttgtgtttcctaagtgtttcttaacttctgagtgcaccaggctgtacccgttagatcctttcaatatgacagttttgtgcttctctctgacaggatgtttctccaccgagctgtagcacaggatgggagggaggtgggaatactccttgcctaggctggagtttacagagacactgcacagcttacactcctgttaagtgtaaatattcaacacttccattccatttgtgtaaaaaataaagcacacacgattataaaatcaagatgtatatttcat

SEQ ID NO: 774 - DNA, 3347 bp, Homo sapiens
ttaccttggatccgagcagccagctccaactgttctgcaagcagcactggagtcagggggtaggaggacaagtggaagcaaaggtgtgggactggggaagacaaagaggaacaagctgcccttcctcacttttcaaagggtcaggaatcctaggctatgatgctgggaagctagaccagctcctccaagagagactagaccagggtcattttctctgttattaactctgggctccagcttctccgtgccctgctttacctccaagtggttccaatttccaaaggccctgctgaccacatgtgattcccaggagagggctgggggaggggagcgcagaggtctggcttccatccttggcgtgtagctttggatcgctgtctaaccacacagcagacgttgcccggtctccccagctctagtttcttgcctgaatgcggctgacaaatgggaagagaaaagcattcagcaaaatactcaggaaacttgctgttttcattataattcacaaccagccatgccaaggccactttcttttgaaaatccacttctttaaagtttctcaggccctattagtagcctgaaggaaatactaatgactggccttccgcactaagccaaagtgtttgctcttcatagcactcaaagcttatcagcgcagagcccataatttatggagataaaaggaaaggagatataggtaagaagagtgtgaccaggagaccttatgctacctgtaaaaaagttcagcccaccccatctaacttctgagctctgtttgggtgaagattttctggccgcatggctgctcagactggcatccaggctttgctccaccaagaagttaaaggcagtcggacatctcagtagcatctctaccagcccttaactcaatgcatctacctggcatctcccagcagttacttttggagacgattcactgcccctggggcgtttccttgaaggtttgtggagagcgtggagaatgatggggcaatggccaattggagggtggagagtgaagagccggagctggctgtgagtggtttggccacatttctcaggattccatgagagagttggggaacttgggctgacaaaggaagtagcctggggcatccttaaggaaggaattaagaaaagggaaaaagctggactcaagccacgccatgaggatgaaaggttataaggccctgccccctttccagctgcccacctgttcctcctccacacctcttcgctttgggccaccaagaaccaatgaagtccacaccctttggatgagaaaaagagggagttggttggcctctcttctccctgttatccaatttgaggatattttgaccttgggtaaggatgaagtgttaaagccacagctcctctccacaagaagccattcatcttgggggaggcagagagggaagtctctctccaaagtctatccagcttcgcttcgtttcattgatctgcacaagagacaatgctctggaaaaggaagaggaccccagaagggtgcttggcaagacagaggatgctaatgggcaatggagagcactccctccagctggcccctgctgctgcctcccgtcctctgcacggggtcaggtgcttctgtgcttgctgtcctacctctctccacagcagggctctcaaaaccattttgatcccccattggcagagggttcccctctttacagagttcagtcattaaaagcatggatcagctgttaatctcattggaggagggaactgtttcctgcattcattcatctgggaaccttcttgagtagccactgtctgccagccactgctctagagatgggaaaacagcacggaacaaaaccaaggtctttcttccagcgaatttatatccttcaggaagctggttcctgccaccaacttagcaggcaacagttctcctcccctagtggcacagggtaccagttttgtaggaaaagtggtccagcaaaggaagaaagcagaccaacccagctgccttaccttattctggggccattcccccagcgatgagagctgctcttgtttctactgccaccatctcttctggctgcacttcacctgctgcttgagcttctgaccttccttcagttccaccaaatgaggacaggaaatagcagtcaagacccctggccctgctgagcgtgaaacagaagcaatggatgagtgctggaagaagaatggcctgggcagaacaaatagggagcatttgaaagcttctggctgataaatctccaggtgcatcccggttgccacgcctgcccccattaacctgctcctggtaaatactgatccagcagctgctccaggagaggccgtcttttttttcccagccacgctgtgtcttgcatgagactcctggggcctgggcacagagagaaaagaattgagactcaggaggctcagtgggtgagaaaatgcaaagtggcttcacagacacagggctgtgggagcagatcgacggggaacttgggagatgaacttcagggccttccgacgccttgtctcaggaacatgctttgagaaaaatggtagcatcctttccataactcagtctctcttccctagtttccctgaagtgtgacgttttagtatctggagctcagtgatccccatgaatgagggataaagtttcactcttggtattttctaactagtgctagggaaagtcctgagacacgatcacagccactgcttggcatacagggcctccacccaataagcaaactggagattcctcagcctctcgtggacacccacatctcattcttctcacagcagagaagctctcccttcagcctgagccgtcttctttctgctgcagtgcagcctgctccctcctaccctggcctcaaggaaggtgggaaacatcttctgcatttcaaagtcctcactttgacttatttggccttcatcttggcatggaaggtggcaggcagaatggaaatactccccccaaacagaacagatattcttgcgtgtgtaagggcagaagggacaagctctctatcccatgagactaggggccggagcccacctgcctttccccacaacttttcctgctcaaacccactcctcttgacacactggaatctgtattatatatatttttaagaaaatacaatgatggttgtctggttttgttgtttttacaggtgttgtggaataaaaactgtaagaaaattaagtatttaaaatgttccaataaagtggggtttttttgttattctaatatattattgtgtacctattgtaaatatgaaacactcctattttgcaagctgaggacacaatttgtactgttgttatatataaataaagtttactgaatt

SEQ ID NO: 775 - DNA, 3263 bp, Homo sapiens
gtgttttttccttttcatttcagcctgactgccggaatcagagccgcgggtgagatccccagccctgtgagcctgtaggagtagaatggctccccaaatgtatgagttccatctgccattatccccagaggagttgttgaaaagtggaggggtgaatcagtatgttgtgcaagaggtactgtccatcaaacatcttccaccacagcttagagcttttcaggctgcctttcgagctcaggggcccctggctatgctgcagcactttgatactatctacagcattttgcatttggttactggctgttgctaccgccttctggagaatcccaccattaatcaccagaagaaccgccccactcgggaagccataacacacctgcttggtgtagccttgacccgttataaccatatgctcagtgctacagtgaagatcatccagatgctgcagcactttgaacacctggcacctgtactggttgcagccgtgagtctatgggcaactgactatggaatgaagagcatagtgggagagattgtaagagagattggacaaaagtgtccccaagagctgagtcgagacccttcagggacaaagggctttgcagcattcctgacagaactagcagaacgtgtcccagctatcctgatgtccagcatgtgcattttgctagatcacctggatggagaaaattacatgatgcgtaatgctgtgctggcagccatggcggagatggtgctgcaggttctcagtggcgatcaactggaagcagcagcccgagacaccagagaccagttcttggatactttacaagcccatggccatgatgtcaactcctttgtgcggagccgtgttttgcagctcttcacccgaattgtccagcagaaggctctccccctgacacgtttccaggcagtggtggctttagctgtgggacgtctggcagacaagtcagtgctagtatgtaaaaatgccatccagctgctggccagttttctagccaataatcctttctcctgcaagcttagtgatgctgaccttgccggaccactgcagaaggagacccagaaattacaagagatgagggcccagaggcgaactgcagcagcttctgcagtgctggacccagaggaggagtgggaagccatgctgccagagttgaagtctaccctgcagcagcttctacagcttccccagggagaggaggagattcctgagcaaattgccaatacagagacaactgaagatgtgaaaggacgcatctatcaactgcttgccaaagctagttacaaaaaggccatcattctcactcgagaagccacaggccacttccaggagtccgaacccttcagtcatatagacccagaggagtcagaggagaccaggctcttgaatatcttaggacttatcttcaaaggcccagcagcttccacacaagaaaagaatccccgggagtctacaggaaacatggtcacaggacagactgtctgtaaaaataaacccaatatgtcggatcctgaggaatccaggggaaatgatgaactagtgaagcaggagatgctggtacagtatctgcaggatgcctacagcttctcccggaagattacagaggccattggcatcatcagcaagatgatgtatgaaaacacaactacagtggtgcaggaggtgattgaattctttgtgatggtcttccaatttggggtaccccaggccctgtttggggtgcgccgtatgctgcctctcatctggtctaaggagcctggtgtccgggaagccgtgcttaatgcctaccgccaactctacctcaaccccaaaggggactctgccagagccaaggcccaggctttgattcagaatctctctctgctgctagtggatgcctcggttgggaccattcagtgtcttgaggaaattctctgtgagtttgtgcagaaggatgagttgaaaccagcagtgacccagctgctgtgggagcgggccaccgagaaggtcgcctgctgtcctctggagcgctgttcctctgtcatgcttcttggcatgatggcacgaggaaagccagaaattgtgggaagcaatttagacacactggtgagcatagggctggatgagaagtttccacaggactacaggctggcccagcaggtgtgccatgccattgccaacatctcggacaggagaaagccttctctgggcaaacgtcacccccccttccggctgcctcaggaacacaggttgtttgagcgactgcgggagacagtcacaaaaggctttgtccacccagacccactctggatcccattcaaagaggtggcagtgaccctcatttaccaactggcagagggccccgaagtgatctgtgcccagatattgcagggctgtgcaaaacaggccctggagaagctagaagagaagagaaccagtcaggaggacccgaaggagtcccccgcaatgctccccactttcctgttgatgaacctgctgtccctggctggggatgtggctctgcagcagctggtccacttggagcaggcagtgagtggagagctctgccggcgccgagttctccgggaagaacaggagcacaagaccaaagatcccaaggagaagaatacgagctctgagaccaccatggaggaggagctggggctggttggggcaacagcagatgacacagaggcagaactaatccgtggcatctgcgggatggaactgttggatggcaaacagacactggctgcctttgttccactcttgcttaaagtctgtaacaacccaggcctctatagcaacccagacctctctgcagctgcttcacttgcccttggcaagttctgcatgatcagcgccactttctgcgactcccagcactttgcgataccaaggcgggtggataacctgaggtagggagttcgagaccagcctgaccaacatggagaaaccccatctctactaaaaataaaaaattagccgggcgtattggcgtgcgcctgtaatcccagctactcaagaggctgaggcaggagaatcgcctgaacccagaggcggaggttgtagtgagccgaaatcacaccattgcactccagcttgggcaacaatagcgaacctccatctcaaattaaaaaaaaaatgcctacacgctctttaaaatgcaaggctttctcttaaattagcctaactgaactgcgttgagctgcttcaactttggaatatatgtttgccaatctccttgttttctaatgaataaatgtttttatatactttt

SEQ ID NO: 776 - DNA, 2210 bp, Homo sapiens
ctgcgtcaccagaaaatgtcaaagttacctgaagcagcaaagaggctcttgctccggcccctcccttccttctcagctccatttgttgccacatatgcgttgactggaactgcgactgacatcttgggaccttagggtcagtccacagcgtggtagagactccagcttggcccagcattgctgagctgctgaactcgcaccaacagtcttgttggagggaaataatctcccgtttgttcagtccagttatttgacagtgtggttacttgcaccccaagcatttctaactggcacttccatctaatagacctcagggtacatggtggtgagatagggacatcagtgagctggattgttcccatggtaaaggtcatgtatgtgtgtgtgtgtcatggtcctcaataccagccccaagcccagtgatttgctaggaggactcccaagactcagtatgtggttgtattcatggctacgattgacttattacaacaaaaagatatggagcaaaatcagcaaaaagaaatggtgtgcaggaccaactcccagagagacccaggcacaagtttccagggcttctccctcattggagtcacacaagatgtgctcggttcacagtaatgggttgtgacaatacatgcgaaatgttgctgaccaaggaagctcaattagagactcagcacccagaggttttttttgttgttgttgttgttttggtttttttttggcgggggggggggtcttgctctgacgcccaggctggaatgcagtggcatgatcttggctcactgcagcctccacctcctgggttcaagcgatcctcgggcctcagcttcccgaatagctggaactacaggcgcgcaccagcaagctcggctaatttttgtatttttagtagggatggggtttcaccatgttggccaggctgatcttgaactcctgacctcaagtgatcctcccacctcagcctcccaaactgctgggattacaggcgtgagcacctggctggtatcaagtttttattggggcatggtcacataggcaccccctgcctggcacctacccaaatcccaggctcccaaaaggaaagcaggggctcagcataaaccaccttttttttttttttttttaattgagacggagtctcgctttgtcgccaggctggagtgcagtggcgtgatctcggcttactgtaacctccgcctcctgggttcaagcaattctcctgcctcagcttcctgaatagctgggactacaggcgcctgccaccaccacgcccagctaatttttgtatttttagtagagacggggtttcaccatattggccaggctggtctccatctcttgaccttgtgatccgcctgcctcgacctcccaaagtgctgggattacaggcatgagccaccgctcctggcccacttttttatacaaacagcttaggtagagtaagccattcttttttttctttctttctttttttttttttgagacagggtctcactttgttgcccaggctggagtgcagtggctcaaacatggttcgctgcagcctcaacctcccaggctcaagcggtcctgctgcctcatcctccaaagtagctgggaccacagacatgcaccaccatgaccccagctgatttttgcagagatgggttttgccatgttgcccaggctggccttgaactcctgggctcaagtgatcctctcaccttggcctaccaaagtgctggcgttacaggtgtgagccaccacacccggcccgagtgagccattcttatctcttagggaatggtgggaaccctcctggagtctatgttcttagacaccacccaagggccaaccttgaagcaggcctttccaaggatcgcagttgaggcctgctctgttactgtttttctgcacagtgtgcaacaccacacagatgcccagtttctaccaaggtctgtggatggcaggataattttgaggaacctcctttttcgctaacactttcttcttttgtttacactcttcacattgtctattgagtctggattcaagatgattgattgtgaatattgttgtgcatgattttgggggtttcctccttgtgaaattttgaggtggcagatttgacattctactttaaactcatcttggtggcacttttcttgactcaccacctaagggggaataaataatgaagaaagaataaaaatagtgttatcagtcac

SEQ ID NO: 777 - DNA, 5333 bp, Homo sapiens
ctgtcactgcagcctggcggcctgagcgccgagcctggggctggggccgcggtgctgaggacgcaaatcagccccgtagctgggtggagcctccgggcctgacgtggatcttcactggagaagtgactcagggatcctcccaggatgtctgcctcaccagacaacctgagtacagggggaaggttacagaacatgacagtggatgaatgcctccagtctcggaacaccgtcctccaggggcagccctttgggggtgtccccaccgtgctgtgcctcaacatcgccctgtgggtgctcgtccttgtggtttactccttcctccggaaagctgcgtgggactatgggcgcctggctctgctgatacacaatgacagcctgacctcgctgatctatggggagcagagcgagaagacatctccctcggagacttccttggagatggaacgcagagacaagggattctgttcctggttcttcaacagcataacaatgaaggacgaggatctgattaacaagtgtggggacgacgcgcgcatctacatcgtgttccagtaccacctcatcatctttgtgctcatcatctgtatcccctccctgggcatcattttgcccatcaactatactggatctgttctggactggagcagtcactttgctcggaccaccattgtcaatgtctccacagagagcaagctcctgtggctgcatagcctgctgtccttcttctacttcatcaccaacttcatgttcatggctcatcactgcctggggtttgcgcccaggaatagccaaaaggtcacaaggacactaatgatcacctatgtgcccaaggacattgaagacccagaactcatcattaagcattttcacgaggcctatccaggcagtgtcgtgacaagagtccacttctgctacgacgtcaggaacctgatcgacttggacgatcagaggcgccatgccatgcggggccggcttttctatacagccaaggccaagaagactgggaaggtgatgatcaggatccacccctgtgcccgcctgtgcttctgcaagtgctggacctgcttcaaggaggtggatgcagagcagtattacagcgagctagaggagcagctaacggacgagttcaacgccgagctcaaccgcgtgccgctcaagcggctggacctgatctttgtcaccttccaggactccaggatggccaagcgtgtccgtaaggattacaagtatgtccagtgtggtgtgcaaccccagcagtcctcagtgaccaccatcgtcaaatcatattactggagggtcactatggccccacaccccaaagacattatttggaaacacctgtctgtccgccgcttcttttggtgggcccgctttatcgcaatcaacaccttcctcttcttcctcttcttctttctcaccacgcctgccatcatcatgaacactatcgacatgtacaacgtcacccgccccatcgagaagctgcagaacccaattgtgacccagttcttcccctctgtgatgctctggggcttcacagtgatactgcctctgattgtctacttctccgccttcctcgaggcccactggaccagatcaagtcagaatctggtcatggtgcacaagtgctacatctttctggtgttcatggtagtcattctgccctctatgggactgaccagtttggatgtctttctccgctggctctttgacatctactatctagagcaagcatccatcaggttccagtgtgtgttcctgccagacaacggcgccttctttgtcaactacgtgatcacggcagctttacttggcacaggcatggagctgctgcgtctggggtcactcttctgctacagcacccgcctcttcttctctagatcagagccagagagagtcaacatcagaaagaaccaggccatagacttccagtttgggcgtgagtatgcgtggatgatgaacgtgttcagcgtggtgatggcgtacagcatcacttgccccatcattgtgccttttgggttgctctacctgtgcatgaagcacttgacggatcgctataacatgtactactcctttgcacccaccaaactgaacgagcagatccacatggctgccgtctcccaggccatctttgcgccactcttgggtctgttctggatgctgttcttctccatcctgcggttgggttctctccacgccatcaccatcttttccctgtccaccctcctcattgccatggtgattgcctttgttggcatttttctggggaagcttcggatggttgccgactacgagcccgaggaggaggagatccagacagtgtttgacatggagccaagcagcacctcctccacgcccacctccctcctgtatgtggccaccgtgctgcaagaaccggagttgaatctgacccccgcctcctccccagccaggcacacctatggcaccatgaacaaccagccggaagagggagaagaagagagtggtctgaggggctttgcgagggagctagactcggcccagttccaggaagggctggaactggagggccagaaccagtaccactgaccgggacctgaggcctccactggcgacttgttgaggggtcaggggagggcctggcaaggggaggcaggagggtggcctggacctccccactacctcctgcagactttgagaagcctacagtggagacatccaccaccccagccatgggccatacgggggtcctgacctgctgcccggctggaactggggctgctcggcagtgctgaaggagcctgggaagggatgggaggatacaggcaagcacatgtcttgagagaggtggctggagccccggcacagagactgaacgctggggtcccttcctgggaccaagatggagaaggtgttcctaagggaggagacagaaggaggctgccgaaggctctgtggggtcatcaccactctgcatcagctgcccttaaaaggagcttctgctgctgctcctcctcccagccccggcccattcctcccctgcagtctgaggaggcaaaggtatgtgcacggggcacattgacaggacacggaggaccacctcatcacagggttccctgcatggggatctgtaaagagaaagtttctgcacccaccagagcaagagccaactgaaagcgtagacctgagaagaggtaactcagccccttcctgctcctctgccctcatcagatgtccccaggagcagcagggcagaggcccttctttctattcttacaagggtagctagagcgtgatcactcagggctcatcaaatgagactcgtgtgcatttttcagaaggaaaccttggttagtccttgctgggtaacacaaagtggggtgagacgacagaagccgaattcatggaaggggggtcttctccccaaaactctgtgtggtgggaaaccagctatacctccccaagccccagggcctaaagagaagacccccgaagccaaagatgtggccacttaaaagcgtctcctgcctcctacccaactgagtgcctgggcccccagcttggccaagatgggcagtacgttagggtaagaaccccatgcttcaaacttaaggactgaccatcacctgcgtcccaagtaggacccttcctcccttctcggggctgcccctgcaccctgccttgaagaccacccaagcggcctccagtgtgggcctggtccagacattgcagatgcttcaaccgtgatgtcgccccaggcctgccaggggtgtggtggaggggaaggccacgtgctccagggagaagccctttctggagaagcaaggctgtcctcccagggctgccactaccagagacctgggggagctgaattccgaacagtgatggtgacactcagcacctttgccacagccggggggaaccggcttctgcctctgggatgggctctcatcagggccaccgtgcagcccagccagggaggacatgagaagggccagtgggggcctcaatgaaccagaacaagccaagctgaatggggtctgtgtgctccagggccctcttcagccccctcccccaaaggtctgggtccctgccaccaacctactgaaggccggcccccggctcacctcacctgagcacctgcaccaggccccaggcacatggctgccctgaactcagatcacctagaccttgtccctgccccacctttgccccatcctagccccagaagctccaagcttcaccgcaggtgagaaattgtgctcaatgggcagaaactgctatacccccagggcatggcccacattttggcatgagggtgtctttccagagagcttgggttggctggagagaggctgtctttcccattccttgtccagctaggaataaaggggaaatggtcctagcctggcccctacacacccaggtcccacaggccccctccccactggaatttcaccaaccaacaaggggaaagtacgctgttacagcatagcggtcaggcccagcaggagcttggcacatgatggggaggtggccagctccaggccctgcccgaccccatcatgtgtatttggtgtatggggtgtgggggtcacaccagaagctggcctggggtctcttctttgctggacacagctccctggcccctgcccccagcccctgcagcccctgccggactgtggaagccacatatgggaaaagtcctggcagacaatgtggcgggatgactgggggcttctccctctgaacctgggtccagtgtagcctggctctgagagaaggtggtgagcatgtggagaaggttccatagtccactcttaggggaaccagcaaagcctcatggcagttggctccatctggacctcccatggtcactacaggatggtggagcagggggcatcttttagcctccccccgccaccacatccaggccctctcaggcacctcctgcctcagcccacacctgcctcacccattgcccccctccccccacctactgccatcccactcctctgccagccacttcccagccgccccaccccactccatccaccaaatcacctcctgacttaatcctttctggaaggagctgccgcccaggaaccggtattgcctagagcctccaggaggggccctcctcaggcctccagtggccccatgcccacctgcctgaccctccactgcccctggaagcaaagtgcctatcagcagcgttgcgtcctctggggcccccggtcgggggggagggggtgtgggctaaccttggccaccaccacaaaaggaatgtgccagaatgctgaaccttcttgttaatgctatgaccgtgccttgaataaacaagtcctcccaacctc

SEQ ID NO: 778 - DNA, 2672 bp, Homo sapiens
ttatatgtaagcatggcagagagaagccgagttcttgcacagaatcttgaaggctgattgaagagccagcctcctgacctctgagggcagggactggatctctctctttcccctgtattcccatcctgccacacaaagcccggcccagagtcagccctcacagccttgtttcatgagccagtaggaagcaagaaggattcctggcacaggacggggcagaagtaaaggcctaggactaggatgtagccagaactctggggaaggctttgcagggagctagggggtgatgagacccttcacgggcaggtcccagccaggttgaggagggtccttgtcaggtgaggaggtttggttctttcctggaggcagcaggacatatgtggccatgtgggaccaggagaggaacccacagtgctctgctttcagcagagatctgtgaagctagaatgtcaagggccagggaagtggaaggcccagaaccttcaggggttctggttgccccagagcaagaagaagaagtggagggagaagccaggagagaattgcaagatgacccttcaggtcctcccagctctagtggtctctgttctgaggcttccggaccctataagagtgagcaggagggtgcaggcatttggggatggagcggcatgaagtgggctcctgggggtcagcagagcagccaggcgcaggacagagctgctccaagcaatcctgatgagagctggcagaaggctgaggtcggtggggatagtgaggagggcatgggtctgggtgtggtgggcgagggtgtctcgcccatctctgggttggacaggtgcacctggtaagtagccaggccctgaggcgtcaccgtaggtacctgcagattctggatgtcagcaggagccttgcctgcccacctggtggaagctgtgggaggaattggagcaagaggcggtgtgacttgaacttgggggctggaagtggaagaagaagtgagagggagcagacccgagagagattcaggaggcaggatagagaggactgggtgatggattaggtgggcaagggtgggatgtctgggggagggtcagggcagaacagcgtggcccaccctgggctcgtacagggctggatttcagtgccagctgtgtggtcttcatttcctgagcctcagttgcctcatctgtagaatggggagagggtggctatgaggatccaggagctatgggctcagtggctggcgtgctctgcacggtggagcctcagccccagtcattggggtgtggacgatgggggagctgaggtcaagtcaaggcctctgctcacgggcagcccctgctgccaccccacagcccgtagaaagagttccggataggaccacaggaggcctggtgggctcagcacacagatgatgaccttggcacacgacctccctctcctggtatcctcctgcctgagacggtgctggggcagatctcctcagaggtcgataggaggatgcagtgaggtggccccggccgaggtacactcggtaacagatcatcatgtgcagtgtcggcgcaggcattgggcacctgggcctcattttctcttccatgaagtggatgttctcccctcgagggttcatgccgggtgatcaggagaccatgatttgggcagctcactccccagctggcagccgggctaaatctcatcagtgcccatttagatctggtgctccgcccttgccccgaagggacaggctgcctgcagagagagccgggacctccacattttctgctgaggctccttttcccagcattggctcctctgcagctgctgggccacagccagaggctgtcagagatccaagggagtcattgccagtgtccttgtctaaggaggatgggccatggagaagccctccctgcccgctctccacccagatctgttgacagccacccctcacatgcccagggcctggagggtcccagcaaggctgagactatgagcagctgtcctactcacatacccatcccagcatccaggtcagcccctttgtcctggggtcctcaaggtcactggcgcccttccagcctgctggccttgggccagcctctagcccctccttctggatcttggtcttctcagatctgaccctgtcacctctttccccgaccaggccccttcccctctggtgcctgggcagcctgggggaagtatgctggaagcagcgtaatgatctggcaaggcagaggagacagcacgtcttgaaacatttttggggtcaaggactaccccatttgttccctcactcccacctaggtcactgatgtgcattagcttggactgttgtaacaaaatatcacagacagtgtggcttaaacaacagtcatcactttccacagttctggaggccagaagtccacaatccaggttccctcagattctgttcctggcgagaacccacttcctggcttgtagacggctgccctctcactgtgcactcacatggcattccccaggcgcatgtgcacggagtgaaggagcacgagctctctggtgtctcttataaggacactaatcctggccaggcgcagtggctcatgcctgtaatcccagcactttgggagactgaggtgggtggatcacctgaggtcaggaattcaagaccagcctggccaacatggtaaaactccatctctact

SEQ ID NO: 779 - DNA, 2482 bp, Homo sapiens
taagggaccccggccgctttctccccaagaggcaacaataaaagcatcctcctctcgccccaatacttcgcaggaaagtggccccattcccgggacccagtcgaccgcaggaaaaaagcacggccagcctcacttaccttatagacgtccccgtaggtgccgctgccgaccctctggacgagttcgtagtcctgctgcgggttccgcctcaggatgtccgcggcaggccgcagcggggcctccatcttcacttagggcccggcccccgccagctcaccccgcggctcccggattcccgctaacaagcacgaacggcgccgcttcccaacatggagcctccgcccgcagctccgtctgcacgagggacgagcaaaggctggttggcgtcgcaggctacgacccccagcggcccgcgccctcgcggcccggccccttcccttccgtcccgcccggggccgtggaagagaaaggggcctggaagggcccccggcgccccgtatccccgttcggtctgcggcccttccccctccccggccgcccgcgaactgcccgacgaggcctccccgccagccggggcccagggccggctcggtacctaatgggggcggccccgtctttgttgagcgcggagcccgggacctacttcctagaccgcacccgcgtcctcctcccgcgcgccggccggcagctccgggtttgccgtcgccgccgccgccactcagccgctgcacggcgcgtcctctcgggggcggcggaggcgcgtacagtcgccgccgccgccgccgccgcaccacgttccccacccggggctgcgtcaccgggagacacgttcccagccagcatgggtcggcgcccagcggctcgcccgagcactccggccgcagaaccagagtgccgccctgaggcctgctgagaacacaacaccctcccgaccgcgccaccgcgcccccctagccgggcgcgtccttgcagggcctgggctgtctccctcccactctcagaaataaggcacacgcctgggcattcgtgggccaacgggccttggctaaaccgtccccacatttgtcaggtaggcctgtagggtgacgggtagaggaagaagggcgatgggaacgtagccctccaagttaaacacggaaaaggtacgttaagggcaccgggccagaagtaacctggcagcggggcgccggggaaggaggtgggggagtgccaggttaactaagtcccggcacaccctactgcaccttcctgttttgcaaaccgatcccggtggtaccagtttgaggctgcactgcacacctgcacaacctgccttctacttagttcttctgagacatttctgaaagtctgaattcctaggactgctcaatgacctttgtccctgttgggcacacgcagtgtctcatcgctggtattgcacctttaatgagaccaggagttccgcaaaagtaaaacaaaggggtcacagactggttctggttctaccacttcctcagtatgtgctctgggacaaaacagcatatttggcaacatctcggtgtccttatctgcagcttgaagagggtaagattttgcatctgacacccaggaaagtgtttataaagcgttttacaggattgtaaagggggttatcgaatataagaggtcttaaaatacttaacaatgcacagcatacatggaacaggagttcggggaagtaatttggctgatatttcacaagctgttttgcagtttcagttccagtcttgctctgaaggtagaaattaagttgccagtgttacattatactggctaagttatttctagagcctcatagagaatttgaacagaaaagccagataacactcagccactgcatttagtgactgaaacatcataaaagagcaagttggagatgttggcttgtggctttgaacatccaatttttaattctgctcttgagaattaaaatactccttattgttgataattgtataatgtataataaggagtaattgacaatactccttattgttgataattgtataatgtagaaattaaattcgcaccttaacaggacagggcatatatgtattttcttgtgctccacacacaaagggcacttatttggggaacataagtaagcccagacttacatgctccatggacaaagcctatgtgtttgctgcattgaaaaaattgttgaagaacagttccttctttcaaagattcttggcacttgttttggtgggcacatacttttggcttcgatgactcaaaatctcttcaaatgttctattggtatcttagcacttgtttactgtcatagattcatttgagatttttttcctctggccatataagcactgatcctttatctagtctgaaatatatttattcttacatgtttacacttgcgttactccagggaatttcaggcagcacacagaaaacacttactataaaacaagataaaaataagtgggcaaactagtatgacgtt

SEQ ID NO: 780 - DNA, 2114 bp, Homo sapiens
ttggaagtgcagaccatggattcctatgcagcagatgggggttgtctgtttgtgcacttttttcctaagctgctgaaattcctccgatgtgaatgggccatagtaatctttgcctcctgcgtgactgtaagcatggcctccagtggatcagagaaagcagctcagtgattgttctcatggccaaaaataaagcacaagggttaccggaattgaatgagccctgttcagggcagcacggggcatctgcaccccagctgggcagcatgatccttgtattcaactatactcttctggcagtagttggtggcaagcattcgcgtgcctctgtcacaaccatacgtagaaacacattaggtatgtctggaaagctacaaatcccacatccaagcacagtaccgtctgcttcatctgattaacacacacacaagaaagaaaaattacacccacagaaaactgagtatgtattgtagaaatgtagaggaaaaataaaaatatttttttcaaatgtaattacttttaatatatgcttgtggaaggtctaatacaatgtatgctgtctctgtaatttttgctgtaaataactggagacggtgagtacactgatttttctatgtctctgtttaagcataagactttgtaacaatttttttagagggggaaaatcaacaaagagcaaatatgtacttgcttcctttctgcgtgttatgtacttctcagttttttaatggaaactggttgtaacagtttaagcatcttgacgggtcattggtgttaagtgtatgcttctttttgtaatatgactgagaaagggacagggctgtcaattaaatctgctccaaagaatttgtattgaagattggcctaagacctgcaaactccatctataactagaaaatacgaaaaaggaaaattaaaaaaaaaagttgcctgagttaagtcatctttccttgtagcaaatggctttgtccaaatcctttctgcatggaatagcttaaggaaaacaaactccgctttttgatgaacaagatatttttgtacacatttatttcttgttaataacctgaggtcagaccactcatttgctgaagccataactgaccttcaccaaataaatgttgtaaagaacctaggggagggttggggagagactgagagggaggaaaatccaaggtgtcatgagctatagcaacacaggcaggagcaagttgttgaaactgatgcttttcctgcatcccaaatatgactttaaaaggctagtattttatgatgatcgatttataatgataaaaagatatttagatttaaatgagacattccaatatttttgaaatccctaacaatgcttccttgcttttaggattgagagaaatgattttcatatacttccaacattcagagatttaatgtttttaccttagctccagcctacgcttgtaaagtgaagagtgattctaagtcccgtgaaaccgtgggctgcctggggcttggctgtgcccactaacctactgcgcctggggggcagcatgggaggggtacagtttgcatctcattagcatgcacaccactgttggcaatgcataaaagttgcattgccacaagtatgtaaaataaaaatattcactctaaaaagaataataattctacttttttaaaagaataatgtctcttatagtcaccattgatttttctggagtttaattacattattaccatgtattcttattggcctgtagaggaaaaaggcaaaccacaaataaacccagtgacatatatagttttaaaatctacaattttctgatctctctctccttgtttaatatataagccctaatttctgtgtatgtgagtaaaactgcagcctgagtcatttaggaagtaagtattgagtttttttaatcataaatatactagaataaaacagcactccctaacaattaaaaaagagttttatattactttagaatgtaataggtttttgtccttattttatgtcctgtaaattattagttcaatactgttagcattcccggataatgcacacatgatttctgaatgttttctgtaaatgacaatcaatgtttatgaagttccctcctttaatgctgaacaaaatt

SEQ ID NO: 781 - DNA, 2165 bp, Homo sapiens
ttgagtagagacgaggtttcaccatgttggccaggctggtctcgatctcttgacctcgtgatctacccgcctcagcctcccaaagtcctgggattacaggcacgagcccccacgcctggccggaagcttttttatcgtgcatcccacatgtgcccatgtgcctccagtccacatgtgaccctgctcatccctccgggttttcatgtgtttctgtctcaggcatgaattgcttttaataaagtgtccgtggggggccgtgtgccccccgggatctctgtgtcttccagcagccgactgaggcacatcatggccgagatgatcgccacagagagggagtacattcggtgcttaggatacgtcattgacaactattttccagaaatggaaagaatggacttgccccagggccttcgagggaagcaccacgttattttcggcaacttggagaagctccacgacttccaccagcagcacttcctccgggagctggagcgctgccagcactgccccttggccgtgggccgcagtttcctgagacacgaagagcagtttgggatgtacgtgatctacagcaaaaacaagccgcagtcggatgccctgctcagcagccatggcaacgccttcttcaaggacaagcagcgggagctaggtgacaaaatggacctggcctcctacctgctgcggcccgtgcagcgtgtggccaagtacgcgctgctactccaggacctgctcaaggaggccagctgtggcctggcccaggggcaggagctgggcgagctccgagccgccgaggtcgtggtctgcttccagctgcgtcacggcaatgacctgctggccatggacgccatccgcggctgtgacgtgaatttgaaggaacaggggcagctgagatgccgggatgagtttatcgtttgctgcgggaggaagaagtatctgaggcatgtgttcctctttgaagacctcatcctgtttagcaagacccagaaggtggagggcagccacgacgtctacctgtacaagcagtccttcaagacggccgagatcgggatgacagagaacgtcggggacagtggcttgaggtttgagatttggtttcgcaggcggcggaaatctcaggacacctacattctccaagcaagctcggcagaggtcaagagtgcatggaccgatgtcatagggaggatcctgtggcggcaggcactaaagagcagaggaaggcggggaacaccccccaggcagagagacctgggcagccaccgccatgaatgagagctctctggctgtccccaggccagctatgctctgacggccaagcgtggtggtccttgcctgtgtccgagcgtggggttagttctggaacatttgatcacttctcctgctccactctctgcactccacctggaactcccgattacacaactcagaatccaagaaatggcatccatgggtataggcaaccagccattcatggatgtcaagcccagagaccggacccctgactgtgcagtgataagcgaccgggctcccaaatgtgcagtgatgagcgaccgagtccccgacagcatcgtcaagggcacagagtcacaaatgagagggtccacagcggtgtcctcctctgaccacgccgcccccttcaagcgaccacactccaccatctcagacagcagcacctcctcttctagcagccagtcctcctccatcctggggtcgctgggcctgcttgtgtcctccagcccagcccacccgggcctatggagccctgcccacagcccctggtcatctgatatcagagcctgcgtcgaggaagatgagccagagccagaactagagacgggcacccaggctgcagtgtgtgagggggctcctgctgtgctgctgagccgcacacgccaggcctgatgactgtcagggtggcagtgcccatcatgtggctagaacaatacagagggagcagcacgccaggcctgatgactctgggggtggcggtgcccatcgcgtggctggaacgatccagagggaatagcacagcaggtgtccaggtatttcccaggattttagacattccctaacattttcaaacaagtttataattttgtcttatttaaaaaacaaaccttccacttccacccaagacaacagcataggaaacagacctaaaacaagac

SEQ ID NO: 782 - DNA, 2351 bp, Homo sapiens
aatacccccgggttcaggtcatcacacagccaaggcaggagctccacactgacactaagggtgcatcctgggctcattcatcagggcatgcctccaaaatatttctccacgtctcctccctttgcccacctgcattgtctctgtgcctcagccccggctgggggcctgcaaggatcccctatatcctctgcccctgcacggctgggtcccaggccatctgtccgcccaccacacctctctcaccttgtccaccacgctccagcaccacagtcctctttctgcttctttcccagcctctgggcttttgcacacgctgttccctctgcctgaacaccctccactgggctgagaacaactctctgagacctctctcagctgttgcttcctttgaaacagccgctgctgctgtcactctcccagctccaagacctgctgagcctcctgtcttttttagttcccatgtccccagcacttctccttggcctcctttggcccaattgacaatgtccattctcaatgccttctcacccagcgctgagccccactgggtgaaggcaatgcctgtcatgttcaccacaatatcccctcccccatcaccacgactggtccacagtgatgctcaaaaaagatctgttggtaggcaatgtgaaggtgcattcatgtcatcctgcaggcggaattctccacgagttttgagcagcctcggttttcccaccacctccaaatcatgcaagacacagggtaagagcaaagacaaggtggctgtggccgatgtccaccctctcggggcgtcccttctcttctctcctccttgagcagggagaccatcggggtgcaacctggttggggcggggaggaggtgcagggcctggccagagcgggcctggccacgggcaagggacagcgacccccgggccaggacaggtgagagcggcgcaggcccgggcccggcgtggcggaggtgcgcgtgagcggccagcagagggcgccagagagccaggagcggcccgcagaggagcccgcgccggccccggtgcccacctccgcgccgcgcggaccctccgagcccgcgctcagacgccccagctccgccgagaggccgcttgcgccgggtccttcttccccaaatgcaggcagagcccccggagccatggccagcccttccggcagctccaaagccactggcaagccccgaggcagggatggccggcccaggagggaggaggacgacgtccctcccgaagagaagaggctgcggctcttgctggaggggggaagcgcacagccccaggactgcgaggacggggaggacgcgccgcggccgggcagggaggagaccggcacccagacaggtggcgacggcagaggagtaagtgacgcgggcgcgggggtccgggggtgccgggagcgcgggggtgctggggacgcggggtaggggcggcgggaggctccgtggcctgccccgggttaaagctgggagggcggccttcattctgaacacatttaggcagcacgggcagccctcctcgccgtgggctgcatcagagcccccctgcccagtcttggggttgctcccggatgctgtctgggaggcttgctcatggtgacatcctcatctccccgtgcacgttactgcattcagagcttgggtcacctggacactgaactctgagtgaattttctctgagatcccgggagaaggaggacagttctctggaaggttttccagggccgatcacggaaaggatgagaagggagaggttctggtcggggacacaattacggtggcagtgtaacatcaggaaactttattgcgtgaagtccctctcactccctctacctccttcttttacgtggactctgccaaagaccaggataccagaatgcactgcagtgaccaaacgtagtgggaccttgggaacgcgagtctggagccaggcggctggggtttgcatcctggttctgcccctccttagctggctgacatggcacaagccacttaccctctctgagccttactgtcttcagtggcaaatggatctgtcaacaggccccattgcctggggttgttactgctgagattaagggatgctcgtccatagaaagacttagcgttgtgcctggcacatagtgtatggtggataaatgggacttaggactaaaactcatgccttggtgtgtttttgcagtgatgttttgttctggggtgcatcacaagagacaaggttcttggccgggcatggtggctcaagccaataatcccagcactttgagaggccgaagggggaggatcgcttgagcccaggagtttgagaccagcctgggcaacatggtgaagcctcatatctacc

SEQ ID NO: 783 - DNA, 1789 bp, Homo sapiens
agttccttcagtctcagccgccaactccggaggcgcggtgctcggcccgggagcgcgagcgggaggagcagagacccgcagccgggagcccgagcgcgggcgatgcaggctccgcgagcggcacctgcggctcctctaagctacgaccgtcggccccgggactccgggagaatgtgggtcctaggcatcgcggcaactttttgcggattgttcttgcttccaggctttgcgctgcaaatccagtgctaccagtgtgaagaattccagctgaacaacgactgctcctcccccgagttcattgtgaattgcacggtgaacgttcaagacatgtgtcagaaagaagtgatggagcaaagtgccgggatcatgtaccgcaagtcctgtgcatcatcagcggcctgtctcatcgcctctgccgggtaccagtccttctgctccccagggaagctgaactcagtttgcatcagctgctgcaacacccctctttgtagcgggccaaggcccaagaaaaggggaagttctgcctcggccctcaggccagggctccgcaccaccatcctgttcctcagattagccctcttctcggcacactgctgaagctgagggagatgccaccccctcctgcattgttcttccagccctcgcccccaaccccccacctccctgagtgagtttcttctgggtgtccttttgttctgggtggggagcgggagtccgtgttctcttttgttcctgtgcagataatgaaagagctcggtagagcattctgaataaattcagcttgactgagttttcagtgtgtacttgaaggagggaggtggagtgaaagttcacccccatgtctgtgtaaccggagtcaaggccaggctggcagagtcagtccttggaagtcactgaggtgggcatctgccttttgtaaagcctccagtgtccattccatccctgatgggggcatggtttgggactgcagagtgagagtgacgttttcttagggctggagggccagttcccactcaaggctccctcgcttgacattcaaacttcatgctcctgaaagccattctctgcagcagaattggctggtttcgcgcctgagttgggctctggtgactcgagactcaatgactgggacttagactggggctcggcctcgctctgaaaagtgcttgggaaaatcttctcagttctccttgcagaggactggcgccgggacgcgaagagcagcgggcgctgcacaaagcgggcgctgtcggtggtggagtgcgcatgtacgcgcaggcgcttctcgtggttggcgtgctgcagcgacaggcggcagcacagcacctgcacgaacacccgccgaaactgctgcgaggacaccgtgtacaggagcgggttgatggccgagctgaggtagaaagacgtctccgagaaggggaggaggatcatgtacgcccggaggtaggacctcgtccagtcgtgcttgggtttggccgcagccatgatcctccgaatctggttgggcatccagcatacggccaatgtcacaacaatcagccctgggcagacacgagcaggagggagagacagagaaaagaaaaacacagcatgagaacacagtaaataaataaaaccataaaatatttagcccctctgttctgtgcttactggccaggaaatggtaccaatttttcagtgttggacttgacagcttcttttgccacaagcaagagagaatttaacactgtttcaaacccgggggagttggctgtgttaaagaaagaccattaaatgctttagacagtgt

SEQ ID NO: 784 - DNA, 2585 bp, Homo sapiens
tgaacaagacgagaacattgacaccagggctgaccataacctgatcatcaggcaggcacggctctcggactcaggaaattacacctgcatggcagccaacatcgtggctaagaggaaaagcctgtcggccactgttgtggtctacgtgaatggaggctggtcttcctggacagagtggtcagcctgcaatgttcgctgtggtagaggatggcagaaacgttcccggacctgcaccaacccagctcctctcaatggtggggccttttgtgagggaatgtcagtgcagaaaataacctgcacttctctttgtcctgtggatgggagctgggaagtgtggagcgaatggtccgtctgcagtccagagtgtgaacatttgcggatccgggagtgcacagcaccacccccgagaaatgggggcaaattctgtgaaggtctaagccaggaatctgaaaactgcacagatggtctttgcatcctaggcattgagaatgccagcgacattgctttgtactcgggcttgggtgctgccgtcgtggccgttgcagtcctggtcattggtgtcaccctttacagacggagccagagtgactatggcgtggacgtcattgactcttctgcattgacaggtggcttccagaccttcaacttcaaaacagtccgtcaaggtaactccctgctcctgaattctgccatgcagccagatctgacagtgagccggacatacagcggacccatctgtctgcaggaccctctggacaaggagctcatgacagagtcctcactctttaaccctttgtcggacatcaaagtgaaagtccagagctcgttcatggtttccctgggagtgtctgagagagctgagtaccacggcaagaatcattccaggacttttccccatggaaacaaccacagctttagtacaatgcatcccagaaataaaatgccctacatccaaaatctgtcatcactccccacaaggacagaactgaggacaactggtgtctttggccatttaggggggcgcttagtaatgccaaatacaggtgggtggtaagtgtgtgtttgtgtattttccatcatttaaatgtttcatttttacacagttacttcccatcagattcattttatgatgtttactctcccctcatcagacctgcaaacactgcggctccactagtccacttgatttacacagcaaaccagaaccaatgctgagattagattttgcagtcttcatctcagcatggattgaatgctccctttgattccctgttagagctgataactatatttgcctgaaaggtttgggtagtccccaggctttaagcccctttggagtatatttcctaggcatgataagaaagcactgaaaaaattctctggcatgacagaccagggccccatgtttatacctaagcatggtttatgtactagtttgataatttagataatttagtgaaacgacatctcatcagtaactgacctaatgaacactccatagcccttgctatagtgttactttctggtgagcaacgatgaggggttgttgtagagttgctcttttgaatttaaacttcagttccagggctatgtcagtataatgaattctcacatattttgttcctccttttagctggaagagaggagattttcatgatgttttgacatgatacttaaagtatccagcccagatcacttttaaaatgatatcctttctatggattagttttcaaagttgctgcctaagacctaagtggatggtagacaaggtcaatttctgctcggatttctaagcaatgagaattaggtagtgcactgaagcaggtagtgatctgttggctgctaagagggaagagtatctgttggatctgtaagtgtttatcaaacaacaggtcagcattgagtcagggacattatagtctagacagatgtctctctagggtggagctaaccaacctctcaaatcgagcatttcattccataaataaaatctgtaataggactagtctgattctaccattctagctaactgacccctctagtagcttagagactggagactgaaattcatttctagttgatgaatgttgtcttgttctcccctagagcaattacttccttaaaatcttcatttcaaaacatattttacttcatcaaaatagccctcaatggcagccgtaattgaatggttttgttttttaaatttctaattctctaaatcttcattggtcaatgttttaggacatggtaaggatctttgttcaaatgtgtatgcgtgtcaatgtgtgaatgcctacgcatgatttaattcttccagttgataattggaagataatgagtcaatcagacatatttaccaattaacttttctgtaagaattcataaactagacatgtgagtcctgaggaaagaaaaagaatacaacccttgccctaaagaacacgacgtgtcagaattatataaaatttggcagggtgtagtggcacacacctgtagtcccagctactcaggaggctgaggtggggaaatcgcttgagtctaggaattcgagaccagcgagggcaacatagcaagttgctgtctct

SEQ ID NO: 785 - DNA, 2954 bp, Homo sapiens
agagcccgcggcgggggaagccgcccctctcctctgtccaggcgctgggtggtccatccgcctggtcaccggccactgcctctctcccaaattcctccgagggattcccgaggagtgcgctcggactggggggttgagcaggaactccctcccagtcacccgaggctcctgcgccccgcccgaagccgggggtgcgtggggagtggtgcgcccgcggaagggctccgggacgggaaccccccttggagcctggctcttggaccagccacccgccgtggcccctcagtcggggacgcgggcccccagaagtctggggctctccaggaagcgaagcggatggaagattactcggctcggggtcccgggtccccacccccgccccgcccccgggccgcagcgtcacaaaggccgctggtccccagggcaacccgcggagtgcggagggaggctgggctctgggaagtccgcgcgcggctccgcttcagaggcagggcaagtgggcgcggtcctggggcggcggcgggggccgggagaggagggctgggggtctcgagaaggtaaggggcaggcagagcggccggggaggtgggcccgggccaggggagccaaggggagtgtggtggagggggtagagtgcgggcacctggtggtctcagggaagcgggcctgggaccggggcgtgtaggaagcagcgaggggctcagaaccacctttccgggttcacgaccagcctctctgggtgttccacctgggcagctgctggagactagaaaacatccctcacacgtcacagaggcacggtttccctccagcggtgaaatccgccccagcctccagcaagagcagggcttaggcctggggtcctggggtcctgctctcagctggcacctcaccccagacacactccctgctgcccccaggggcctgttctcgagggattcccgaggagtgcgctcgtgaagtcatatctgcctcacgcccaaaagggcaacccttcccgggcagatatgacttcaccacgtacctgtgtggccctggggaactcagcaactgcttagctctcatttgtgggtcgtccaaggcccaagtggctgtgacaacctgagatctccagggttgctgggagccggggcagcaaccaggggtgcggcttgctctccagggagctgcggcagagcctggggccacagctgcactcagccggtgcacccacggacagagggtcagactcggctcagcactgggctcaagccctggatgagaacaagaaccaagcttcttagcctcaggctccatctgggaaatggagtgtcacttgtggagtccatgagctcaccagggacaggatcccgggtccacagcgagggcccacagcgtgggaggagggctgctcctccgggcccaggcctgggcgccctcctcccatgctgaccggccagctggcctcgtctttggtgaggcctgtctctgtgccctacaactgcggtgaggcgtggagcgtccccagggagaaccggagcgggaggatggcccgcgaatgtccccgagggggatcctgtgctgcttaggaccacgccgtcccctctccacggccccgaggggtgccagcaacccctttcagcagcagggttaggaactggggcccttgcaaggccacaggtcaggcggttctggccagaagtccgcagtcctagttcttccctgtcctgtcccacaggccactggttgtcagtagaggtttttgcccctcagtataaactgtgtccagatctgtaggctgcccatccagccctccaggcagcctcttcccatcgagttgtgcccccgaagaaggacagaggtccagcatggggtcagtgggctgaatccatcccccgaacatgccacagcccaggggaggccagcctgcctggcagctgacacccagccctccccccagctcccggataatgagcacccatgtggcaggcctgggcctggacaagatgaagctgggcaatccccagtccttcctggaccaggaggaggcagatgaccagcagctgctggaaccagaggcgtggaagacctacaccgagcgccgcaatgccctgcgtgagttcctgacctcggacctgagcccgcacctgctcaagcgccaccacgcccgcatgcagctgctgcgtaagtgctcctactacatcgaggtcctgcccaagcacctggccctgggcgaccagaacccgctggtgctgcctagcgccttgttccagctcatcgacccctggaagttccagcgcatgaagaaggtgggcacagctcagaccaagatccagctcctgctgctcggggacctgttggaacagctcgaccatggccgtgctgagctggacgccctgctccggtcgccagacccacggcccttcctggccgactgggcgctggtggagcggcggctggcggacgtgtcggccgtcatggacagcttcctgaccatgatggtgccggggcggctacacgtcaagcaccgcctggtgtctgatgtcagtgccaccaagatcccgcacatctggctcatgctgagcaccaagatgcctgtcgtgtttgaccgaaaggcgtcggcggctcaccaggactgggcccggctgcgctggttcgtcaccatccagccagccacatcggagcagtatgagttgcgcttcaggctgctggacccgcggacacagcaggagtgcgcccagtgtggcgtcatccccgtggctgcctgcaccttcgacgtccgaaacctgctgcccaaccgatcctataagttcaccatcaagagggccgagacctccacgctggtgtacgagccctggagggacagcctcaccctgcacaccaagccggagcccctggaggggcccgccctcagccactctgtctgagagatgattttctaatatttatccactaataaagaagagtgtaaatgc

SEQ ID NO: 786 - DNA, 2766 bp, Homo sapiens
gcgtttttgttcccctccccccttcagcaacgggccgtgaggcggtggcggtggtggcggtggcggtggcggtggtggtggtggcggcggcggcgaagggggcggagaggaaggagcgcggcgggaccgggccgggacagcgcgtactttgggctccgggattcgctccgcgcccgcggttgtagcagctgccgctgcagccatagcagcaggacttcctcaagcgcagggactatgtcttaaggcgctttgcagagccaagctcatttctggcacataagaggtcagtcattggcaccatgaactggaataaaggtggtcctggcactaagcgaggatttggctttggaggttttgccatcagtgctgggaaaaaggaggaacccaaactcccacagcagtcccacagtgcctttggggcaaccagctcttcttctggatttggaaagtcagctccaccacagcttccttctttctacaaaattggatctaagcgggccaactttgatgaagaaaatgcctattttgaaaatgaggaagaagattctagcaacgttgatttaccttacattcctgctgaaaactcaccaactcgccagcaattccattccaagccagtagattctgacagcgatgatgatcccttggaggcattcatggctgaagtggaggatcaggcagctagagacatgaagaggcttgaagaaaaggacaaggaaagaaaaaacgtaaagggtattcgagatgacattgaagaggaagatgaccaagaagcttattttcgatacatggcagaaaacccaactgctggtgtggttcaggaggaagaggaagacaatctagaatatgatagtgacggaaatccaattgcacctaccaaaaaaatcattgatcctcttccccccattgatcattcagagattgactatccaccatttgaaaaaaacttttacaatgagcatgaagagataaccaacctcactccacagcagttaatagatctccggcataagctcaatcttcgggtctctggtgctgcacctcctagaccaggaagtagctttgctcattttgggtttgacgaacaacttatgcaccagattcggaaatctgaatacacacagcccactccaatacagtgccagggtgtgcctgtggcattaagtggtagagacatgattggtattgccaaaacaggtagtgggaaaactgcagccttcatttggcccatgttgattcatataatggaccagaaggagttggaaccaggtgatggaccaattgcagtgattgtgtgtcctaccagggagctttgccagcagatccatgcggaatgtaagcggtttggaaaagcatataatcttcgatcagtggccgtatatggaggagggagtatgtgggagcaggccaaggcccttcaggagggggcagagattgttgtgtgtaccccaggtcgactgatagatcatgtgaaaaagaaagctaccaatcttcaaagagtctcttaccttgtgtttgatgaagcagatcgaatgtttgacatgggatttgagtaccaagttcgatccatagcaagtcatgttcgtcctgacaggcagactctcttatttagtgcaacttttcggaagaagattgaaaagttggccagagacatcctgatcgaccctattcgagtggtgcagggagatattggagaggcaaatgaagatgtgacacagattgtggagattctccattctggacctagtaaatggaactggcttacccggcgtctggtagaatttacctcttcagggagtgtcctcctctttgttactaaaaaagccaatgctgaagagctagcgaataaccttaaacaggagggtcataatcttgggctgctccatggggatatggatcagagtgagagaaacaaggtcatttcagactttaagaaaaaggacatcccagtcctggtggccacagatgttgcagcccgtggtctggacattccttcaattaagactgtcattaactatgatgtggcacgagacattgatacccacacgcataggattggccgcacaggaagagcgggtgagaaaggtgtggcctataccctactcactcccaaggacagcaattttgctggtgacctggtccggaacttggaaggagccaatcaacacgtttctaaggaactcctagatctggcaatgcagaatgcctggtttcggaaatctcgattcaaaggagggaaaggaaaaaagctgaacattggtggaggaggcctaggctacagggagcggcctggcctgggctctgagaacatggatcgaggaaataacaatgtaatgagcaattatgaggcctacaagccttccacaggagctatgggagatcgactaacggcaatgaaagcagctttccagccacagtacaagagtcactttgttgcagccagtttaagtaatcagaaggctggaagttctgctgctggggcaagtgggtggactagtgcagggagcttgaattctgttccaactaactcagcacaacagggccataacagtcctgacagccccgtcaccctcaatatatctggattatccgtgtcattcagctgcctcctttctggtcctcttgctgctgctgggatgtgtgtatgtgagggtcttcttcccataccccttgcacctggtgcctggtgcctcaaaaggtggtgtgtcccttgccaggccactctcaagaatatctatgtacagcaacaatataactctacaaggg

SEQ ID NO: 787 - DNA, 3691 bp, Homo sapiens
tctgtcttcttaaactgcagttatttttgaattataatttggttataaaaatcatggatgggccaggcactcacgccagtaatcccagcactttgggaggccgaggcgggcggatcacctgaggtcaggagtttgagaccagcctggccaacatggtgaaaccctgtctctgctaaaaatataaaaattagctgggcacagtggcacatgcctgtaatcccagttacttgggaggctgaggcacgagaatcccttgaccccaggaagtggaggttgcagtgagatcgcgacactgcactctagcctgggcagtagagtgagactctgtctcaaaaaaaaaaaaacatggatgaatgttttaaatgagatgttcctgattttctgttttccgtacttgaatttcaagcggtggtttctgaacttgcacagtttcaaccaggcactcaatcacgggcgtattccgagggaggggtttttaggtctgtgctgggacttgttctgcacttctccaccctttccagggatgggaaagtcaagtatatgtcataacttatccctggggaaccccggagccttacttctgactcttctgcggcccattgcaggaaagcctgactaattaggaactggattgaatgtggggtggggtgggtttcagttcttagttacctgttcacagaagtgggaaggagaaatctgtctacattgttttctttgctggagcaaccatccaagggaaaccttttaaaatctttcccagaaaaagattttatttatgatggagaatactgatatttgtcagcaatttatgtttacataaaaataagtttaatgattaaaatgattgtcttctcctaatccagtcatccaatctttctgaagtttcagtaccttggggacagattgaccaacatttgtatctttgttcttaacgttccctaacggcatattttaaactaaactgatgtgaagctaacttttccttgaatttctgagaattctttgacttctgaggtagttggtataatacttgggctcttacaaaaccaggattgggaatccctgctgtggatctgtcatctttgctgtttcttctccaatattcttctccctcacagatgacctttcacccccctcaaggttttccagtttctattctttctcactctctgctttttcatttctagtacttcatagccaataagctcagcagttgttgttgatcattccctcaaggtgacacgaaacctgtttattatcaacatgtagtgattttttttcccattaagattggctacaaaataaaagtgtgaaatacgccagacatcctgacagtaaaggttagctcagttgatagtcattgtctgtcgcatgtctggctggaaaattggaacgtcggtgtttgctgcttggtgtgagtccagtttaaaaaccaacgatgaccttaggcaatggcaggattccttagcggttgcttgggtcacaagcctagacctgaaagtaccctctaaactttctgcattctcattcctgtagcagctactgcagccaaccaaatccgcgccccacccctgacttcccatgtggagccgggtgtgccaggtatatgtcacaaggccatgccccgggacgggcagcatcacatggccttccctgacccaccctttggctctgtctgtcccagcccttctctagagagtagtgtcccacttcaggtcaccagctgctctaggggcagaggctaccctctttcatggatgctaataacaaagaacaaacatctcagaagggaacataagaaccgcattatttggcttttctgatgttgggcagatcagtgaaggatgctgttgtgctccagtcactgacatttttcatagaacattaccccaaaggacacagaaatgattccaaaaaatgtagaagtctttgcctagtaggtcactgcaaagtgctaaaatctgaagaaaggaagagcagttcataaatgcttatcttcacattgttcattgggctgccctaacctcccctgctcccagagaatgccagatggctttacaattgaggtggttcaaacacagaaggccctttttccttttattaattgctcagctatgtgtacattggcccccacacctgccacctgaccagcgcggcttctgcctccctcagcactgccagccgggggttttcttagactcatcccctgggccaccttccgctcctctccctccctctgcattaacatccaggccaccctcattactccttggcaacctagcttgggttggcctccccagccagccttccagactattctttctctcccttgcagcctgtcttgcacaccactgtggccaggtcagtctttctgagaataccatttcctcacatcatggccctggttacaaagcagtttcccatttgcctatcacatcagatcaaatcagaactcttcggctctggattgaagccgacgccactgttcctggcaagcctcattgccctccgatcccggcgttggcctccgtccctgtcaggtcttgtacgatgctgctctctgccatcctgccgtctccagctctgcctgcatgttggtcctgcattgctctccacctcacagactcttattccacggctctggccagtccaaagcatacatggcccagttagttcccttttacttgaaatattccctgaggagcccccaggtatttttccttactcactggagacttgtagtcagggccacactgatgtcatttgggaattatttgcaaagtcacagatctggacttctctctccagctaaatcatgagttcctcagctaaatcacgggcccacagttctgcagcagctggtaaacacttttagtcacggaaggaagcctttttcggttctcagctctgccaaggaacttatttcacgtacacaaaaccacaaaccgtgagaggattgctgcctgtatcctgttccccctcatctttttttttctttgaaaagatggtaaagctgattataagaatttaaataacgtggccctagaactacactctgactctgatccgcgtgtcctgcccacagcaccaggccacgaagacagaccatgtcgctatcctcacatttgcttgtaacttaggaggcttgccagtaaaatcgatactaacagtggacgtacttctctttgaataagtttattctatttccttctcccattttctttatttgttgaaaagaatgatgctgattgagaagccaaatattgttaaccattttccccgtctggcacggttcttttgcacagcactggattaggccaggggactggcctaaccctgcaaatatcaggaaaggactcttctagggaaagtcgtactaatttgaattgatcactagaaatacatggtctccacctaaaagatgctttgtcacttaaaaggctgagtagtcatcataatgtaaagaaacctctattgtcatgcaaccatttgcacccagacattgtgcctggttggcacttaacattttatcacttgattctcacaccacccttgcaatgtgatgaaaccaaggctcctaggtgctaagtgacattcccctagtcacgcagcctagtgctagtcacgcagcctagtggtagagcgaggattcaaacccagtttttgttttcctttgagctggagctgcaag

SEQ ID NO: 788 - DNA, 3129 bp, Homo sapiens
ttaaataaccaaatgctaaaagaactggcatagaagtaaatgggctgctgctttatttttaggctgttctttttagagagcaatgacagttatttccaagtttgtcattagaaaataatattaggttggagcaaaagtaattgcagtatttgccattgctttcaatggtaaaaggcacaattacttttgcagcaacttaatattataaatttgttccttaaagtgtatttttgataagaaagcccttttgtttttccttctgttaattttttgtctttttcttggtagagacagagttttgccatgctgcccaggctagagtgcagtggtgtgatctcggctcactgcagcctccacctcctgggctccagcagtcctcccacctcgacctccctaagagctgagactacaggtgtgagccaccatgcctggctaatttttagagacagggtttcaccctcttgcccaggctggtcccaaactcctgggctcaagcagtcctcctgcctcagcctcccagagtattgggattataggtgtgagccactgccagaaaaacgtttcctaagacaaggcaggtcttacattatatttaaattttttttaatgatgtcttttttggcagtgcacagccagagaacaacacatcacacacaagaaacagttgtgctcatgtgatgggggcctcagcactaggaaggagtggactgttggtgcacgcagcagcttgaataaatctgaaagtcactatgctgcgtaagagaagccaaataaagcgcatgctgtgtacagagggtgtcgagaatgcctcctacgtgacggaaagcagatccgtggttccctgcagactggcaggagcagattccaaaggcacaggaagaagcttgcaggtagaatgtgttcattaccttctgcgcattataccacaaaaaagctgggaataaaaatgctaaccaaaaaaaaaggtgaaagtagataaaatttctcaactgtgtgatgggtaaacgtgcaggtttgctgtcatgctttgtttatgaagctgtggggtacaaggactctcatggtcactgtggaatgcagaacgttgcagcctcatggaagaggatttggcagcatctaacaaaacgacatggcatttgcccttagactcagcaattccagaatctgcctcaaaaaaaactctggcaaagaaatgaaaggactttacccacagagttcttttcacagcctgaatgtgtttgccacaaagttcttcactgtggcatttgtaaaactggaaacaatcaaaatgtccatcagtaggggattgggaacattaattcgtgcagtggggaactccgtaccagaaggaggaatgaggaacgcctattgataaggggcagagtacatataatataatgccaatatttgctttttcttaaaacagtacaaagataaaaatctaaagtggttgctgtggaggacaggggtcagtggtggaagtgagaccgaaatagactctgaagtaatatctggactttgaaattgtaagtgttttacatattaccaaactaagtttttaagatagtccctaaaattgaaagaatggtatctgaaatgaatgaatctaaattccttggattgcattctacaggcgccaaccctgagaccaaaatttggaaggtggccctgagcagcagctgaagggaagtgggaggtgagacaggaaagaggcggcggcatggggcgtccgggagccgggtcccatgtggacagctgggcccgtgctcactgtgggagctggtgcgttccttcaccagcccacgctgcacaggttcaggatggtcaattccgggcacccctggcctgctccaggacatgctgctgccaccagagaaagcccctaggcagcgtcccgggtgctggtggtgtcagaatcgagtttgagtctgaggagtgacctggggctggctgggctaggcagcatcacggggttctgcagcccaactgcacatcaggctggtgacagtcacgcagcctattacttcatgtgtcatcagaggatcgctagaacacagcacttcaagtgtgcagatttagtgagccatagtctaaagacaaatagagccactgaatcctaaatttcaatcaatcatctccgttgctcatcttattggtattaatcctttgaaattatgtggggtgggagttaaagctaataactaattatgttaatgctaaaactaagatttttctggcaagggaaaatcctcccaagtcccagcactttgggaggccgaggcagacagatcacctgaggtcaggagtttgagaccagcctggccaacatggtgaaacgccatctctactaaaattgaaaaattagctgggcatggtggcaggtgcctgtaatcccagctattggggaggctgaagcaggagaatcgcttgaaacaggaggcagagattgcagtgagccgagattgtgccactgcactccagcctgggcaacaggaacaaaactctatctcaaaaaataaaacaagatttttctgagaaaaaggtgtaaaaccgtatactaaatttgaaatagaaatataagcgtgaactcatttgttgttcttttaccgtagacacatttcctagttctgccccagtagcagtagacacatcaagcacctagaaagtggtctctaatacatgaaaaccatgaattcatagtgatggtttcaaagccaaaaccaaccaaccaaacacatgtaattggtcactcttggaggtacctagggcactaactcctaacactgggaatggacacttgaaggaagatcagtgattatcctgtcttttctctacaaattgcaattcagggaaaccttgttgattagggaaagttctttacataagaattcctgcaaataagtgagtaaagaatgacagtttaagaattgtctcagcctgaccaacatagtgaaaccccatctctaaaaatacaaaaaattagccaggcatgatggtgggtgcctgtagtcccagttactcgagaggctgaggcaggagagttgcttgagcctgggagatggaggttgcagtgagccaagagtgcgccactgcactgtagcctgggcaacaagagcgagactctgtctc

SEQ ID NO: 789 - DNA, 2718 bp, Homo sapiens
ggatgaggatgccaggcactctgcttttcctaaacaacttccaagaaccccggaacatttcttaaagtgtctggaacgaagctttaacctcgcctgctccatcagcctgggacggaaaagacgcgaggggcgaagaagaggtggggcacggggagcccgggccgttcggcgtaagtgatccaggcttccagcgccccgggcgcaccccgcggaaaggcgtctgggagtcggggacgtgcggggggagaccacccggccaaccccgggggatgagctgcaaggctggccacgcccggcaggagactgcgcgcagagacccgcccggggaagcacgggaggagggagggcggccatgtacaacccctggcaggtgggagcctccctggcgccagctcgggcagggccacgccccttcccaactccccgcgctcggcctccggactgctcagggggccacgccccttccggattccccgcgctaggcctccggaccgctcagcggccccgccccttctcgagttctccgcgctcggcctccggacggctcagggggccacgccccgtcgcccggggccccgcccactcctcaagccccacgggactcccagcctacctccctcccgctgccgcactggactcccagacctcggcaccaaccgtatctcctgttactcgccccagggtggttgcccggggaaaaactccaagggtttcactggctggcctggaaaccctttcatctttgctccatcagcagcagctctttgattgagttctcctggctttagagcctcccactatggtcatgctgcaaattcccgtggccagcacccgaggcctgctggctccgatctgggccacgtgtacaaccaggtgtgcccccttagcctcacgccctcctcctgttgcctccccatccctctagccttcgggacttggggttgcaatgaatcttaggttttttccaggagtcttttattcctccagcgtctccgtgcgcctgtccgctccaacacctgacattttccttcaactccaccctcccctccccgagtccacagacacacacccacccacacgcctcttcccttcccctccaccctcagtcagcggcagagtcagtccatccaataggcaggagcccaaaagactgtccacggacagctgtcctctcgcccaggagagtggggctgcacacagcagcaggcccaggaggaaatcgtgctttgatagccccaggcatcgtatttcatcgtatttcacaagtgagccaaatggagaagggattagctgtttcacccaataagcccacatctgtagttacattctgactgggataaaattaccctggttattaatccttctgctttagggcataagctgatcaccagctggggtcaggaaaaaactccaccccagctccttccaacttgctcccccatcctcagctgctccatttcctgtggtctattcttgcacagttaggtctacaagccaggttcaaggccaccaactgaggcacctgtcccgagacaggaccattctaatctgccctaaaaaggacatcccattgatcatgtaagtatgtactgagaatctactgtgggcaagacattggtcttcgctgtgggagatacaaaaaccattcaggcatggcccttgcctttttcatgccaagaaaagctgaagtgtgtggtcagaaattgcatgtggtttctgggacttactgccctgaagcaccctgggtgtatcggatggcctcagggaacacagtttgggtatgggcagtattttcatgcccattgccattcccttctgcctcaagtgtatgtgggctttccctgcagtcagccagcaggccaggccagggtggctttgtttctgtctctgaccctttctcttcagactccaaatctgcaggtgctggagactttgaaggagtctccgtttcccttggtagaaacaagaggtaggaacaagcaggtggaaagccagggttactccttccagccaatgggtctggggctgcagcacacaaagttgacatcccgaaaggccattttcctcgatcgcttcagacctggcattgggtggacagaccacatgattcagcatccaaattggagatctctcaataacagaaagaggtgccattgataatttcgtggaactttcctgagcacaccagggtgtgctcattcttcctgaggggtcatctcccttgggcatcgtaagaggcaccactgagacacaacagcttttgtcaccatttcccaattgtgtcccaagctctctgtcctcttccctgtgctggtcatctcacagtcttcttctgcaggtagatcccccctacttcagcccttcctcccacctcagctcctttgttcccgctgccatgcccagaacaacctatatttccactctccaaccttggatcaacccaactgtgttttcacgctactatgtccaggatactggatgatactagagatagccatcagtaacattcattacatgaataagtctgggttgatcctgtgacacagttatgccttctaccctctgctgcttctcaacattgctcagtccttatgttggtgttctcatttcacatgatagagttccaaaccttttgtagcccgaatcgtcatctatcccctaattcttggaaaagaccctaacttcaccaatagcaacaacaatcaaaaccaactgaac

SEQ ID NO: 790 - DNA, 2552 bp, Homo sapiens
agcagcagagaccggcagcggcgggcggccagcgtgggctactgctgggggctgcgttcgggcgaggaggggagattctgtctcagaggcctcgggctgcacgttcttccgggccgcgcatttgcagcccacagcaggccccagccggcccctctggagttgggccactgcttctgcaggcccagcaggcccctgggggcggccggaggccactaactggcttctccagctcagcattcttctctcatttgctgggtaccccactctcttctctacccccttgaaccatctttaccctcattcctcagggaacgtttaacgagttgaatgtttaccatgtagtcactctatatggaaatcataattcaattttgtaaacatcagactttgacaaaacaaatgatgattttcttaaggaaagcagagagacacagtgtgaaatcgctgctctcagatcagcacacgggagaggccagcagtcaggagggggctcaccgagtttgtctgcactcgctccctccgcagccgccctctccagctggaagaagtcgtaatcgaacctgctcaggtcctcactgccccactccgaaggaaaccccacgtacaggtgaggtcagaggagtgaagtgacttgcccaagaccacacagtgagtcaggagcaggcctgtccctccagcagtggtgccatgttgtccccaagccatggtggcagaggagctggtgtgaacgccccatcctgccacgtctgtgatgtgggcacctcacatgactgtcccctcccagctcttgggggggacctaggacattctgtgagcctgcaggaaagtttaccaaatgctgcagctttgtcctggtggtgatgggcaccccgttaacggcaaccttgcatttgctatgtggagtgaccgtcactttaccgtcggcatttgtgaaggaagcgtgtttatctgaaattctaagaagatgagagtcaaagacacccagcaaacggcggtttccgtgagcaggtaggctgacctttctcgtgtgcacaggagggaaggtctacagctgcggaggatggcaggtggcatctcggggcctcctgtgtgctgtggcccatgatgcatggggacagcagcgggcgcagaaggaccctgcccttggggagcacggagagctgggagacagcaggcaagggcttcattaacagaacgaacaccagctgagggcctagcactgcggggagccggccaaggccacactggagtcctcccgctcccaggccagcgggatggggtggtgggaagatggcagcaagcaagcttcagaagagacgctcaggaggcgactcttaacgagcctcacctactccgggtacgttttgatctgtttctgcgccctcgccgtataaattcagaccttataggatttggggctggacgtcggggtgtcaggttggcatcccctctccccgccctgctcccctgcaccgatgtcatctgtgtgtcctgaatgactggctccctgccttagcatgttccatgttcctgcactccttggccatcatggaatgttctggatgtggagacccgtgtgcatccaaacccttttttgcatggggcccagggatcctgtgggaaaggttgcggcctcatcactggagttcagacatttacgcacctgtgcgttggactaaggacgtgttctggaaagggacttgagggggatccccaggaagatgtcccaagaaggaggctggcagtgcaggacgaggcggggccagccggcccctgggtcagcatccctccagccacgacggcccgtgggctttcgtacgggggcagggggtgatctgtctgaaggacgtaggtgatggtgcttcccagctggagagctggaagcaggaggaggacactccagcagcagcctcccaggcagggcagccatagagctggggacagctcttgactgggtgaggcccggcatggggtttcccagggctcctgcaggggcctcctgagggagcccttggggtcactccacagtctgggctttctgtagtccggtgggtcagggctccaagcaccaggagagatccagggatgcgcttatgtttgggccacccccggtgggcttgttcgttcagcccccttcgtttcctggcctgctctacttatatctgtttgtgaagaattattacacagaatctagaaaccagctttcccttttctcccagggttggagcccaggaagcaaaccagcactgcaccctagatttcagccagaggacgaaagccctgccctcagctttctcagaccagccctggagtaggtggcccggggagacctgggcagtgtccctgcttgtcctgcagactgtgtggctctgcagacctctagatggaggaggcacaattctctaatgctggacgaggacactgatcatggaaactcaccccaaaccttgaatcgtgatagcatttgaggcagcctgaccggtgccacatgaacctgaaaggaatcaagatataatttattttgaaaataaatcagacactttcagaatttg

SEQ ID NO: 791 - DNA, 2699 bp, Homo sapiens
gagcgatcatggcaacgggctcgggcggggaacgcgtggcagcggctgcagcggcggcagtttggtggcggactggggcggcggagcggcggcggcggcggcggtggcactggcactggccccggccctgagcaccatgcggcggggcagctccgagagcgagctggcggcccggtgggaggcggaggcggtggctgcggccaaagcggcggccaaagctgaggccgaggccacagcggagacggtggcggaacaggtccgcgtggacgcgggcgcggccggggaaccggagtgcaaggcaggggaggagcagcccaaggtcctggccccggccccggcgcagcccagtgcggctgaggaggggaacacccaggtccttcagcggccgccgcccacgctgcccccgtccaagccgaagccggtgcagggcctctgcccgcacgggaagccccgggacaagggccgaagctgcaagcggagctcgggccacggttccggcgagaacggctcccagcggccggtcaccgtggacagctccaaggccaggacctccctggatgccctgaagatcagcatccgccagctcaagtggaaggagttcccatttggccggcgcttgccttgtgacatctactggcatggagtttcatttcacgacaatgacatattctccggtcaagtgaacaagtttccaggttcaaatggtgaaagacgatgacccctcctggaagcccacttttatcgtgaaacctgatggtggttgtcagggtgatggaatctacctcattaaagaccccagtgacatccgcctggcagggaccctccagagcaggccagcggtggtccaggagtacatctgcaaacctctccttatcgacaagctcaagtttgatattcgtctgtatgtcttactcaagtccttagaccccttagagatttatatagccaaagacggactctctaggttttgtaccgagccatatcaggagcccacccccaaaaacctgcaccgcatctttatgcacttaaccaactattcactgaacatccacagcggcaacttcatccactcggacagtgctagcactggcagcaaaaggactttttccagcatcctttgtagactgtcttccaaaggcgttgacatcaagaaggtctggtctgacatcatctccgtggtgattaagacggtcatcgcgctgactccagagctcaaagtcttctaccagtcagacatccccacggggaggccgggccccacgtgcttccagattttaggctttgacattcttctaatgaaaaatctgaagcctatactacttgaagtaaatgcaaatcccagtatgagaatcgaacatgagcacgaagggtgtttgaaaatgtccccagcctcgttgatgaagaagtgaaagtggctgtgatcagagacactctgcgcctcatggacccacttaagaagaaaagagagaatcagtctcagcagcttgaaaaaccattcgctggaaaggaagatgctttggacggcgagctgaccagtgctccagactgcaacgccaaccccgaagcccacctgccttccatttgcctcaagcaggtgttccccaagtacgcaaaacagttcaactacctgcgcctggtggacaggatggcaaatttgtttatccggttcctgggcatcaagggggcaatgaagttggggccaacaggctttcgtaccttcataaggagctgcaaactcagcagcagcagcctgtccatggctgccgtggacatcctctacattgacatcacacggaggtggaactccatgaccctggaccagcgggactcagggatgtgtctgcaggccttcgtagaagctttctttttcctggctcagaggaagttcaagatgctgccacttcatgagcaggtggcctcactgattgacctttgcgagtaccacctgtccctgctggatgaaaaacgcctggtgtgtggccggggcgtcccgtcggggggccggcccccacaccgtggccctccccaggagccctccccctcggcccagccagcaggggacaaccccccaccccgcaccagctgtgccgataagctctcccatcccagacataccctgtcctgagggccactctgtcctcctggaaaacggaagacgagagcagctttcagggctggagcgccccaggcattctgcctgcagaggaatggcaggcaggctgccgaggggcccagctgaggtccccacgaactgtctctgtgtgcggctgagctgtgcttcaccaggctggctggttctcacctgccttcctcctcacacctcctggtgatacaccctgtttctgagtcatcagtcatcggacatatgacatctaaaacgtgacagatggcaccttctattctgggctcacaggaagcaccaactggggcaaatctgttgtatttggggcacaggacacaatcgatcccaaggcccggagctgtggagaggaagccgagtgttaggatctgctgccggggcctccacgcgcccaccgggaaaagcctgagaacatcgtgtttatttcctgccgcccgttccgagagaaggaagtggaaatatcaagtaggcatctgcgaatctcccatcccagtcatgtgctacatgggtgtagtgaacagattaacctcatttagttcattagcttgcctgttgctgc

SEQ ID NO: 792 - DNA, 2794 bp, Homo sapiens
tcctggagaacccagacaacgaagggtctcctccctcggagcagctggtccaggatggggctacgcacagtctagtggcagagagcacagggggcccagttgtgagccacacagtgccatctggtgatcaagaggcagccttgccagtgtcttcagcaactaggcacctgtggctgtcctcatctccccctgataataagcctggtggtgatcttccagctctgtccccatcacccatccgtcagcacccagctgacaagctgcccagcagggaggcagacctaggagaggcctgccagagcagagagactgtacttttctcccacgaacacatgggtagtgagcagtatgatgctgatgcagaggagacggggctggatggctcctggggtttcccaggaaagcccttcaccaccatacatatgggggtaccccattctggacctacactcaccccacgaacaggaagtagtgatgtggctgaccagctctgggcccaggagagaaaacatcctacaaggcttggttggcaggagtttggtttgtccacagaccccatcaagttgccctgcaacagtgaaaatgtcacatggctcaaacccaggccgatctcaaggtgcttagcaaggccaagttctcccttggttcccagctgctctcccaagactgcagggacactccgtcagcccaccctggagcaagcgcagcaggtggtcatccgagcacaccaggaacagctggatgaaatggctgagctcggcttcaaggaggagacgctgatgagccagctggcttctaatgattttgaagattttgtgacccagctggatgaaatcatggttctgaaatccaagtgtatccagagtctgaggagccagctgcagctctatctcacctgccacgggcccaccgcagcccctgagggaacagtgccgtcttagagccagaccctgtgccgagatggtgggggccctgcaggagtctgtgctgggctctcaggctggaggagcctctgccaggtcctccctgcacacaccagaacccacacgctggtcctgcctatgctagcgtcaccccagccccacgtggcttcagataggtcccagcttctccctcagggacaggcccctgtccctcagttccatgcacaggagtgcctccaagggtgggccaggccgaagaacctaatgcctttcccttatgcctagagaatatgattaactaaccccttgcctgtgggaatatatttgggtctaataaccctgaagtttctaagtttggggatcagaggatggggtggtcagtggtagcctagaggtcagaggtcacaagacagagaagacaacatgctgagaccagaggcttcaccagctgaattctgtgcctaacttagaagactaaacactggcccaaacttaaccattggtgctagggggacaggggtggggtgagctctgccccatcagcccttggagattgatttggggatttagaggcgtttttgaaaatgtaaatagcataaaccttgacttgatgtgtcactgacagcagcagatgtgagacaggccttatatttacagctcccttcccttcctgcaatccagtgttgaggcagaagagggtgcctgtgtcacacatcaatttttctcctgacttttgctcgggtgaaaggcctctgtacaatgcccgatactctcatgcttccatggcagctcctggctcctatctgggacacctcactacccagccccctcatggaatagtccatctcctagcctggccttcatccagttcaccctgcccagccaccctgcctctcaggggtctgtgttgggaaccttggcagttgaacagagtgctctgttcaacagtctgaggcctctgaaacagaattcacacacaaaccttcagccaagttctgcctgctgtgtatctttttagcaggaagcagctcaggacagggaagacaaagtagcctccaggtgccaattactttaaagccactctgggtcaaatggagattcatgagtcacggccttggcccgaacgcccattactatgtgagcctttatttccttcagataaaggataactttttacggttttaaaaggagggcttaattaaaaggccaagaagagggttaaatggctctcttgagacactagcagcctggtccagtcaccctttgtcagcctgacagtgcctcatctgaccgccagggggcatccttattggtgcttcccggctgcagggcactgcggcccctccctcacatgatcactaaaaaccttcaaagacccagtctagccaaaagctcaagtgggacaatggcacagtattaaggtcaaggacaaaaacttacttactttaggaatgaaccctattctatcatcatatacaacagcaccactgagagctggtgaaacagtttaaatcccatcctctgcttgtggcaaatgatgcataaatgcctgctgctcacagtaaaagggcttcttcctcttttactgggtgatccccctgaaggcccagcctatcccaactccacagtcaggaaggcctacgtccttggtccacagacggagctgggccaggtttaaaagactcagtctaggcttgcctttgcaaaccaaaaacgaggacaggtctgaagtgggaagaaagctccgaaatagaaaacggttaggtcctattctatccccagcaaatctaagcaagaaatctctttatacaccacatggcccccccactcccataaaacagccttggtaataaagaagttatcacaccaag

SEQ ID NO: 793 - DNA, 4477 bp, Homo sapiens
caaggcccctgctgttcaggatctgctcacacggcttctgcaggccctccacatagatgggccacggtctgcccaagtagcccagagccttctaaaggaggaggcctcttggcagcagtcacaccaccagttccggaagcggctgtcagaggagtacaccttctatccagatgccgtgagcccactgcatgcatccatattgcagttacaacatggcatgaggctggtggcctctgagctccacacctcactctacagcagtatggttggtgcagacaggctggggaccctggccacagccttgctggctttcccatcggtgggccccaccttcccgacttactatgctcatgcagacactttgtgctcggtgaagtctgaggaggttctacgaggccttgggaagctaatcctcaagcgctcaggaggaaaggagctggaaggcaagggccagaaagcctgtcccactcgggagcagctgctgatgaatgctctcctttacctgcgctcccacgtgttatgcaagggagagttggaccagagggccctgcagctcttcagacatgtgtgtcaggaaatcatcagtgagtgggatgagcaggaacgcatagcccaagagaaggctgagcaggaaagcggcctgtatagatacaggagcaggaactctaggacagccctgagtgaagaggaggaggaagaacgggagttcagaaaacagttccccctgcatgaaaaggactttgcagatattttggtgcagccaacgttggaggagaacaaaggaacttcagatgggcaagaagaggaagcaggcacaaacccagctctcctctcccagaattcaatgcaggcagtaatgctgatacaccagcaattgtgtctcaactttgctcgatccctctggtatcaacagactctgccgccacatgaagcaaagcattacctcagcctgtttctgtcttgctatcagactggggcatcgcttgtgacacacttctaccccctgatgggagttgaactgaatgaccgactcttgggcagccaacttttggcctgtaccctctcccataacactctttttggggaggcaccctcagacctgatggtgaaacctgatgggccctatgacttctaccagcatcccaatgttccagaagcacggcagtgtcaacctgtgcttcaaggtttctcagaggctgtcagtcacttgctacaggactggccagaacacccagcgcttgaacagctcctggttgtaatggacagaattcgtagtttcccactttccagtcccatctcaaagttcctgaatggcttagagatccttctggcaaaggcacaggattgggaggaaaatgcaagtcgagctttgtctttgcggaaacatcttgatttgatcagtcagatgatcattcggtggcgtaaactggagctgaactgctggtccatgagtttggataatactatgaagcgccacaccgagaaatccaccaagcactggttctccacctatcagatgcttgagaagcacatgcaggaacaaacagaagaacaggaagatgacaaacagatgaccttgatgttgctggtcagcacattacaagcatttattgaaggatcctcgctgggagagttccatgtgcgacttcagatgttactggttttccattgtcatgtcttgctgatgccacaggttgaaggaaaggattcactttgcagtgttctatggaatttgtaccattattacaagcaattctttgaccgggtccaggccaaaattgtggaacttcgttcccccctagaaaaagaacttaaagaatttgttaagatttccaagtggaatgatgtcagcttctggtccattaagcaatctgtagaaaagacacacaggacactctttaaattcatgaagaaatttgaagcagtcctgagtgaaccctgccggtcatccctggtggagagtgacaaggaagaacagcctgactttttgcccaggccaacagatggagctgcaagtgaactgtcttccattcagaatctgaacagggcactgagggagaccctgttagcccaaccagcagctgggcaggccacaattccagagtggtgtcagggctctgctccttccggcttggaaggggagcttctgcgtcgcttgccaaagctcaggaaacgcatgaggaagatgtgcctgacgttcatgaaggagagccccctgcctcgccttgtggagggccttgatcagttcacaggtgaagtgatttcctctgtgagtgagctgcagagcttaaaggtggaaccctctgcagagaaggagaagcagcggtcagaagccaagcacattctcatgcaaaaacagcgagctttgtcagacctctttaaacaccttgcaaaaattggtttgtcgtatcgcaaaggtcttgcttgggcccgttcaaaaaaccctcaagagatgcttcatcttcacccattagatctccagagcgcattgtccatcgtcagcagcactcaggaggctgattctaggctgcttacagaaatctcgtcttcatgggatggatgccagaagtatttttatcgctctcttgcacggcatgccaggcttaacgcagcactagcaactcctgccaaggaaatgggcatgggcaacgtggagaggtgcagagggttctcagcacatttgatgaagatgctcgtccgacagcggcgctccctgaccacgctcagtgagcagtggatcatcctcaggaacctcctcagctgtgtgcaagagattcacagcaggctgatggggccccaggcctaccccgtggccttcccccctcaggatggcgtgcagcagtggacagagcgcctgcagcacctggccatgcagtgccagatcctgcttgagcagctctcctggctcctccagtgctgccccagtgtagggccagctccaggccatggcaatgtccaggtactggggcagcctcctggcccctgcctggaaggaccagaacttagcaagggacaactttgtggagtagtgctggacctaattccttccaatctgagctacccatctccaatacctggaagtcagctgccctctggttgccggatgcggaaacaggatcacctttggcaacagtcaactacgagattaacagagatgctaaaaaccattaaaacagtgaaagctgacgtcgacaaaattagacagcagtcttgtgagactctctttcattcttggaaagattttgaagtttgctcttctgcgctgagttgcttgtcccaggtgtcagttcatttgcagggcctagagtccttgttcattcttccagggatggaggttgagcaaagagactcacaaatggcactagttgaaagtctggaatatgtaagaggagaaattagtaaagccatggctgactttactacctggaagacccatctgcttacttcagatagccaaggaggaaatcaaatgttggacgaaggatttgtggaagatttttcagagcaaatggaaattgccatccgagccatcctctgtgccatccagaacttagaagaaagaaagaatgaaaaagcagaggagaacactgaccaagcaagcccacaagaagattatgcaggctttgagagactgcaatcaggacatctaacaaaactcttagaggatgacttctgggccgatgtgagcactttgcacgtgcagaaaataatttctgccatctccgagctgttggagaggctgaaatcgtacggtgaggatggcacagcagcaaagcacctgttcttcagccaatcctgttccttgctggtgcgcctggtgccggtcctctccagctactcagacctcgtcctcttcttcctgaccatgtctttagcaactcaccgtagtactgcaaagctgctctctgtgcttgcccaggtctttacagagcttgcccagaagggattttgcttgcccaaagaatttatggaagattcagctggagagggagcaactgagttccatgactatgagggaggtggaattggagaaggcgagggcatgaaggatgtgagtgaccagatcggaaatgaagaacaggtggaagatacatttcagaagggtcaagaaaaagacaaagaggatcctgattcaaaatctgatattaagggcgaggataatgccattgagatgtcggaagattttgatgggaaaatgcatgatggggagcttgaagaacaagaagaggatgatgagaaatcagatagtgagggcggagacctggataaacacatgggcgatctcaatggtgaggaagctgacaaactagatgagaggctttggggtgatgatgatgaggaggaagatgaggaggaagaagacaataaaactgaagaaacaggaccaggaatggatgaggaagattctgaacttgttgctaaagatgacaacttggatagtggcaattcaaacaaagataaaagccagcaagataag

SEQ ID NO: 794 - DNA, 1695 bp, Homo sapiens
atgactggcagtggcatcagcgatggcggctgcgtcggggtcggttctgcagcgctgtatcgtgtcgccggcagggaggcatagcgcctctctgatcttcctgcatggctcaggtgattctggacaaggattaagaatgtggatcaagcaggttttaaatcaagatttaacattccaacacataaaaattatttatccaacagctcctcccaggaggattctctatgggaggatgcatggcaatgcatttagcatatagaaatcatcaagatgtggcaggagtatttgctctttctagttttctgaataaagcatctgctgtttaccaggctcttcagaagagtaatggtgtacttcctgaattatttcagtgtcatggtactgcagatgagttagttcttcattcttgggcagaagagacaaactcaatgttaaaatctctaggagtgaccacgaagtttcatagttttccaaatgtttaccatgagctaagcaaaactgagttagacatattgaagttatggattcttacaaagctgccaggagaaatggaaaaacaaaaatgaatgaatcaagagtgatttgttaatgtaagtgtaatgtctttgtgaaaagtgatttttactgccaaattataatgataattaaaatattaagaaataacactttcctgacttttttattattaaaatgcttatcactgtagacagtagctaatcttattaatgaaaaacaatagacaaacatctgtgcataatttttcagacacaattctgtaaatatttggaaaccttttaagtatttaaacttttaaatttttgaaataaagtattctaaactaatataaataaggacaatgaaaaaacatgaaaggacttagcataatgttattttatcttttctacaactttgtttaaattacctttccaaagatatttgtgtttatgtaattttccacggaataacattaatactctaggtttataaaccggtttcacattatttcatttgatcatcacaagagctttgtgaagtaagccgagaagttgttactggtatttaataatagcaatagaggagttaaagactttcccacagcttgcaggtcaagacaagaaattcaggtctcctaattctcagtggagctctatttctgttaacccaaattgctgctctgttttaggtctcaatttcatctgtaaaatgatactaatagtacttatcccattggatttttgttgagatttaaataaatagccaaaagccaatacataataaacactcagtaaagattaaccataaggagagtcatgatctggttccaggaatacattgttagatgactgaaaaattgtattacttcaatgaaaatactataaataataacattttcatatattagttggttctcatgcatacataatctaattttatttgatcctcacaactgtttaagttttattaaatatacattatccctgtttgtataaatagaatcatacaatacctgcctgctttcattcaacaaaattatcatgagatttttccatgttgtgtacatcaatagttcatctattttattgctcagtaatattccattgtgtggatgtatcactatttgtttacacattcaccactgatatataagttgcttccagtgtgaggctgttttaaataaagctgctatgaatattc

SEQ ID NO: 795 - DNA, 2331 bp, Homo sapiens
aagagagcttggaagggattgttcgaggatgtgggatttggtcttagaagaccgaaggatgaatgtttcgagacaaggagtggatcaggccagataagtatggccatttctctcaggagttctggaatttctgtgaagtgcctgtcgaagctgtggatgccggtgactgtgacatcaactacgagggcctggataacctcctccgcctgaaggagctccagtccttgtcgctgcagcgctgctcccacgtggacgactggtgtctcagccgcctctacccactggccgactcgttgcaggagctctcgctggccggttgcccccgcatctccgaacggggcctcgcctgcctccaccacctccagtgagacctcagctcaggctgggccacatgcccaggcacctctcccacctaacccagatgcaggagaggaagtggggaggggcaatgttaggcagttctcatatccccctgcatccatcacaaacctagagtatttatggtagatgagcagtcacagtgagtctctggaagaattaaatgactcctggttttcttcctttttgttttagtcaaaactgtgtgatatcgacgctgttgcagaacagcaggagctggagttgcatatttgcaattaacacagtgggcttcatgtgcctggacagctataaagattttattttaggaagctaaggttgaaatttggggccagtacctccctatacacacacacatgcacgcatgcacgcacgcacacacacacacgcacgcacacacactgtcctgtaaggttgaaatttggggccagtacctccctacacacacacacacacacacacacacacacgcacactgtcctgtacctccctacacacacgcacacgctgtctgtacctccctacacacacacacacacacacacacgctgtccttatactggcttatctccctatacatacacacacacacacacacacacacacacacacacgctgtcctgtacctccctacacacacacacacacatgctgtccttacactggcttacctccctatacacacacacacacacacacacacgcacacactgtcctgtacctccctatacacacacacgctgtccttacactggcttacctgcctatacacacacacacacgcacacgctgtcctgtacctccctacacacacacacatgctgtccttacactggcttcctgtccttctcaccccttttcaggaacctccgcaggctggacatctcggacctccctgccgtgtccaaccctggcctcactcagatattggtggaggagatgctgcccaattgcgaggttgtgggagtcgactgggctgagggcctgaagtcagggccggaggagcagcctcgggacacagccagccctgtccctgcctagcctttagccctgtccccactcacgtggcttctcagcgggctgcatggaatgtctggtagctcaccacacttctggcttccatttgtcttcactcaacgtcagggtgggggagtggtgctggccaatcacaggagagagcgtgagttcccagtatttattcctggctgcccttggctaaaggtcacagctcctgtcaccctgtcaggcagccctttccatacccctgttcaggcctggggaggtaaaggctcaggctgttagtagccgcagagagccacactcaccttgtcaggagactcttctcaaactgtccttatgtgagtgcactgccatttcttgcagggaccctgactgacacaggggctactactgacactttacagggatggttctcccccgtgcagggccgctgtgcccactgcaggacatgcagcatccttcgccccactccactcactaaaggccagcgcaccccaggccccatagtattgctggttatggatttattgactttatgttccaaattcagctttttcagttggctgttttttgaaaggggataagctttgtcagtagagggcatcaaacaggcattataggaggaaaggcgcctccttcgtggttcttgttggttgtgcttctgcctctggacgccgcagtgcatgtggcttccccagcacccagctcctgaagcaccaggcggtcagcagctgcccttggcaccctccagccctcagaagttgcgtaggagacacagcgcctccactgaggcacctctctgggaataacgttccccagcaccccaaatggatttccagtcaattcagaagcattttaccagtgaagccctcattattccagttcactgttaaagccagtaattctctatattaaactttccctgttcaagtt

SEQ ID NO: 796 - DNA, 3916 bp, Homo sapiens
aaataatgggtgagacgtgctcagtataatgagagcttgagaaggcagatcccaccccccatccccacccccaccccttgccgccttgccaatgctttggcagggagagggcagctccatagggcagctgagaaacagcccctcactgcccacacggcagctccagtggagggggaggcagggaccaggacaggaagcaggctaagggcgggatagaaaagcaaaccccagtctggtggaatcgcttctggtgtagtcttcccggtgccatgtgtttgtcctctctgccttggcaggaaccaaggccaggaactgctgccaggcctgagagccgggcacagtcccaagcactgggtcgctaccccgccccactcccaccagccccactgagtgcagagaagggttcccagaagccctttgctggaaaagcaggcactgcacgggcagcccgtgttgtagaggcaagtcctctggcatcttgggggggacacagaccagaaagcggacttggagcttgtgctcccagacagagctgccttggtggttgagaaggggagagagatggcagcagttgagcagagatggccgggctcccctcactgtgtggggtgaggcttcaagcactggactgggagtcagacctggatccgagtcacaacctgacaccaaccggctgagggtctcagagcaagtcatgccttttctgggtctgggggccttcatgttattccctcctggctatgttcttcccctttgctccttgagccgatcccagactgagtgctgaaactgcggccttgaaacttggctcgctcctccccctgcccacccagccagctttcagatggagacaggaagctcctcccaattgcctatgctgcaactagtcaggagaagggcgggaggttggcagtaagtgtttggctactcccagtgttggagactgtgtccacctgaccatgtgatcatctggccgttcatgccaggaccaccaggaacaagcctcagtcctcttctcaatgtcctttccctatgacagccctgcagaggctaggtatccaccactacatagcccacagtctgctctgccccagccacagcatccttggcttgctcagccattctttgtctgggtagtttgaagtccaatccccactctcattacttaccatcctctgaatgcagccagtctgtctgggtctccctgagactggcatgcccagactcctgtgggtatagtctggccaaggcagagttagcataggactgtcacctccctccttctacatactctgcttctattaatgcagcctaatgttacatttgttcttttggtgaccgcatctcactgctgacccatcctgagcagatggacatccaaaatgcctaaaacttttttctgtgtgctcttgctattaagttctgtctctcctgccccattctatgctgttgcagttgtgtttttaacccaggtgcagaatcttactttatttatacctgtggaattttgctcgagagggtggggcatgcatgcgagtgtatgctggtgtgtttattcatgctttctgctgcaccaaagccaagtcctaggtccccacgcagcgatcctaaggctaattattaattggtagctgtaatctaatttgtctttttcatcttctgttcagcaagaggaacagagatcaggtcttatggcaatgacccctgaacggcagaatgcatatatctcccaacagatgagtccatttgaagccgtccaagaacaagtcacctccaagtgtagccggatcaaggcaagccccccatctagcaagcacttgatgccacccagaactgggcttcttcagaacaatctgagtccaggaatgatcccactcaccaggcaccagagctgcgagggcatgggagtgatctcaccaactctggggaagcggcaaggaattttcacctccagcccccagtgtcccatcctctcacactcaggccagactcccctgggcagacttgactctgtctgccagcatatgcagagtcccaaggccaccccaccagaagtgcccctgcctgggttctgtcccagctccctgggcacccagtccttgagtccccaccagctcagacggcctagtgtgccaagaatgcccactgcgttcaacaatgctgcatgggtcacagcggcagcagctgtgaccacagcagtttcggggaaaacacccctcagccaagtggataatagcgttcagcagcactcaccttctggccaggcctgccttcagaggccatctgattgggaggcacaagtgcccgctgcgatgggaacacaagtgcccctggccaacaaccccagcttcagcctgctgggcagccagagcctcaggcagagcccggtacagggcccggtgcctgtagcaaacaccaccaagttcctccagcagggtatggccagctttagtcccctgagccccatacagggcatcgagccaccaagctatgtggctgctgctgccaccgctgctgctgcttctgccgttgctgccagccagttcccaggtccgttcgacagaacggatattccccctgagctgccacctgccgactttttgcgccagccccaacccccactaaatgatctgatttcgtcacctgactgcaatgaggtagatttcattgaagctctcttgaaaggctcctgtgtgagcccagatgaagactgggtgtgcaacttgaggctgatcgacgacattttggaacagcatgctgctgctcaaaatgccacagcccagaattctgggcaagtcacccaggatgctggggcactttaaatctgagcaggatgcccatagaaacccccatggtgacatcactctaggaagtggtgtcgatccatacccgcagttgtctcccgttacaatttgagtggtgttgtcagcccatgcttatccctctctctacctgtgacaaaatggaaagctggtgatttttcaagctacgtgtacatatttgaaaattttgtaaacggttttcctaaacattaatgacagaagtatttatacttcattttgtgactttgtaaataaagcgacggcttttgtttcagtagagttgtgtttactatgcattgttttgtgtttattatacaatgttacaaatatgcagaccgtgttgtttgctccagtgataccttgttaagctaggtggctgagtcgcttatggttttaatgcaatgagcaatgtggatatgaccaagagttgttgtgcaagttgacaaatgccaaatagaaaaccacttggccatttatttctatgttcactaaaaatcctattgccttgtgtgattcttaatctcttttgcgaacctttcagtctccgctagctctttcctaatgagctttacagcagaagccgttttatcgttaagtgccccacagagacactttaccaggaggctgggagagttctccagatttgggagaggcgcagagacagtgtgtgagccgagccctgtctcagcaatccacctggaggagctagagtatcctcctccctttaccattcagaccgagagaaaaagcccagcttgtgtgcaccctcgtggggttaaggcgagctgttcctggtttaaagcctttcagtatttgttttgatgtaaggctctgtggtttgggggggaacatctgtaaacattattagttgatttggggtttgtctttgatggtttctatctgcaattatcgtcatgtatatttaagtgtctgttatagaaaacccacacccactgtcctgtaaacttttctcagtgtccagactttctgtaatcacattttaattgccacctcgtatttcacctctacatttgaaatctggcgtctgtttcaagccagtgtgttttttcttcgttctgtaataaacagccagg

SEQ ID NO: 797 - DNA, 2870 bp, Homo sapiens
tagttaccaagctcggtgaaggagacaagttcccacagctgactcggctcggctctcccaccttcccggcagcggccgcgagccctgattgtatccctccctttcctcgtgggggagcacggactgacttggctgaagaaaatgccagttctgtggatgtggccgtgacaagaggacgtgcggctggaagaggcagaaggggacgaggaaaagcatgctttgaagagaagaataaaccagcgaccccaaccctttctgcaaattggtgctattacttgtgggatccatttgctttcattccctcccaccccaccgctgaagaaaccttgccctgagggctgagagccagccccctgcagccgggggacgcttctgggttggaggaccttctggatgtagcgttggtggaacctttagatactctcctctggaaaagccaccatgaattcggtagctgggaataaagagaggcttgcggtctccaccaggggcaagaaatacggggtgaatgaagtctgctcgcccaccaagcccgcagcgcccttctccccggaaagctggtaccggaaagcatacgaggagtcgcgcgccggcagccggcccactcctgagggcgcgggctcagcgctcggctcctcggggaccccgtctcccggctcgggcacctcgtccccgagctcgttcaccagctccccgggacccgcctcccccggcatcggcactagttcgccgggctccttgggcggctctccgggcttcggcgcaggctccccgggctccggcagcggcggcggctcctcccccggctcggaccgcggcgtctggtgcgagaactgcaacgcccgcctggtggagctcaagaggcaggccctgaggttgctcctcccggggcccttcccgggcaaggaccctgctttctcggctgtgattcacgacaaactccaggtccccaacaccatccggaaggcatggaacgaccgggacaaccgctgtgacatttgcgccactcacctgaaccagttgaagcaggaggccatccagatggtgctgacgttggagcaggcagccggcagtgagcactacgacgcctcgccctgctccccgccaccgctctccaacatccccaccctggtggggtcccggcacgtgggtgggctccagcagcccagagactgggcctttgtgcccgccccctgtgccacctccaactacacaggcttcgccaacaagcacggcagcaaacccagcagccttggggtcagcaatggggcggaaaagaagagcgggtccccaacccaccaggccaaggtcagcctccagatggccaccagtccaagcaatgggaacatcctcaattcggtggccatccaggctcaccagtacctggatggcacctggtccctgtcgagaaccaacggggtcaccctgtacccataccagatctcccagctgatgacagagagtagccgggagggactaacagaagcagcggccacggcagcgacaacagcagcgtgctgagcggggagctcccgccggccatggggaagacggccctgttctaccacagcggcggcagcagcggctacgagagcgtgatgcgggacagcgaggccaccggcagcgcgtcctcggcgcaggactccacgagcgagaacagcagctccgtgggcggcaggtgccggagcctcaagaccccgaagaaacgctccaatccaggttctcagagacggaggcttatcccagcactatccctggacacctcttcccctgtgagaaaaccccccaacagcacaggcgtccgctgggtggatggccccttgcggagcagcccgaggggccttggggaaccctttgagattaaagtctatgaaatcgatgatgtggagcgcctgcagcggcgacgagggggtgccagcaaggaggccatgtgcttcaatgcaaagctgaagattctggaacaccgccagcagaggatcgccgaggtccgcgcgaagtacgagtggctgatgaaggagctggaggcgaccaaacagtatctgatgctggatcccaacaagtggctcagtgaatttgacttggagcaggtttgggagctggattccctggagtacctggaggcactggagtgtgtgacggagcgcctggagagccgtgtcaacttctgcaaggcccatctcatgatgatcacctgcttcgacatcacctccaggcgccggtagatgagccagacccttgtcctagtggtcccccgctccccaggacttcagagatgttgcacgcccctaggccctctgtgctggggcatcaaagacaatgaatgaggatgaaggttggtggcaagtctggagcgggcgttgagcggaaggcgagttttcttttgttttctgtaggaaaggtgcaaacgtcaaacaccgtggaaggagaaaaggatgggaagcccgaggggtgtccaagccctgtgagactgaaaaagcactttgaggaaccttaaagaccttgtttgtacataagaactgctagcaaaagagacctcactcttctcttgctttcgtgagaaaggaggggcgtggatgtaggattgctgtggaaagcgaacacaaaacaacccagaatgactgattaagtgccttgcaaatctttattattatccaaacatttatgttcatactttcttgtgtacagatggtgctagtcaagatgaaaacaacaaaacaaacaagaaaaacattttggaaatgtattcacagctctttttctcttggtgttttatcctatttctgacttgctgtttctaagtaagttgtgtttgtagagctatttcttaatcagtattgcttatgaataaatattacctgtcttttatggtt

SEQ ID NO: 798 - DNA, 3992 bp, Homo sapiens
agtactgtgtctgatgctcctaaggaggctgtaaagtgcttttgtccattcctttttgtcttttaacaaaggggtttaccatacacccacagagcctgtctagtggcgatgtgttcctgttgcggattaagcattcaaatcaatgagtctctttcttagtttgatttgctagctggtttaatctgttttgtgtagtgccttggagcttacgcttttttttttttttccctccattcgaattcactaagagcaagcatgagggatatgagagtgaacatggctgcagtttttcctgcttaagcttgctttgatccttttaaatgactgtaccaggaggatttcgcagttgtacagaaactgatatttcttcaaaaatctttatcaattctacactcaccccaccggctggttcagagaggcactatgatgctaccttattgacactgctggtcgtgggatcgtacagcctttgtataattcctttgttagccacgtttactgggaaaaaaactggtaatgccgctgtcatcaaatatgaggagaaacctccaaaaccagcatttcagaatggttcctcaggatccttttatttgaagcctttggtatccagggctcatgttcacttgatgaaaactcctccaaaaggtccttcgagaaaaaatttatttacagctcttaatgcagttgaaaagagcaggcaaaagaatcctcgaagcttatgtatccagccacagacagctcccgatgcgctgccccctgagaaaacacttgaattgacgcaatataaaacaaaatgtgaaaaccaaagtggatttatcctgcagctcaagcagcttcttgcctgtggtaataccaagtttgaggcattgacagttgtgattcagcacctgctgtctgagcgggaggaagcactgaaacaacacaaaaccctatctcaagaacttgttaacctccggggagagctagtcactgcttcaaccacctgtgagaaattagaaaaagccaggaatgagttacaaacagtgtatgaagcattcgtccagcagcaccaggctgaaaaaacagaacgagagaatcggcttaaagagttttacaccagggagtatgaaaagcttcgggacacttacattgaagaagcagagaagtacaaaatgcaattgcaagagcagtttgacaacttaaatgctgcgcatgaaacctctaagttggaaattgaagctagccactcagagaaacttgaattgctaaagaaggcctatgaagcctccctttcagaaattaagaaaggccatgaaatagaaaagaaatcgcttgaagatttactttctgagaagcaggaatcgctagagaagcaaatcaatgatctgaagagtgaaaatgatgctttaaatgaaaaattgaaatcagaagaacaaaaaagaagagcaagagaaaaagcaaatttgaaaaatcctcagatcatgtatctagaacaggagttagaaagcctgaaagctgtgttagagatcaagaatgagaaactgcatcaacaggacatcaagttaatgaaaatggagaaactggtggacaacaacacagcattggttgacaaattgaagcgtttccagcaggagaatgaagaattgaaagctcggatggacaagcacatggcaatctcaaggcagctttccacggagcaggctgttctgcaagagtcgctggagaaggagtcgaaagtcaacaagcgactctctatggaaaacgaggagcttctgtggaaactgcacaatggggacctgtgtagccccaagagatcccccacatcctccgccatccctttgcagtcaccaaggaattcgggctccttccctagccccagcatttcacccagatgacacgtccccaaagtccacagactctctgaaagcattttgatgcaggtctgcaggactgaccccaaggaggaacgtgggcacaagaggtatatcagcacacgtgtgatcaccgtagggtcactggagcgtcaccaccggcggaatcgcagcttctgagactggaagtctggaggaagacttttgcctccgtccaaaagattcctccaaaaaaagatttaaaaaaagatttcggcatcgacacggacgttgttgcacaaagcacttaaagaacgagagcatcttgttcattgcctttttcacctaagcataaggggaaaaactctcagggccctattaagatttataacctttgtaatgttcttcaccacagacaccttcttgtgagttttcagtctgactgtgggggtggggggtgtgaatgaaatggatgtcacagagtgtcatgtgtctgatgcagcctcctctgctgtgtattaaatgtcaaaatctgaatatatctggatatgtactaatcaaataataatcaatcaatcagcatatacatttcagccaaagccatagaagaaaaagcaatagttgcttgaattatgatcatctaccaccaactctgctcagccctgtaacagggtagggagagggtataacaggaagagctttgacttgtccctgtctatacattctctgtatcttttgggggtaacttcttggcagtttttcagtgttcagccatgtcagttgaaactagatttttctgtagattttttacttacccatgtgagcctaacactatcctgtaattcattttctcaggctatgtgtaaatgtagaaccctaatttttctataaaaaaactaactaactaactgtgtaaagaaagaaaaagggaagtaccaatgggtttttccaccttatttttacctttgatctacccttgcagatttaacctgtcttcttccctcccattattctcattttccttttacctttctccaccatccagagccacaaaagcaaaccttctacctcctacctacttttctctgggacaaggataaaggaatatgattttccagagccccagagccagctcatcttccaggtgctgaaaccactttccaaataaactaaagcctggatttgatattacaaattttgggaaatcttagaataaagaacgagaacaaggaagtcattggctagtataattaagaaaggtaggattcagtgcttaccgatgatgcagtacttgatagaagaaaacagtctgggaggatagcgctcatttttcagttaccctttaaggagtccctttgtctttgggaaagtagcagaatggtccgcttctttcccatgagtggaaaatgtggcttgtccaactctcctccaggttgcatttcagtttctttccaaaacttattacctcccctaatcctgagactttggaaaaggtggaaggaagaactgttgctttatctccccctccctgcatgtgtcaacattgtgatgtcagtatttactaatctacattcagtggctgtacaaataacagctgtagtaagaagagattcaggatgctagaggtgaatatttgggtcatttacatgtacactacatagcaagttgatactcatgttgcatgttcttttaaattagtgattttgtgtcttaagtctttaacttccaatacttcatcatgtatgtaaccttccatgtttgcttctgataaatggaaatgtaggttcactgccacttcatgagatatctctgctcacgcttccaagttgttctcaatgacattagccaaagttgggtttgacattcatcccctaggcatggtaaatcttgtgttgttccctgctgtcctccgtattacgtgaccggcaaataaatctcatagcagttaatataaaacatctttggaggatgggagagaacaggagggaagatgggaaacaaaatagagaattcttaagattttgtttaaaccaaatgtttcatgtagaatgcaaaatgttggcacgtcaaaaatatgaatgtgtagacaactgtagttgtgctcagtttgtagtgatgggaagtgtattttactctgatcaaataaataatgctggaatactc

SEQ ID NO: 799 - DNA, 2991 bp, Homo sapiens
atgttcaggacacgaggcctggcaccaaataggccctcgatcaagaatagcaaaacctcggagagagaaggagccttggtatacaggtttaccaaataccaaggggatcccacgactcaggtatgaggagggcgacccaggtaccactttcctggctccctagcccagctgctcatgctcctcttcctcgtcccctcccccactctcatctcctcagcccgcccggaacgcccgcgggctaggccacaacggctcgggaaccgccgccggtatccgcgtccgcagcgccgccagccaggcgagagccgtgtgggatcccagcgcccgcactcccgcccccgccaaggagccaggaatggcacaactagagaggagcgccatctctggcttcagctctaagtccaggcgaaactcattcgcatatgatgttaagcgtgaagtatacaatgaggagacctttcaacaggaacacaaaaggaaggcctcctcttctgggaacatgaacatcaacatcaccaccttcagacaccacgtccagtgccgctgctcatggcacaggttcctacgatgcgtgcttacaatctttcccttcctagaatggatgtgtatgtatcgattaaaggattggcttctgggagacttacttgctggtataagtgttggccttgtgcaagttccccaaggcctgacacttagtttgccggcaaggcaactgattcctcctctcaacatcgcttatgcagctttctgttcttcggtaatctatgtaatttttggatcgtgtcatcaaatgtccattggttccttcttcctggtgagtgctctgctgatcaacgttctgaaagtgagcccattcaacaacggtcaactggtcatgggatctttcgtcaagaatgagttttcggccccctcctaccttatgggctataataaatccttgagtgtggtggcaaccacaacttttctgactgggattattcagctaataatgggcgtattgggtttgggcttcattgccacttaccttccggagtctgcaatgagtgcttacctggctgctgtggcacttcatatcatgctgtcccagctgactttcatctttgggattatgattagtttccatgccggtcccatctccttcttctatgacataattaattactgtgtagctctcccaaaagcgaattccaccagcattctagtatttctaactgttgttgttgctctgcgaatcaacaaatgtatcagaatttctttcaatcagtatcccattgagtttcccatggaattatttctgattattggcttcactgtgattgcaaacaagataagcatggccacagaaaccagccagacgcttattgacatgattccttatagctttctgcttcctgtaacaccagatttcagccttcttcccaagataattttacaagccttctccttatctttggtgagctcctttctgctcatatttctgggcaagaagattgccagtcttcacaattacagtgtcaattccaaccaggatttaatagccatcggcctttgcaatgtcgtcagttcatttttcagatcttgtgtgtttactggtgctattgctaggactattatccaggataaatctggaggaagacaacagtttgcatctctggtaggcgcaggtgtgatgctgctcctgatggtgaagatgggacactttttctacacactgccaaatgctgtgctggctggtattattctgagcaacgtcattccctaccttgaaaccatttctaacctacccagcctgtggaggcaggaccaatatgactgtgctctttggatgatgacattctcatcttcaattttcctgggactggacattggactaattatctcagtagtttctgctttcttcatcaccactgttcgttcacacaggtactttgtctcaggtaataggaggttaacaaggcaaggtaagccaactctgacctaaaggcaagtgcatttcctttcagagctaagattcttctcctgggtcaaatccctaacaccaacatttatagaagcatcaatgattatcgggaggtaagaatccaaatgggtcccatttctctgcctaagggatagagtgggccccacctcatgcttagtttttctacaaaatcccttgccattgtttcctgcactgcagatacacatttacaaaggagggggatgtgatgtacactggtagagatgggttctttgtttttatttttttttttttggggacagagtcttgctctgtcacccaagctggacagtacagtgcagtggcttgatcttggcttactgcaacctccacctgccgggttcgagcaattctcctgcctcagcctccccagtagctgggattacaggcgtgccccatcatacctggctaattttttgtgttttagtaaagacggggtctcaccatgttgcccaggctggtcttggactcctgagctcagtcaatctgcttgcctcagccttctagagtgctgggattacaggcatgactcaacacacccagccaagacgggttcttaagtagctaaattcttatagtattgcagccagttaaagatcatttgtaaatgtactttaaggagagtttggccaagaaaaaggaaatgaagggagaaagaagacagcaggaaaagcagagggtgaaaatgggaggaaataattttctagttcttgtctctaataaagaagaatacaggctgggtgtgttggctcacacctgtaattccagcactttgggaggccaggcatttgagaccagcgtggccaacatggtgagaccccgtatctactgaaagtacaagaattagcagggcgtgatggcaggtgcctgtaatcccagctactcaagaggctgaggcaggagaattgcttgagcccgagaggcggaggttgcagtgagccaggatcgcgccattgcactccagcctgggcaacagagtgagactctgtctc

SEQ ID NO: 800 - DNA, 2718 bp, Homo sapiens
gaacaaagggagccgacagctccacaacactcagcccatggggactgcagcaggtgagtctccacccagcctccctcctttggaccaacacgaactccggagacgtctgggtgcagctgcctcaggccctgctgtcttcaacggggactgaggttgcagtttagctggctttcctgttcctgcttccctgggtccccctcaaagaagccgcctgcaccccgtgccacctcactctggcatagccctacttctccaaaccaccaggcctgccctcccttgtccacgcagatctgacaatctccacagtgctgtgcagacttcagctccaagaagttgcaagtgatggagataaaatcccttcctgagagagtcatgaaccgtggcctgtttgaggtcaaaagaagaaatgagaacaaagccaagccaaggcttcggagtgagccctgagacacctctcagctggccgggtggccagagatccaccctgcaggagccgccccgaggcaggtgggccacatctcccaacaagcggcacacaagaaggcccctcgcaagaggaggcatctgtggtcttcccagagcaaaggcagcagccccgggagcccagccagtcactggccacctgcacgcctctacacagcagacctggccaggcgggcagtgcccctggccccttgcgaatagaacgttgtggaacaggcggaacctgggcagctgtcctgcactctggccagccagtccgtggatgctcctgccaggcaggactgagccactgccagtctggccggtgccagccttttctcagatccagccacgccctctctggatacggtctggacaccggcagaccaagcaggcagttgcctccctggctggctctgacctcctgcagcacaaggagaggatgcactgcactgccaggcctctgggcaccgagggccgctgctccgccgtttctttctgctaccgctaattcaaaacagggcagggagcagctaggcagcagctgggagagctgcgggctcctccacccggttgctggtgggctccatccggccgcaccgcccgcacctgctcacctccagctgcctcggccccagcggcacggacggactcaacggcgaccaccgcggcagctccccggggactcctcgcaggtcagctgagctttgctttcagtcggcgtgcacggttcccaaacgtcggtggtgatttttgtaagtgaggtgggggtcaccacaggaagagaggggaggcaaacctcccttcccgctgtgtcccgcctttcctcctggcggttgcgtttccacgtgtcctgcctgctgcccgccccagcccacactgagcaggaaggtggggcgtggcggggaggggagtggaactgagggaagcagagagggtggtgccattgcccccggcctagcttctgtttgatcattagtttcaattcaagaaaacgttcttttgagggaattttaaaaatgaatcacgtgcacctcttaagaaaaccgagtgtcacaatcgttgttaccacgcaggtgagaggagaggagggaggacgggaaagggaaggggcatgagaaaggcggatgggactgagcgtctacggctccctggccgcggcgcacgcgctggccctccccgtccacagcagcagcggcatcctccccaccctacagcgaggaggtggacgttgccccgaggggaggagcgtgtcagggtggcttccaggtgcaggttctcgcgcaggcctcagccttcataggtgcattccgctctagaacattcctgttcatgcgtggtcgtcgctcactggtggccgcttaggtgcacttctcaatggcagtgcccagcacggagcaatgcctcggagtggcagtttcttcagtacggtccccacggcctctcccaaggcggaggatgctgccgccaaggaaactggctcaccacggacgctggtgagctatggagctatcagtgaggtgtggatttctcaggcctctggcgggagccggagtaaaggccctgagtgtctagaccagccagagtatctgcgtgtaggtcagcaaatgtgggcaaatgtctaggcggtggtgtcctgcagggagccgaaggcccgtgggggacgtgaccaactcagcattccgctggaggctacaaacagcaaactgtttatcatgaatgcaggatgtgggcaaactcacactgccctgccaccaaaaggtttgctaacagacatcactccctagctccgggctccttaaagttatctgcctaaaaaatctagtgcctattgtccaaaaaatgcaagactactgtgaaccaaacggcagactgacaatcacccccctcccccagctttctcgctatctctttttgcctaataaatacggagggctgtgtaaagctcagggcccttgtccactaaaggcaaggtgcccctaaccccttcttccaaatatactctgttgtctcttgtcttttattcccgtgttgcccgcctttgttcagtccagtaggtccccaacaatgtcctgagggtatgaatcctgaaagactactctccatgaagcaggtatttaccaggttagtgcatgtttcctgggtattaagggaaaacagtaaaatgttctgtacgggggtcccggttctgtgtcgcacgagaagagtgtgtgtctttttacttttttaatatggctcaataaaattttaaatcac

SEQ ID NO: 801 - DNA, 2389 bp, Homo sapiens
tcagaaccagtcatccgaagactcagagacagagctgttatcaaatctaggagagtcagctgctctagcagatgatcaggccatcgaagaagactgctggttagatcatccttacttccagtctctgaaccaacagccccgtgaaataacaaaccaggtcgttcctcaggaacggcagcctgaagcagaactgggccgcttgttgtttcagcatgaattcccagggcccgcttttccaaggccggaaccccagcaaggtgggatttcaggcccctcttctcctcagcctgcccatcctctaggagagtttgaagaccagcagttagcaagtgatgatgaagagccaggtccagcctttccaatgcaagaatctcaagagcccaatttggaaaacatttgggggcaagaagctgcagaggtagatcaagagctcgttgaactactagtgaaagaaacggaagcaagatttccagatgtagcaaatgggtttattgaggaaataattcattttaagaattattatgatctgaatgtactttgtaattttcttctggaaaacccagattatccaaagagagaagacagaatcattataaatcccagtagcagtctgctggccagccaagatgagacaaagttgcctaaaatagacttttttgactattctaaattgacccctcttgaccagcgctgcttcatccaagctgctgacctcctcatggccgacttcaaagtgctcagtagtcaggacatcaagtgggccctgcacgagctcaaaggacactatgcaatcacccgaaaggccttgtctgatgccattaaaaaatggcaggagctgtcaccagaaaccggtggaaaaaggaagaagagaaaacaaatgaaccagtattcttacattgatttcaagtttgaacaaggtgacataaaaatagaaaagaggatgttctttcttgaaaataagcgacgacattgtaggtcctatgaccgacgtgctctccttccagctgtgcaacaagagcaggagttctatgagcagaaaatcaaagagatggcagagcatgaagactttttgcttgccctacagatgaatgaagaacagtatcaaaaggatggccagctgattgagtgtcgctgctgctatggggaatttccattcgaggagctgacgcagtgcgcagatgctcacttgttctgcaaagagtgtctcatcagacatgcccaagaggcagtctttggatctggaaagttggagctcagctgcatggaaggcagctgcacgtgttcgttcccaaccagtgagctggagaaggtgctcccccagaccatcctgtataagtactatgagcgaaaagccgaggaggaggttgcggcagcctacgccgacgagcttgtcaggtgcccgtcctgtagctttccggctctgttggacagtgatgtgaagaggttcagctgtcctaatcctcactgccgaaaggaaacctgtaggaagtgtcagggactctggaaagaacataatggcctcacctgtgaagagctggctgaaaaagacgacatcaagtaccgtacctctattgaagaaaaaatgactgctgcccgcattagaaaatgccacaagtgtgggactggcctcatcaaatctgaaggctgcaaccgcatgtcttgccgctgtggtgcccagatgtgctacctctgtcgagtttctattaatggatatgaccatttctgccaacatccccgctcaccaggagccccttgccaggagtgttcaagatgctctctctggaccgatcccactgaagatgatgagaagcttattgaggaaatccagaaggaggctgaagaggaacagaaaagaaagaatggagagaacaccttcaaacgcattggacccccgctggagaagcctgtggagaaggtgcagagggtggaggccctcccgaggcccgttccgcagaacctgccacagccacagatgccaccctatgccttcgcgcacccacccttccccctgcctcccgtgcggcctgtgttcaacaacttcccactcaacatggggcctatcccagccccgtacgtgccccctctgcccaacgtgcgggtcaactatgacttcggtcccatccacatgcccctggagcacaacctgcccatgcactttggcccccagccgcggcatcgcttctgatggccccgaatccccattgagcagcacaaagcccgtttggggtaggagtgtggatggagaaccctcccccaaggctggtgtctgtaccattgcatcctaagtcagcttgaagggtaggctggttttcttcccacccctttcctagaagggctactgcccctggaagagtggacggatccataataaagacgtcccaaatggtgg

SEQ ID NO: 802 - DNA, 2882 bp, Homo sapiens
actttgcaccaggtcgagaacgtgatcagccctttagagaaggaacctccttgtaacaggaattctgctgggaaacgccgtgtaggcactacctccgaagataagatgcatgtttggagctgtgtaaaatgcccactggctgtttgaaagaaggaaaaggtgactagggttgcaaattaaccttagtatcacttaaaaatattctatctagtcaaatgtacgtaagcaaagaagagagcaccaggatataaaactgccacagcagcttggaagacagatgattcagattttggggactttcttttgcgtgttacatagatttgtttgtcatcatgcagttaagcaggtgttgagggaaagctgagagaatgaaggctctaaatccccagtggaagcatgatatggcgaagcagagctggtgctgaattgttctctctgatggctctatgggagtggatagcactgagtcttcattgctgggttttagcggttgctgctgtttcggatcagcatgccacaagccccttcgactggctcctctctgataagggacccttccatcgctcacaggaatacacagattttgtggacagaagccggcagggatttagcacaagaaatatgggacacatttcttgctatctgctactctgggaggagaggagtcactcacaatttttgtggacaagcggaagttgagcaaacgagctgaaggaagtgattccaccaccaatagctcttcggtcactctggagacgctacatcagctagccgcttcttatttcattgacagggacagcacccttcggagacttcaccacattcaaattgcatccactgccataaaggtaacagaaacacggactggtcctcttggctgcagtaactatgacaacctagattctgtcagttctgttctggttcagagtcctgagaataagattcagttgcaagggcttcaagtacttctcccagactatcttcaggaacgttttgtacaagcagctttgagctacattgcttgcaattcagagggagagtttatctgcaaggaaaatgactgctggtgtcactgtggtcccaaatttccagaatgcaactgcccctccatggacattcaagccatggaagagaatcttcttcgaataactgaaacctggaaagcttacaacagtgactttgaggaatcagatgaattcaagttatttatgaaaaggctacctatgaattatttcctcaacacatctactataatgcatttgtggacaatggattctaattttcagcgccgttatgaacaactggagaacagcatgaaacaacttttcctaaaggcgcagaaaattgtacacaagctttttagccttagcaagaggtgtcataaacaacccctcatcagcctgccaagacaaagaacctcaacctactggcttactcgcatccagtcttttctctactgcaatgagaacggcctcctaggcagcttttcagaagagacgcactcgtgcacgtgtccgaatgaccaggtggtctgcaccgcgttcctgccctgcacagtgggagacgcctctgcctgcctgacatgcgcaccagacaaccgcacccgctgcggcacctgcaacaccggctacatgctcagccaggggctctgcaagcctgaagtcgccgagtccaccgatcactatattggctttgaaactgacctgcaagatctcgagatgaaatatctgctgcagaaaacggacagacgaatagaagtccatgccatttttatcagcaatgacatgcgcctcaatagctggtttgatccctcctggcgtaagcggatgctcctcaccttgaagagcaataagtacaagtcaagtctggtccatatgattttgggtctctctttacagatttgcttaactaaaaacagcaccttggagccagtgttggctgtttatgtcaatcccttcggaggcagccactctgagagctggtttatgcctgtgaatgaaaacagctttccagactgggagcggactaagttggacctacccctgcagtgttataactggacattaactctggggaacaaatggaagacattttttgagacagtacacatctacctgagaagtcgcatcaagtccaatggtcccaatggtaatgagagcatttactatgaacctctggagtttattgacccttcccggaacctgggctatatgaaaatcaataacattcaagtgtttggctacagcatgcactttgaccctgaagcaattcgggacctgattttgcagctggactacccctatactcagggatcccaggattcagcacttttgcaactactagagttcagagaccgtgtaaataaactctccccacctggtcagcgtcgtctagatcttttctcttgcttgcttcgtcatagactcaagctgtctactagtgaggtggtgaggatccaatctgctctgcaggcgtttaatgccaaattgccaaacacaatggattatgacacgaccaaattatgtagttaaccataaatgtcaagcacaacccaaaatcttgaaggagtttttacagtgcttttgtggaacagtttatgtttggaagagtaaatttaaattgtcttttcaatatctgtcttatatcagtcaataacattggatggcaatttacacacatgaacttgctgacaatgaatatattatacagcagttttggtttatgaatgacataaatactgacaccagtctagaagacattctactttttacaataaatttcatttgtaattttatatgttccgtggcaatgcttttgtgcattacatcctctagagggaacataaaaagataccaataaaattttgtagctgaacagttatt

SEQ ID NO: 803 - DNA, 5671 bp, Homo sapiens
attttcctatgcaaaagagcccaggcagaaagacaaacctaaataagaatctaacttctgtaagaagctgtgaagagtgatgctggcagctgcctttgcagactctaactccagcagcatgaatgtgtcctttgctcacctccactttgccggagggtacctgccctctgattcccaggactggagaaccatcatcccggctctcttggtggctgtctgcctggtgggcttcgtgggaaacctgtgtgtgattggcatcctccttcacaatgcttggaaaggaaagccatccatgatccactccctgattctgaatctcagcctggctgatctctccctcctgctgttttctgcacctatccgagctacggcgtactccaaaagtgtttgggatctaggctggtttgtctgcaagtcctctgactggtttatccacacatgcatggcagccaagagcctgacaatcgttgtggtggccaaagtatgcttcatgtatgcaagtgacccagccaagcaagtgagtatccacaactacaccatctggtcagtgctggtggccatctggactgtggctagcctgttacccctgccggaatggttctttagcaccatcaggcatcatgaaggtgtggaaatgtgcctcgtggatgtaccagctgtggctgaagagttcatgtcgatgtttggtaagctctacccactcctggcatttggccttccattattttttgccagcttttatttctggagagcttatgaccaatgtaaaaaacgaggaactaagactcaaaatcttagaaaccagatacgctcaaagcaagtcacagtgatgctgctgagcattgccatcatctctgctctcttgtggctccccgaatgggtagcttggctgtgggtatggcatctgaaggctgcaggcccggccccaccacaaggtttcatagccctgtctcaagtcttgatgttttccatctcttcagcaaatcctctcatttttcttgtgatgtcggaagagttcagggaaggcttgaaaggtgtatggaaatggatgataaccaaaaaacctccaactgtctcagagtctcaggaaacaccagctggcaactcagagggtcttcctgacaaggttccatctccagaatccccagcatccataccagaaaaagagaaacccagctctccctcctctggcaaagggaaaactgagaaggcagagattcccatccttcctgacgtagagcagttttggcatgagagggacacagtcccttctgtacaggacaatgaccctatcccctgggaacatgaagatcaagagacaggggaaggtgttaaatagatttaagtttcaaagcaaaacaaactgtgattattgtatttacttgtactgctgcttatcaatattgctgactttacaaactgatataattattaccattaggaattataaaaatatttcacaatctacactttccaaatgtgcaatgtggtaagtagagaaccatgttagaagtaataattgtttcagaattagaacttggcttcccaaacaatttaagtgttgtgtaaagatgttgctgtcaaagtgattagacagcctggctattctgtcatttgttcacagtggttttactgggtaccccctaggaccagccctgtagtggaccggctggagcctgcagtagaggttctgtcaaagctgagcccctttaccttcagtttcacccaggacctgctagtcctaattttacctactaaattgtatttcacataaccaaagctcaaaatctactttcacttgagatttttaacacattaatgataaattttaatgcgttcttcatttacttaataagtgttaatttacttgatgaaaagtccgtatcataatgttcatgactgaaggtcaaagaaaaagaaacagcaccttattccaattctggactcatttcaagccatggctggttctggccaagtttaaataaattcagacttaaactaaagcctgcttcagtgaactttttaaagctacctgaatgagtcttcagtttctaagtctaagaattgtagcagctttccaatgacattcagtagtctgatatgggggaaaaaatacttaaaaaaatgtcctctcttcacttccaaaatgtgggaaagttatttttctataagcagaaatgtgttcctcctaatatctcctttctcccaagataaaccatggttaatgatataggtatagattactcctcaaatacaaatagaagatggagatggtgatctttcttgttaatggtactaaacttacccttactcagaacattgaacttgaaccctactcaacttttaaaatactataggctaagttataaaaataatctagcaacctgagaaagagattaatatcaaaaagagaaaattcaacaaaccaagacagaatttggttaagaatacaaaataaaaagcataagggcaatgcagaaagcagtaaaactgtgtacccagacatacggtaaaatctgagtaacaggcaataaccattcattttatagcaaggtaaaacatacccaataaaacatgattatgatatatttctgccccttttaagtataatgacattcacccatgattcttgattactttgttatggaactcgggtattttcactgaaagtttccctcagaatagaaatgcctttagggcaaaccaagccatggagaatctgaaatataaaggatatgttatggaaaaaaaaagattttgctttttgtctatgggtttccggattctttgctttttcataagtggtcatagtttgctttttaacacaggaggtagggctgtattctttttacatccttcattacaaattttatttgaagctcatgtattcaaataaagtaaaatttaacccaagaatccaaaatattgtcttgtgatatggtagttataaaaaggattatcattgtctgtgattatttgaataaataatttttatgttcattatatgtagtaaatttaggatgtaagcttccagggtttgacactttaaacttgtaaagaaataaaaataattacgctttacttccgataaaaaaaaaaaaaaaaaaaaaaaaaggccacagcatcgagtcggccttgttggcctactgggttcctgcctcagggcttccctgatagcgtcagcccggactacttgccctaccagctgtgggattccgtgcaggcgtttgcttccagcctctccggctccctagccacccaggcagtcttgctgggcataggggtggggaacgcaaaagccactgtttcagctgccacggccacctggctcgtgaaagattcaactggcatgctgggccgcatcgtctttgcctggtggaaagggagcaaactggactgcaatgccaagcagtggaggctttttgcggacatcctcaatgacgtagccatgttccttgagattatggctcctgtatacccaatctgtttcaccatgaccgtctccaccagcaacctagccaagtgcatcgtgagtgttgctggtggggccactcgggctgccctgaccgtgcaccaggctcggaggaacaacatggctgacgtgtcagccaaggacagcagccaggagacgctggtgaacctggcggggctcttggtcagcctcctgatgctccctctagtgtcaggttgccctggcttcagccttggatgtttcttcttcctcactgccctccacatctacgccaactaccgcgcggtccgagccctggtcatggagaccttgaacgaaggccggctccggctggtcctgaagcactaccttcagaggggagaggtactcgacccaactgcagccaatcgcatggagccgctgtggacaggtttctggccagctccgtctctatccctgggggtccccttacaccgcttggtctccagtgtctttgagctgcagcagctggttgaggggcaccaagaatcctacctcctctgctgggaccagtcacaaaaccaggtacaggtagttctgaaccagaaggcaggccccaagaccatcctaagggccgccacacatgggctgatgcttggggccctgcagggagatggaccccttccagcagagctggaggagctgaggaaccgggtgcgggcaggtcctaagaaagagagctgggtcgtcgtcaaggagacacacgaagtgttggacatgctgttcccaaagttcttgaaaggactgcaggatgccggctggaagaccgagaagcaccagctagaggtggatgagtggagggccacatggcttctgtctcccgaaaagaaggtcttgtgagcagcccagacggaggcccaagcccagggcaggaacctggagcaaggacactttggccacagcaggacaggggaaaggcagctttatttttccttagggcaactgcagcgggtgggccaggccctcatgggaagtgactgccaatcagatgcagtgggccccaggcagaggaaggccgggagaaggggagccaggaccttctcaccccactgccccttccccttttctggggagcaccgcaggctcctcacccccacttcctgtgaggctgtggcttatggtgtccaacgcagttggtcttaggcatagaagccccagaggaacacggccactgccatcatgagcagggcattgaggttgaccacacgggcccagctcgggtcctcgctgatgtcctccagccgcctggctgctgccgctgcctcctcctgggtaaggggcggaggactgcccaccccacctctgctcattccacaaaaccagagcaggcactggcggaagaggcttggtgccagggcctggggctctgagggaaattgaggccctgcagttagtttgcgggaactcagctcctccagccccacctcccagcatggtgccctaccattcatctccatggcactctctgggcacccattctgtacagggagtgaggagccttgctgctcatcagcatccaggtcctcccgttcctccttgctatgccggagactgaagaccaggcggtggagctggggagggtgggagcacgaacgaggtgggagttctgtccccccatgcctggccctaaagtctcttgcacaccagctcgtcactgcctgccctacccacctctgtccagtctacacacccagcccaggcttaactcatgccaactccaccctacatggctgccctgtgccctcgggataaaccccaagcccctgagcttgtgtttaaagccgttggccttgctcccccagctttgtcagctcaggtctgtctacacccagatggtagcgcttgtgacactggcctggcagtcctgctcacagtgttctgtgcctgtgtgctcccaccctttcctcctgctgctgcagaaacccggccatccttccacacccagatctcttgtcctgtcctcaccccaccctgccaccatcagccctgcctggagccacctgccctttggcaacaaaaccaaacctttttgtgggcgttcaagatggtattgtgcccaccagtcagatcctgtgttttgagtcccaaaggccatgccaaggattggctttgggaggctttaatcaccaacccatcaacatcaagcctcccccaggccggttcaaataaatgtatttaaat

SEQ ID NO: 804 - DNA, 2382 bp, Homo sapiens
gcagaccctcccctctcccctccagcctggacacgcccgcctccccttgactccccccagctctgggcccccacctcccctcccctccagcacagtcacccccatttctctcctatccgccatcctggttcctcccttccccccacctcccaactctgtgccccgccaacgtttcctaaatgccctctattcagatcccccctccgcctcccctctcctctcctccattcctgcgtcccccttcccccgccgcgccgcctgggctgtccgtggacttctcccactctctcactctctcactctctctctctctctctctctctctctcacactctccctctctctctccccctcatttatttggaaccgttggataagaagtgctcgggctctcgctcagacttagggagctgcctcgaggtgatgaatgacaccccctggcaccagctacccttctcagaccccagtccagcccgctcccgacgtcgactacgattccgctacctcggctggcagcgaggttggggtgagccccagctgcaggcgcgtctgggctgcgccgctgcaaacgagttgcgcaccttgggcggctccgcacctgcacccgcacccgcggggctcagccccgaaggctgcagcttcgggggaggcgcggtcgccgaggtccagctggtggggcgagagacgtcgcccctcggaggatgctctcggaacttgggagaggaaggagggaaaagaagaggggaaaggggccgtcgatgtttttgatgtctgtgctttaatggaggccaccaatattgagaagacggggttggccgaggcagcccgcacgctgctgcttgcgagcgctcgagtcaaagctagggccaaccgcggcttgtccgggtgccctaagggggcggacacttggtttagcaccgggacacagaatagccaccggggtaggaagatgcgttcactttgcttacctgttggcaagagggacatacaaaaataacgtaacgtgacaaactgtaaccatacttagggaggcagacgtcaaaggcaagtacatctgtattcaactgggtaaaggaagagtttttcagcctggcgtggtggctcacacctgtaatcccagcactttgggaggccaaggaagtctctactgattctaaatttcacctctgatccgaaccctggtggtctgatgatattacttcctacttctgggacctctaccctacgaaacccacctctcactgaaacaagtggatatctttgtggttgctgccacgggatttaagagtccttttttttttttgatacggagtcttgctctgtcgcccaagcgggagtgcagtggtgtgatctcagctctctgcagcccccgcctcctgggttcgggcgattctcctgcctcggcctcctgagtagctgggattacaggcattcaccaccatgcccggctaatttctgtattttcggtggagacggggtttcgctatgttggccgggatggtcttgatctcctgaccttaagagatcctcctgcctcggcctcccaaagggctgagattacaggcgtgagccaccacgcccagcctaagagtccatttgaagcatttttattctaagaaaatttatttccatatgtagttgggatgaaaagtctatgaaatccattcaaaacaaaggtgctttcaactatactgtttgaagttacagttttgtttcttcccttatcctgtgctatcttaagccatatgttgttgtaaattaacaggaaagagggcatttaaaacaaatggtttatgtgaatagcattaatcccgtcaagactagtttgtgacaagggctaaagattgcactcttgccttttaagctcaaccaagttaaacatctgaactatttctgctgtcttgtaaatattaagatgtaacacgtttctgatgtttgttgacatttgttgtacttttgatgaacaattagcctgcaagaatattaacaggaaattccattcatgagataagcagctgtttgtgcaaagcttcagccagatcatgggaccaaaaatcttctttatgcaactactgtttgttgaatagtcagcattccttgcatgttcaaaaggaaatgctttggaaataacttttatggctaattttgacttttatattttcgtaaggagaaaataactttcatggttaatgttgactcttatacttgcaggtagtaaaataatgtcctttatcaccatgtaaatttcaaacagtagtcattgacaaatccctagtaatttccaaattgtaatgcagaatcctaaggctggtgttaagatccctgagtccacgtcatatcataatgcatgattattttattgaaataaaaacctacaattat

SEQ ID NO: 805 - DNA, 2743 bp, Homo sapiens
cagccccagcaagaacaggaaactggagattgaatcagatgccgagcgctcagaaactgaaacttaagaaatcgaaactaaacgtaagcttcagaaaccgaaacttaatagaagagctcaagagccgcggccagacgtttgcggagtccagggtctttcggagttgaatttgcagctgggctccttcactttggtctcggcttttatctgcctccctgataggtttttggtcttggtgacttcaagaatgaagctgcggactctcgctgtgagtgctacagttgttaaagatggcgtgtctggagtttgttcctttcgatgttcagatgtgtctggagtttcttccttctggtgagttcgtggtcttgctgacttcaggagtgcagctgcagaccttcacagcgagtgttacagatcttaaaggtggcgcgtccggagttgttcgttcctcccggtgggttcgtggtttcactgacttcaggagtaaagccgtagacctttgtggtcccaaaccagttgtcttcctgcaacatggcttgctggcagattctagtaactgggtcacaaaccttgccaacagcagcctgggcttcattcttgctgatgctggttttgacgtgtggatgggcaacagcagaggaaatacctggtctcggaaacataagacactctcagtttctcaggatgaattctgggctttcagagttcctttcttggattacagttatgatgagatggcaaaatatgacctaccagcttccattaacttcattctgaataaaactggccaagaacaagtgtattatgtgggtcattctcaaggcaccactataggttttatagcattttcacagatccctgagctggctaaaaggattaaaatgttttttgccctgggtcctgtggcttccgtcgccttctgtactagccctatggccaaattaggacgattaccagatcatctcattaaggacttatttggagacaaagaatttcttccccagagtgcgtttttgaagtggctgggtacccacgtttgcactcatgtcatactgaaggagctctgtggaaatctctgttttcttctgtgtggatttaatgagagaaatttaaatatgtctagagtggatgtatatacaacacattctcctgctggaacttctgtgcaaaacatgttacactggagccaggctgttaaattccaaaagtttcaagcctttgactggggaagcagtgccaagaattattttcattacaaccagagttatcctcccacatacaatgtgaaggacatgcttgtgccgactgcagtctggagcgggggtcacgactggcttgcagatgtctacgacgtcaatatcttactgactcagatcaccaacttggtgttccatgagagcattccggaatgggagcatcttgacttcatttggggcctggatgccccttggaggctttataataaaattattaatctaatgaggaaatatcagtgaaagctggacttgagctgtgtaccaccaagtcaatgattatgtcatgtgaaaatgtgtttgcttcatttctgtaaaacacttgtttttctttcccaggtcttttgtttttttatatccaagaaaatgataactttgaagatgcccagttcactctagtttcaattagaaacatactagctattttttctttaattagggctggaataggaagccagtgtctcaaccatagtattgtctctttaagtcttttaaatatcactgatgtgtaaaaaggtcattatatccattctgtttttaaaatttaaaatatattgactttttgcccttcataggacaaagtaatatatgtgttggaattttaaaattgtgttgtcattggtaaatctgtcactgacttaagcgaggtataaaagtacgcagttttcatgtccttgccttaaagagctctctagtctaacggtcttgtagttagagatctaaatgacattttatcatgttttcctgcagcaggtgcatagtcaaatccagaaatatcacagctgtgccagtaataaggatgctaacaattaattttatcaaacctaactgtgacagctgtgatttgacacgttttaattgctcaggttaaatgaaatagttttccggcgtcttcaaaaacaaattgcactgataaaacaaaaacaaaagtatgttttaaatgctttgaagactgatacactcaaccatctatattcatgagctctcaatttcatggcaggccatagttctacttatctgagaagcaaatccctgtggagactataccactattttttctgagattaatgtactcttggagcccgctactgtcgttattgatcacatctgtgtgaagccaaagccccgtggttgcccgtgagaagtgtccttgttcattttcacccaaatgaagtgtgaacgtgatgttttcggatgcaaactcagctcagggattcattttgtgtcttagttttatatgcatccttatttttaatacacctgcttcacgtccctatgttgggaagtccatatttgtctgcttttcttgcagcatcatttccttacaatactgtccggtggacaaaatgacaattgatatgtttttctgatataattactttagctgcactaacagtacaatgcttgttaatggttaatataggcagggcgaatactactttgtaacttttaaagtcttaaacttttcaataaaattgagtgagacttat

SEQ ID NO: 806 - DNA, 2347 bp, Homo sapiens
ggtgtgtgtccgagtgtgtgtgcatgggtccatgtgtgtatagtgtgtgcacatgggtccatgtatgtgtgtgtatatgagggagacacgcaggtgtgtgtccgagtgtgtgtccatgggtccatgtatgtgtgtgtatatgtgggggagacaggtgtgtgtccgagtgtgtgcatgggtccgtgtatatgcgtgtatatatggggggatatgtagatgtgtgtgtgtatgaacaggtgtaagtggggagcactcaggtgtgtctgtgtgtgttcgtgtacacgtgtgtatgtgtgtgaacatggaggggtgtgtgtgtccgtgtgtaggtttgcgtgcatgcacacatgcatgtgtgtactggggcatccaagcccctggtctccactccataccaccctacgcctacctccttgatctctgcgcccagccttggctgtgctcccctgctgtctgcacgtgggtgtctgcacgtgggtgtctgcatgtgggtgtctgtgccctcaagtgtctcgtgtctgcacgtgggtgtctgcaccctcacgtgtctcgtgtccgcacaagcatgtgtaggtgtccctgctgggctctttggtgggcggccagtgatcctcgaggtcacgcacgtcttctgtgggtgcctgctccttgcaccccacagtgttgagatgggtttgcattggccccgcctgtcccctgctcacccgcctccctctcttcctgcttctaagccccgaaactctggattccggggcccttcacaggtgagcacgtggcagcagtgcctgcagacccctggctggcccatctgtcctcccgcccgtctctctgatctctctctgccaggctgcccctgtctccatccctcttctccctcccactgtcggtgtctgcccaccagccacccctgggtcccgtcacagcccttgtggcctccgcagctggggcccttgtcctcccgcctcccccaccctgtcctgttgccaccttcctagaggccctgacctgccctctgccctccagcgagaaggcactgcagagcaaccactttgaactgagcctgcgcactgaggccacgcaggggctggtgctctggagtggcaaggccacggagcgggcagactatgtggcactggccattgtggacgggcacctgcaactgagctacaacctgggctcccagcccgtggtgctgcgttccaccgtgcccgtcaacaccaaccgctggttgcgggtcgtggcacataggtgagtagggaacccagcgtgccgagaatagtggcgagggctgcccagacttgcccagctgggctgtgtccagtcacttgtgaccaggggtcagggaggacacgccttgctgcctgagccgaggtcactgccagtgggaggaggaagggccaagaagatgcaggagaagcaatgatcagtttccacgtctgaaaggcatcccggccctgcccggagcctgccgggggtcgctccagtctgagcctggccgtcgcctccagcaaagcttgagctgcaggaatgtccccggccttggctcccagtgccctccttggggtcaaggccacctcatccttgcccccaggggtgatacctcgggggttctccaggctgaggcacctgcagggcataggaaggatgcagggcttatggtctagaggaggcagagggaactctgggccctgatggtctccccctccctgcacacccagggagcagagggaaggttccctgcaggtgggcaatgaggcccctgtgaccggctcctccccgctgggcgccacgcagctggacactgatggagccctgtggcttggtgagtgttttggggagactagagagggatgcccaagggtctcatgatatccgagggacagactccaccccccagcgcccacccttgagtcagggtgcatgtgagccggcgggctgggcctggccatggctgtgttcttcatgtgttgattttatttgacccctggagtggtgggtctcatctttcccatctcgcctgagagcggctgagggctgcctcactgcaaatcctccccacagcgtcagtgaaagtcgtccttgtctcagaatgaccaggggccagccagtgtctgaccaaggtcaaggggcaggtgcagaggtggcagggatggctccgaagccagaaatgccttaaactgcaacgtcccgtcccttccccacccccatcccatccccacccccagccccagcccagtcctcctaggagcaggacccgatgaagcgggcggcggtggggctgggtgccgtgttactaactctagtatgtttctgtgtcaatcgctgtgaaataaagtctgaaaacttt

SEQ ID NO: 807 - DNA, 2156 bp, Homo sapiens
gtactaacaggagcctgccatccccattccttcacagctcctgctgcctgggcacaaatgccctggagagtgagtgactgtcagaccagccggaggggagcaacgggaagagccgcttgctgagaagaggtgggcttggcaggactgcaggtggagtactctccccagtcccctgcaggtgctggtctaagccaagctgggaggatggcggccggccctggcccagccccaggcaagggaggagcctcggcccagatggggcaggtggggagcctgggctcaggtgtgtcctgtgggaagtgattgctccctggctagcagagacagaggaaagcggattgttggccccaggacccagctctgagaggctgggcttgtttccctgactctgccttggaggaaagcaatggaaggggaaggggtaagaaacttcaaggaacttcgagccaaatttcaaaatcttgatgctccacctcttccaggacctattaaattcccagcaggtgtttctccaaagggtgacattggaggcacacagtcaactcaaattttggccaatgggaaacccctctcatccaaccacaagcagcgcacaccatactgttccagtagtgagtcccagcctcttcaacctcagaaaataaagttggctcagaagagtgaaattccaaaatgttctaactccccagggcctctgggaaagtctactgtatgttctgcaacaagttcacagaaggcttctctgctgttagaggtgactcaatcaaatgttgagataatcactaaggaaaaagtaatggtggccaatagcttcagaaacaaactctggaactgggagaaggtttcatctcagaaaagtgaaatgtcttcagcccttctccttgccaactatggaagtaaggccatccatctggaagggcaaaaaggcatggggcttactccagaggaacccaggaaaaagctggaaacaaaaggagcccagactcttccttcccagaagcacgtggtggcccccaaaatattacataacgtctctgaagatccctcttttgtaatttctcaacatatcagaaagagctgggaaaacccacctcctgagaggagcccggcaagcagcccctgccagcccatctatgagtgtgagcttgccagtcaggccccagaaaaacagccagatgtcaggcatcaccaccttcccaaaacaaagccattgccctccatcgactccctgggtcctcctcccccaaagccttcaagacctcccatcgtgaacctccaggcctttcagaggcagccagctgctgttcccaagactcagggggaagtgactgtggaagagggctccctgtctccagagaggcttttcaatgcagaatttgaagaaccacataattacgaggcaacaatttcatatctgagacactctggcaactccattaacctgtgcactgcaaaagaaattgctgatcgtagatgcctgtgaagggacacctgaaaaaattcagatgaccaacgtccacacaggtagaaggaacatgttggctggaaagcaagaggccatgattgacatcatccagacaaatccctgccctgagggcccaaagctggccaggcactcccaaggccactgtgggcatctggaggttttggagtcaactaaagaaactccagacctaggggtctctaagacaagttccatctcggaggagatatatgatgatgtcgagtactccaggaaagaggtaccgaagctgaactactctagctcacttgcctcaagtagtgaagaaaatagagaactgtatgaagatgtctacaaaacaaagaacaactacccaaagatagatttagatggaaaagaagcactcaaaagactgcagcaattcttcaagaaagaaaaggatagatttaaaataaagaaaaccaagtcgaaagaaaacttaagtgcattttccattttgctgcctgatttagaacttaagtctcaggaagttattatttatgatgatgtagacctgagtgaaaaagagtcaaatactttgttgaataagaatggagagagtgggcatccatgtcttattccagaaaagctggaagcttttccctgttagagatgaagataaactgaaaatgtggaagcccaagtttctgacacc

SEQ ID NO: 808 - DNA, 2364 bp, Homo sapiens
gcgtagcgccgcgggtttgatgaacgcggttcccggggagactggtacggttgctgtgtgctatggagccgagggtcgtcaagccaccggggcaggatttagtagtggagagtctcaaaagccgctacggactcgggggcagctgccccgacgagtatgatttttcaaatttttatcagtctaagtataagagaagaactctaacctccccaggtgatttggatatctactctggagataaagttggttcatcgttaaaatattctgatgaaagcaagcattgtagaacaccattgggcagcttattcaagcacgtaaatgtgaattgtttaaaaaatgtttttacattttttctcagttatgctgttaatatttgaaaagcagttttatctttttaaagtgctatagtaaacttctagattgctgtgatacaattatttttttaaagcctagatgatgaactggattctttccatgatttgaagaaacaggaaacagaagaagagttaattgaaaatgattatagagttagtacctcgaaaataaccaagcagtcttttaaagaaatagaaaaagttgccttgccaactaatacgacctcatcgagacctcggactgagtgttgtagtgatgcaggtgactctcctttgaaacctgtcagctgtccaaaatctaaagcatcagacaagcggagtttacttccacatcagatcagtcagatatatgacgaattatttcagatacatctgaaattgcagtgtgaaactgcagcacaacagaaatttgctgaagaacttcaaaagcgagaacgttttttacttgaaagagaacaactgcttttcagacatgaaaatgccttgagtaaaattaaaggtgttgaagaagaggttcttacaagatttcaaattataaaagagcagcatgatgcagaagttgaacacttaaccgaagttcttaaggaaaagaataaagaaaccaagagactgaggtcctcttttgatgcattgaaagaattgaatgataccttaaaaaaacagttaaatgaagcaagtgaagaaaacaggaagatagacattcaggctaaaagagttcaagcacgtttagataatttacagaggaagtacgagtttatgacaatacagagattgaaaggaagttcccatgctgttcatgaaatgaaaagtttaaaacaagaaaaagcaccagtttcaaaaacttacaaggtaccacttaatgggcaagtttatgaacttttaactgtcttcatggactggatttcggatcatcatcttagcaaagtgaaacatgaagaatctggaatggatggtaaaaaaccacaactcaaatttgcttcccagagaaatgatattcaggagaagtgtgtaaagcttttgcctctaatgacagagcagctacagtggatgccatttgtgaatatcaaacttcacgagccttttgtaaaatttatatattggtccctaaggcagctagatgctggagcacagcactcgactatgacatcaacattgaggagattgggtgaagacatttttaaaggagtggtaactaaaggaattcaggataattctccacagcattctgtggagaataaaccaaagacagctgctttctttaagagctccaatttgccattgagatttttatcaaccttaattgttctcaaaacagtcactcaagctgattacctggctcaggcatttgattctctttgtttggacttgaagacagaagaaggaaaaaccttgtttttggagtatcaggctgttccagtaatattaagtcatctaagaatatccagtaaaggactcctgtctaatgttattgatagtttgctccagatgacggtggaatctagagtaataagaagctctttgaactttttacgattcatctgatgcttcaagaaatacaaaggacaacaaacccagagcatgcatttctctgtattaatctaaattcaactctgttcaatctgggtttaacaaaatgtaactccctggtctccagtgcaagcccttagactggctaattttttaatatagtatatgtggtgcttatttataaacatgtagaaattaccaaagtaactacaattctaccaagtaaagttatcagtagcatcatttatcatgaaaaataaataatttttttgaactgtaaaaatgaaatctgtagaaggtattggaacttttggaatgtttcagttcaggtaaggtagtactaatatacaagatggcgtttctagaatgtatgacactgaagtgactttttgtaaaaatatattaggaaaattatttcttaaaattatgtgaatatttggaataaaattggtgcttatgtgag

SEQ ID NO: 809 - DNA, 3327 bp, Homo sapiens
gttggcctactggacttgaaacattctgagtgtgcctgcagtagggtctcagaggagttgctctgaaagctgttgagagcagccacctttgctgtcactgagagcttggcagggtcagctctggtgggccgtttgcacccaggctctgatggcaccaggatggcttcctgcaacccggaacctgatcctggcccccggcagagcataagggcccgaggccagggacctagaggccggaccaagttcgcgcgaggtgttcacagcctaggcgccccgggcttggcttcgtactctgcaacaagccaagctcccttgccacgagtatatcagcaacttcagaaataaacaccagcgaaaccccttcccacattagcttgttgctgtgctactgacactgggcttagtcgatgttcacacctattacatttttccggaaagtgggaggagcagggggtagagaaagctgtgtgtattgagggaaggggagatgtgtgcaacaccttccagaaaaatggggaggtagtttagaaagtttttctctgtaacagcacagcttctgagaaggcagagagaagaaagcagacaggaaacgaatcccttcctcctctcccctttacccccttccttcactccctagaccaagctggtcacccggctgggaatcaagattgtgtggctgggaagacaccagtctctgtgctcgggttcagcccagtcgggcaagaaagtctgggcagctggagaaggtcgtcacagtctcccgtggaatcttgttgcctgagagccccataacggaaagggctaagacgactcttccacacacaggtcgcagcccctgccgcggaggatccccaggaagatgctggggacgctctgagcatcggcctttctttacccccgactccctggagcttggtctcgggatgccaacttggggcacggaggcgacgagctgctccgaagctggagggtttctgcttgggtcagagggatcacgacctcagcagagccaggagaggttgggtgacacccactgcgtattgcacttgactcaaaactgccctcggcctgcggaagaggcgagggcaagaagcctggtggcgggtcaaaccttcaccctattattttctatcattttttatgcccatatatttgttaaatgtatggctgctatacaccaacagcttattctacaagaagtgcccccgaggaggattgggttaagctttgcaaatttggcttcccaggtaatgcgcttcattattctgctcccgacttacccaccacaccagtgggtacccggagcagcacccacttggcagaactgatgactgcttgggcccagcggagtgcgcattgcgctaacacgcgcacgggaattgcacccttgccggagcctccgtaccgtgcgcccttcaaagagctggcgaccccgctcacgtgtaagcaacctcccactttgaaactaattcgcacccgggtctttcaccccaaaggactttgctgcggacgctgctctgacccaagacgcgggagagaagtcccaaaggctacagccaggggctgggggactcctctgctcaccttagtccttgatttcgaaggccccaattaactatctgttgtgtcagaatcggcgagtgcaaagtagctgcgccccgctgacgcgctctctcctgggtccgggtatcccagggcatccggagctggggagggttgtgcggactacccaaggcacgcgcagataccgggcagggaagaagggctccgtgttccaaggatggtcgtttacctctcctgagatcagccctaatcccttggtaacttaagcgcctctgaactcggggagcgcttggtggggcgcctccctgcatccacccctacccctggctccttcccaggcccagcatctttcccaccattctcacccccaccacccccacggccccgcccgtttagaggcgtgcggtgggcacttggtttacagaaccggcgtttcagatgtttatttgcaactaatttcttgtgctggaaaatgcttgttacccgggcggagcgcttccgctctgcgcggtccggcccggcgggcggtagctcgctgatccctccggcgaagcctccaaggagcgggcggctgggagaggttgtgccacccgggaccaagccatcggcgctgctccggactcccggtagggggagccgccgcgggcgccaggccggattgtgttctggcctcggggcggccctgctgccagcggccgggactctcagcacagagctcgggaggactccacctgctctccagataaggcgccatgagcagagaagggaacagacggccaagctccctcctaattccccgttgttgcagagcaaagaagatgggggagaactaattatattctctaggtctaaatattgttgaaaaatttgtaggtgagatcacctcctttgcccatatccatatataatatatccattacatgtgtttgcccatatatatacgtatgccatatgtaaatatgtacgagtgtgtatgtatgtgtatagcagtggtttagaattagtctcagttccacaaattttgagcccttttaatattttaggtgacctaataccttctcactgtattttccaagtcacttatttccaagagttttaggtgatcccagcataggagctgagcataggagctcagatgagacttgccagttttgctgcagtaatgtcagcaaaagagtctctctctttctgactctatagacttaagtaagggtttacaggctttcattttaaggtatgactgatatttagagaacaagactaaaccaaggtcaaggggaaaacagttagactgtgaacctgcagaccactccactgcacccagtgtggccgtacacctgtgctgaacggccagagacttcctggtcaatactcccacagacaaaagactgcaggatctgcttatacacaaatccatctttcgctgggaacccacaactcataacaactctcctaatgccaagtcatcaaggcctcttgaaagagaatcataaaaaacaaagaatttcaaacttggaaggaaacctaaagtttactggtgaggagcttgaactgagtagaagcaaagaatcatactccagatgagaaacgccccatgcactgagctgagactggaactctcctcttcttactctcagtccagtaagtttgactacagagcactcattatcattatgattattatgttcccgcatattttgtcgttcttagttaggcatactcctttaacactattgtaataaaagcaaaatctggaagatcttt

SEQ ID NO: 810 - DNA, 2315 bp, Homo sapiens
aaaacaaccctcatggcgccgaaatcctttccatgccgacaagcccgccctgggcgcacgagtggatgcttggccagcctttcctgggatcgaccccgccgccgtgctcagccctcaccacgtccccatcccaccccacgcctcacagccggggttcctggccagcttcggaagccaccgagaaataggattccgtgcgcccgagagaacttttccaggggctaaggaatcggccagccggaggcgcgagaaaagttctgggaaggcggttgcacctaggatgggtggatgccacggggcctccgtccaggctgtcccgtccgcacgggtcgactggtcaccttggaatcccctttgcaggtcccagcgccccccgggaacccgcagcctccgcggagagcgtgggcctctccctaccgctggggcgcagcgcagtgcacgcctgagggtggtcgccgggggctgggcacgcccccagtcctgcgccgccgggggctgcggcggtgctgcccaccccagagagccctcggcctggggctccggcgaagcaagtgccttcccggcgccggtcgccaggggggcgcgggagcagccagatgcgccgcagcgctgggaaggcggcgaaggacaggggctaggggagtgaggggcgctcggcaggcagcctcagccctggccctgcgcgggagaagggacagcagagaccgcccgtggggccccggggtgtagggagctgtccgttcagccctggcgcccgcctcgcccgcggcagagggcggcacagccggagccttggaaagaccggcagcgccggcagccgcgggcttctcggccactgcctcccggacgcacgggaagccgccccccgcgccgccgccgccgcactgccgccgtcgcagaggggtgaggaaatcaactcaccgagctctggtcgccgacaagaggagccccggacgccggctctcgccctgcccgaggctgcaaagttgtggactcggcccggctggctcgcagcctgcgcttcgcttcgggaactgggcaagtagcggggatgtggggaggagggagcgggcagctgctggcttcccacttgggcgccagcgagtaagggccaggaagcggcggggatggcagctgggcaccccccagccccgccacccctccctccgctcctgggggcggtgctctggccgccagtctcagcatcgtggacttgccccctcctcccctctcgattccccttgagcgggctggggcgccctgcctggtttcagcgcccgttccagctgggagattgggattcagccctgatgtggattctccagccatcatcctgcccttccctctcggctaggtcccacgaccttccctgctctccactcggactgaaggaaccctgggggcttgagaggtcagcttgccagggcaacacccatgaagatcagcgtcatctcctcggaagggctgtgtacagagggttgggagttgggactctggagcctgtctacctgggtttggatattcaccattcactactgtgagatctcagattccagtttcttcgtctgtaaattccagtgtgatcttagattccagtttcctcatctgtgaaatagagatatgagggttaaatgacaatctatgtaaaacccttaaacagggcctgcccagggcaagcactgcttgattagatcataattagacactacttatcgggcccctactaggtagcaggcattgtgctaagcctttagcataagatgcttccttaattctctcagcctgatctgtgaagctggctgagccccattctggagatgaggaggttgaagctcagagaagctaagtctcatgtctaaggtcatacagccattaagtgacagagcctggacttgaacctggttctagcattaatgctcctgcactcagcctctacacagcccagcatcaccctgggacccacgggcagctctgatttgagagaaggaaagacaatgggagtttatccagacacagagcttgaacttggagcttcttctttgagcctcacccccaccttcttatttctatttccttccccttccagggctccgctattctaaggtgggtactgtgatgcgccaagagggtagtgacaccaatgtgtatcaaacagtggggggtggggggagcagagccttaaaaacatcaaacactgcaggaatattggtgccatcaccatcctcaatttcctgggtgtcgcagctcacctacctgccctgttcctctcctctcggtgatggcatacttaataaataaacatttattgctttctc

SEQ ID NO: 811 - DNA, 2733 bp, Homo sapiens
cgctctctctctctctcacacacacacacacacacacagcccgtctcgcgcctgaggtctcgcccgcaggccggtggcgcggggtcagctgctgcctgcggtccaggacagggtcggttccgccgcgcagcgcccaggcccagctcgtccagagtctgcggacagcgcacgtccagtcgtggcattcctggtggctttccatcagaacaagcagctcatcggtgacagggggctgcttccctgcagggtgttcctgaagaacttccagcagtacttccaggacaggacgagctgggaagtcttcagctacatgcccaccatcctctggctgatggactggtcagacatgaactccaacctggacttgctggctcttctcggactgggcatctcgtctttcgtactgatcacgggctgcgccaacatgcttctcatggctgccctgtggggcctctacatgtccctggttaatgtgggccatgtctggtactctttcgcggctcagcacgtcactttggactgtcgcgcagaaattcagaagactcgtagtagcttcggcagtgctctccctgccttccgagcagccatgcgtctttgaactgtcttcccttccctgatcttggagaacatagagctgccagttactgaggatgggagtcccagcttctggagacggggttcctggggatcttcctgtgccctctgtggacgctgtcaaggctgccccagcatacccccacatcccggattgtcctgtggggcttccggtggctgatcttcaggatcatgcttggagcaggcctgatcaagatccggggggaccggtgctggcgagacctcacctgcatggacttccactatgagacccagccgatgcccaatcctgtggcgtactacctgcaccactcaccctggtggttccatcgcttcgagacgctcagcaaccacttcatcgagctcctggtgcccttcttcctcttcctcggccggcgggcgtgcatcatccacggggtgctgcagatcctgttccaggccgtcctcatcgtcagcgggaacctcagcttcctgaactggctgactatggtgcccagcctggcctgctttgatgacgccaccctgggattcttgttcccctctgggccaggcagcctgaaggaccgagttctgcagatgcagagggacatccgaggggcctggcccgagcccagattcggctccgtggtgcagcgtgcagccaacgtctcgctgggcgtcctgctggcctggctcagcgtgcccgtggtcctcaacttgctgagctccaggcaggtcatgaacacccacttcaactctcttcacatcgtcaacacttacggggccttcggaagcatcaccaaggagcgggcggaggtgatcctgcagggcacagccagctccaacgccagcgcccccgatgccatgtgggaggactacgagttcaagtgcaagccaggtgaccccagcagacggccctgcctcatctccccgtaccactaccgcctggactggctgatgtggttcgcggccttccagacctacgagcacaacgactggatcatccacctggctggcaagctcctggccagcgacgccgaggccttgtccctgctggcacacaaccccttcgcgggcaggcccccgcccaggtgggtccgaggagagcactacaggtacaagttcagccgtcctgggggcaggcacgccgccgagggcaagtggtgggtgcggaagaggatcggagcctacttccctccgctcagcctggaggagctgaggccctacttcagggaccgtgggtggcctctgcccgggcccctctagacgtgcaccagaaataaaggcgaagacccagcccctcggcggctcagcaacgtttgcccttccctgcgcccagcccaagctgggcatcgccaagagagacgtggagaggagagcggtgggacccagcccccagcacgggggtccagggtggggtctgttgtcacatactgtggcggctcccaggccctgcccacctggggccccacatccaggccaacccttgtcccaggagccaggggctctgatctcccatccatcccaccctcctcccagaggcccagcctggggctgtgccgcccacaggagttgagacaatggccatcctgacaccttcctccactacagccctgaccatagacccagccaggtagctcttggggtctctagcgtcccagggcctggtttctgttccctcttcaatggtgtgttcccagccaggtcctgaccctcagagccaagtccctgtcacgtctggggcagccaaaccctcgccccacagggacctggacacgcccggccaggatgtggggttggatgggccattttctgtcctatccctcatctccacccccgccacagcctacacgcatcccacacatgcaggcacacacagcctgtgcacacatgtgttcttggcccggtttcatccccccatgactggtgtctgtgaggtgcagatggacacagcgcacacccagaccctccaccaggctgtgacctcgctgcctctgaggccttgacaaggcccctcaatcggaggacagccggccgtgcacactttcatcatcgtcggacaaacagcgtctactgcacatttttcttattcctattcttcagccatagctatggcatattcttctactattcctattataccacttaccagcttactcg

SEQ ID NO: 812 - DNA, 2459 bp, Homo sapiens
tgtgctcttgtgtccctgccgttccactgtgggggttgggggagccgaggggcttatggtgagcactgagactggtgatgtgggagggccacagcaggctgtggaagggagtttgggtttctttcagagtccagaagggataagggagggttttaggccagggtgatctggtgagatttgagggttctgtggggctcaccagggattgtggatgtgccaggctggtcccctgggcctccgagtatccaagaggccggctcaaagctggatcaggtcctcccgccaagaggaccctgggcagggctcttggtgggagggcctaggggccaggggtcagagaggactagggccgtgctctcggcctctacagcctgagcattcatccagtccaggccttcagctcggctcccgcctaccctgcctgtctcatccgtctgccctttctggccttggagaacccgacccagctcagagacagctgagggccttgatggtgggctagacagaggaaggaagggggtcttgaggtgggtctggaagcttccttggattctctcttcttgctgccaggggccagtgaggtttactggcagctgcagcctcgcccaggtggcctgagtgtgttttttgatcccccctgtttctgccaccccaggcagatcccccagagcctgttcctgtccctgccctttcaggtttgggtcatgaggatgggcaggcaggggcctcatgcactgacacagcttaggggtaggccccagggatggggagctttgcactgtgaaggagagcactgggcagggtatccagaggactgggctgagtcccacgctgccctggcttggtgggagtctggaagactgtcccttcctggctctggcaccagccccaccccctccaagcaagggtcatattagccagtccctgagtccccccacgctcactctcaggggatggatttttgtgggaggggcaggtcggggccggcggggaggcctcaagcctcatgatcctagtgtccatctagccctgaaaagagcccagccagtgggagctggatgatgtcaagggcagtcttgggggtgacgaggggacaagggggaggagtttcctggggacagggaaagccctcagagccctctcccactcttcctaggcaacaagcccagagtccggagtatccgctttgcggcaggccgcgatgcagaaggatcccacagccacgtccactttgatgagaagctgcatgactcggtggtcatggtcacccaggagagtgacagcagctttctggtcaaggttggcttcctgaagatcctgcacaggtatgagattaccttcactctgcccccagtgcacaggctgagcaaggatgtccgcgaggcacctgtccccagcctgcacctcaagctcctcagcgtggtgcccgtccctgaaggttatagtgtcaagtgtgagtactcggcgcacaaagagggcgtcctcaaagaggagatactgctagcctgcgaaggtggcactggcacctgtgtgcgcgtgacggtgcaggcccgcgtcatgggtgagagcgtgaggctcctggttggaggagggatgcacaagctcgactgcgagggtttctgtcctcctcagggaaccaaggctgaacaagggatccttgcccggctcaggggttctcaacctccttggcaggtccctacctccagctgatccctgagggaaggggaggggtccccttagtgggccgcatgggtggggccgggggccagcatggcactgacttgcaccctgccttgcagaccggcaccacggcacgcccatgctgctggatggtgtcaagtgtgtgggcgccgagctggaatacgactcagagcacagcgactggcacggctttgactgaggcccgaggccccgcctgccccgggcccctcagccttaaaccccgccttgtccccccgacatgctgcgtgatggtgtggcttcctcgcccctctctggggtgggtgtgggggtggagtggccttgcccacgcctctcacctctgccttcatttgtgctgccaccctgcccctccctcgtcctcctctcccacttcctcctctctgtgtgcctcagtctcctgccggaagaaatgggttgagcccgaaaggaggctgtctgaggaagggagagggagggcctggggtgggtcccccactccccaccccaagtcacagggactcccaccagggtctgggagaggacggagctggctctgtggcgtcgtggccccattactgctgccttgcttcagccacctctcctgcccctccctagtccccactgctgtccaccatgagtaggagggaggtgcagtccccagcccccacccctcaggtctgtgttacttggtttttaagcgactggttgggatagaaccctaaagaaataaacttccggtggataccggaggccaggtg

SEQ ID NO: 813 - DNA, 2949 bp, Homo sapiens
tcactgccagctgtcatgcgcagcctctgtgagggccgatgacctcctggactgccagcccatcccagacagtcccggtctttcacatcctcccacctctgttctctctcttctgttcttcctagagaggctgcctccgaagagtgaggttctgcagctgccccagcccctcgcctccttccacactctcccaggaaaatcatccaaagagctttctggtcccctcccttcccctcttctgtgccctgcagattcacgatgaccccggcctccattccactccccttaaggagggagtccgtcctgcccagggatgagggcctcatgcctctgcctctcgctgttctctttgagcagtcactattaactaccaccacctagcggccagccgcgcggcctcggtggacgatgatgaggaagaggaggataaactgcacgcgatgctctcaatgatctgctcgcggaacctcacagctcccaatccgatgaaagacgctggtgacatgatcgagatgcagggctttgggcccagcctgccagcctggcacctggagcccctgtgcagtcagggctcctcctgcctctcctgctcctccagcagctccccacatgcaacccccagccactgtagctgcatccccgaccggttgccgctcaggctactgtgtgagagtatgaagaggcagatcgtgtcccgggccttctacggctggctggcacactgccgccacctgtccacggtgcggacccacctgtcggcgctggtgcaccatagcgttatcccacctgaccggcccccgggggcctccgcgggcctcaccaaggacgtgtggagcaagtatcagaaggacaaaaaggtgccaaccctggggttccagggccacaggtcgaggggctggggcgggcaggagtgagggcttcagggtaaaatgtgccagtgggtgcggttgacaggccagggccgatgccacggagtgaccagggtcccggcagaatctcttgcagctgggcctggggctgacacgggaagggggctggactgggaagccgtcctgcctccacatcgccctgtgaccctggacaaagctttgcctctctccgggcgccatttcctgccccttaaggaaggagagcagaacgagatctcatcccactgtgagctggggcacgggaggacgtggccaccccaaagcaggccttgcctgggcttcagcagtcactacaggccccgccccagcccattctccgtgggatggggctcacccagctgggccacggtgactgtggaggctgcacagtcttgactccccgggtccctcagaactacaaagagctggagctgctgcggcaagtttactacggaggcatagagcacgagatccgcaaggacgtctggccctttctgcttggccactacaagttcggcatgagcaagaaggagatggagcaggtgaggggagcctgttcccatggggctgatgagatggggagctgggccaggggacgccagggaggggaccttggaagcctcagccccttcccagccggaaagaagcatggcagggcagctccaccgtccttaccctgaggcccgtcttgagtctgagactcaggacccaaggtccagtgcaggcccagctcctgaaggggagggcctggtgcacgcttcccccatggtcgtggtgtggtctgagtacaggtggacgcagtggtggcagcaaggtaccagcaggtgttggcagagtggaaggcctgcgaggtggtggtgaggcagcgggagcgggaggcccacccagccacacgcaccaagttctcctcaggcagcagcatcgacagccacgtgcagcgcctcatccaccgagactccaccatcagcaacgatgtgagccagacgggacctggagggttgggggtctcgggggccacccgcgttttatgcacagtggtcctgagcaccagcctgacctctgggaactggtggggccctgcgagaaaggcctaaggtgcctgtgtctcattttctccaactggaaatggctaactgtgcctctgctgcctacttctctgggtattgtaggaataaagtgagagagtgcattgtgctcagttttagccaactatagggaaagatggacttactgggatttagggaagccctcctccttgtagaaagacctcaaagctagcaacaggcagcgctgggttctagtcccagatccactactgacaagctgaatgtctctgggcaagcacttcccgtctctgggtctcagtttcccctctccacccatatcctctgactgcagaggcttcctgagatctgtgggcctgagaataggggagcccgtagagcagccccattggtgtcgactggcgagatccttcctccccgcgatgttgcctgtcactgtacagaactgactatggcaggcttgttcggagcacgggagggtagctctttctggcatcactcctgccttttgaacagcaagttctaaactgtgactgcctggcccaaccaacactgataagtttcaattttaaggacgctttattaatttttctttaaaattgcctctttagataatgtgtattcttgttactttactaaatccttaccaacattaacagaaaatgtaagttgaagtaggttaaatataactggctgggtgtgatggctcatgcctgtaattccaacactttgggaggcagaggtgggaggattgcttcagttcaagagtttgagaccagcctgggtaacatggcgaaaccctgtctttacaaaaaatgcaaacctttgccgcatgtgttggggtgcgcctgtagtcccagcttctcgggaggctgaggtggggggaccacctgagccatggaggttgaggctgcagtgagccgtgataccaccactgtactctagcctgggccatagagtgagacaccctgcctcac

SEQ ID NO: 814 - DNA, 3172 bp, Homo sapiens
agacctagacaactcggaagtgggtttttcagcctcctgcaccggtgtcgcgtctgagtgcgactgatgagccagggggcgtcggtggaagcttgggggagaggctagtggtaacaggccgagctggatggatgggtatggggagaggggcaggacgttcagccctgggattctggccgaccctcgccttccttctctgcagcttccccgcagctattaaaagaagcccaggaagtttctgcgcagcgttggagatgaggagactgtggaatttgatgtcgtggaaggagagaagggtgcagaagccgctaatgtaactgggcccggggaggtgcccgtgaagggcagctgttatgcccccaacctacccacctccccgtgcaagatcctcaagtgcaactctgagttctggagcgccacgtcgggcagccacgccccagcctcagacgacacccccgagttctgtgcagccttgcgcagctacgccctgtgcacgcggcggacggcccgcacctgccggggtgacctggcctaccactcggccgtccatggcatagaggacctcatgagccagcacaactgctccaaggatggccccacctcgcagccacgcctgcgcacgctcccaccggccggagacagccaggagcgctcggacagccccgagatctgccattacgagaagagctttcacaagcactcggccacccccaactacacgcactgtggcctcttcggggacccacacctcaggactttcaccgaccgcttccagacctgcaaggtgcagggcgcctggccgctcatcgacaataattacctgaacgtgcaggtcaccaacacgcctgtgctgcccggctcagcggccactgccaccagcaagctcaccatcatcttcaagaacttccaggagtgtgtggaccagaaggtgtaccaggctgagatggacgagctcccggccgccttcgtggatggctctaagaacggtggggacaagcacggggccaacagcctgaagatcactgagaaggtgtcaggccagcacgtggagatccaggccaagtacatcggcaccaccatcgtggtgcgccaggtgggccgctacctgacctttgccgtccgcatgccagaggaagtggtcaatgctgtggaggactgggacagccagggtctctacctctgcctgcggggctgccccctcaaccagcagatcgacttccaggccttccacaccaatgctgagggcaccggtgcccgcaggctggcagccgccagccctgcacccacagcccccgagaccttcccatacgagacagccgtggccaagtgcaaggagaagctgccggtggaggacctgtactaccaggcctgcgtcttcgacctccgcaccacgggcgacgtgaacttcacactggccgcctactacgcgttggaggatgtcaagatgctccactccaacaaagacaaactgcacctgtatgagaggactcgggacctgccaggcagggcggctgcggggctgcccctggccccccggcccctcctgggcgccctggtcccgctcctggccctgctccctgtgttccgctagacgcgtagatgtggagggaggcgcgggctccgtcctctcggcttccccatgtgtgggctgggaccgcccacggggtgcagatctcctggcgtgtccaccatggccccgcagaacgccagggaccgcctgctgccaagggctcaggcacggacccctccccttctagtgcacgtgacaaggttgtggtgactggtgccgtgatgtttgacagtagagctgtgtgagagggagagcagctcccctcgccccgcccctgcagtgtgaatgtgtgaaacatcccctcaggctgaagccccccacccccaccagagacacactgggaaccgtcagagtcagctccttccccctcgcaatgcactgaaaggcccggccgactgctgctcgccgatccgtggggccccctgtgcccgccacacgcacgcacacactcttacacgagagcacactcgatccccctaggccagcggggacaccccagccacacagggaggcatccttggggcttggccccaggcagggcaaccccggggcgctgcttggcaccttagcagactgctggaaccttttggccagtaggtcgtgcccgcctggtgccttctggcctgtggcctccctgcccatgttcacctggctgctgtgggtaccagtgcaggtcccggttttcaggcacctgctcagctgcccgtctctggcctgggcccctgccccttccaccctgtgcttagaaagtcgaagtgcttggttctaaatgtctaaacagagaagagatccttgacttctgttcctctctctcctgcagatgcaagagctcctgggcaggggtgcctgggccccagggtgtggcaggagacccagtggatggggccagctggcctgccctgatcctctgcttcctcctcacaaccccaagagcccccagcccggtccatccacgtctggagtctggggagaggagcagggtcttaggactctcagctctgagcatccctggcagggtcttcaacctctaatctcttcccttaagccctgtggccacacagccaggagagacttgccgctggctcccgcctcatttcagcccagggtgctcatccaggggcccagaacagtcccacctgtgctgctgtgcccacagcacaaagccaggcttcactcccaaaagtgcagccaggccctggagggtgatcctgccagcagccctacagctccacaccctacccacccatcggcagcccctctgctgttccccagggacctctcatacactggccaggaggctgcagaacgtgtgtctccccctccctccaagaggtcctgctccctctgccagaaccgtgtgtgggcgggtgggagggcgctcggggcccggcccctccctctccctgctggttttagttcgtccctatgttggaagtaaaaagtgaagcactttattttggttgtgtttgctcacgttctgcttggaagtggggacccctcactgcgtccacgtgtctgcgacctgtgtggagtgtcaccgcgtgtacatactgtaaattatttattaatggctaaatgcaagtaaagtttggtttttttgtt

SEQ ID NO: 815 - DNA, 2387 bp, Homo sapiens
ttagggaaaaaaatggcattaacttccaacaagaaactgctgctcttctaccgtatcccctttagaacataaaatattaagaaagggtttctgaagcattcacaggaacagaaaactgaagcctgaagcacttcactctgcagcaagataaccccttaaaaatcatccagaatttgggggatggaggtaacccgtcaacacccgcgacacccctaccctaaggtggggagcaggattccgtcaaccagaaaatgccactctccgccccctccgccatccggaacgctgaccggcgcggagtgcgggggcggccgagggcgggagcggcgaggaggcgggacgcgacacacgcaccacgccgagaactgcttcaccgcttttttaaaggtttttaaaatgcagtttctccagccggagaattcccacccattcaccagccccagccctcacccagctccccacccccatcgggggctccgctgggccgtgtccccgaggcggcctcggccccacgccccgaggcgcgcggcccccggcgggggggtccccgacgcggcccagctggggatgcttcgcacctgtatgtagttgttctcgcagtaatcggccacccgttccagatttgtgtagctgtcgaagagggcccggcggccccccgggatttcctcttccagcagcatctgcagctccgccatcttcacatcctcctcctcctcctcctcatacaggtcgcagagggagcggcggccgcagcgccaaggaaacccaggaccgggagaggaggagcggcggcgacggcggcggtaactcggaaggagcgagaaacagccccagcgcgcgacaggggagggggcgacgggggcggggcgcgagccgacggactccgaggacggtcaccgcggcgacggccggccgggcgcgcgcacgcgcgctcccttccctccgcccccgggagcccgaaaaagattcccaccctcgcccgcgccgccggcccctcccccacttccggcgtctcctagcgacggcgggggtaggggccgggatgcgcgcgggagttggtggtgcagttaacccttccgccgcccgcccgccgctggagcggctggagaagcccccacctcccggcggcctttgttagcccggcgggaacacaccaccctgctcagctggcttcctgccggctccctccgggactcatctcggctccgtccccatggaggtcatcggcctagggaacttctcgaggcttttctccctctgctgctgacgggaggccgaaggagggcacagcctccactcttgggaccctcctctgtgaaagatcacacctcaacagggcaggaataaaacttccacgcagctttcaatgccacctgacttcatttttctcagatttgacctcatcctctttgttgcagtgaattgcagtttcctaaccccagctttcctgcgcccctgcctctttgcacttccccactaacgctgttctcccctgccagattagcccctttctctcctggtttgcggtgccgtgggcctcagctttttatgtttgccatttctatgattcgcttcctcactcataaccttttctgtcatttctctaatgctatcaacttcgctgtcctttttcctattcatggattcagtatttaaaattttgaaaacgattttgctagtagtaattgccttcttcacagggctgttacatagataaaatcaacgtttattgtgaaaataccttgaaaaaacattaagtgctacaaaaattcaaggcagataattttcctcttgcagagttataattctgtttttattctccagatactgtgtcttgttttcctaaatcagactaccccacacaatgtaatctggaaaaactaaaactcctgaccattgctgagatatgaagccatgacctttatttgtgctgtggaaaatcaaagttgattccaggcagtaccatcttagacttgtgtagttagaacaagatccattgtttcaacacttttcttaatctggtgatctcttggccctcctacagtgaatttttttcattcagatgatgaggaaacttatactttcaaaaaaaaatcactttaggacgggcgcggtggttcacgcctgtaatcccagcactttgggaggccgaggcgggcggatcacgaggtcaggagatcgagaccatcctggctaacacagtgaaaacccgtctctactaaaaatacaaataaaaaaattagctgggcatggtggcgggcgcctgtagtcccagctactcgggaagctgaggcagaagaatggcgtcatcctgggagaagagcttgcagtgagcggagatcgtgccactgcactccagcctgggcgacagagcgagactccgtctc

SEQ ID NO: 816 - DNA, 3013 bp, Homo sapiens
gaatataggcagttggatactagactttggaatttaaaaagaatgtctggagttagaattgagagacttgaacgtggagatggaggtcaggctgcagtgcgatgggatcatctatggagcatatgaggagaagagaatctggaggaggaggagggggagccagcaggggagcagctgtgggttggaggaagccaggagggagagtgcaatgccgagaaagcaatgaagagcgtttcgaagcatgccagcagaacccaatgctgcaaagaggcctgggaatgggattgctgagggcccttctcacagtgagcccctcaagagcagcgtcaggggattgtggggactgttggcacacagctggctttgctaggttgaagacaatgggaggtgtggaagacttgttgacgcatttaaagaagattggagggaaaggtaggattgagagtgtttcagacagaaaaaggatcatatgctgagggtaaagcacaagtacagagggttgcagatagtgcagaagtctttaaaaacaattattttaacccaacttccagggagactgaatttcttctgccagtcagtaacaccatcaacctgggagttgcccctgacccctccagtcttagctcctgctcctgtaacaaaataccacaaactggttagcttatagagaacagatgtttatttcttacagttcaggagtctggaagtccaagatcatggtgccatcatggccgagttctggtgagggccctcttctgggatgcagcggccagctcctcatgctctcacagtgggtggagggtaagcttgctctctggcctcctcttaaaaaggcactaatcccattcatgagggctccaccttcatgacctaattacctcccaaagatgccatctccaaacaccatcattctggggattccatttcaacatgatttgggggatacatcagaccataacacttttctttttctcaaccttcacatccagttggttctcaagccctggcgattttacgcgctagataggtcttaagttcatctctacgcctgccctggttaaggttctcatcatttctcctctggattcatctgcaacacaggctgctgggttggttcccacctcctagagctggaagagtgggctctctgattctttacacccccgcctcaatcctcctgctgcctgaataaccatctccccgtgacctaggatatatcccagccccttagaggcatgcaaagccttccatgtctgaccctgcctcatgtcttggaagccctagactgctgctgtaccctgaaggaggtacctgctcacattggcccctctgtctggaataaccccaccccggttccacccaattcaggaaagcttcccaacccctccctcccaccaccccaaagctaagtgaagtgacccctcttcttgcctctgtaacaccgccatgcacatttcatacagcccttgctgaaacttcatctagttctctgttagacttaacattccctaagggcaggtttggaaccttactcatctttatatggcgtctaaaatagtgcttgctttatgataggtgctcagtaaaggttgtcttgaattgagcagatcctctagggacaggagttggatggagagcagactgtaaagcctcatgagggcaggggccctgcctcttcctgagctcaggatacccagagcctagctcagtgcctgccatgaaattgttcactccatcaagccttgttaaatgagttcggggcggggggagcatgatggttttctctctctcagaaagaaagcgctgtatcaaagccctagcaccctctctacacccaccttcagtatttcatattagatgcggcccaagtgatactttctttaccgtcccgtgaagacagcatattggcagccctgcaaaaacaaaacaaaacaaaaccctcagttcatggcatacttgctataaatcagctatgtgtattgtcaaattgtagaactgaaagtatattctgattcggtgtgtgtataaggaaatatacaccagtatatgcattaaaacgtcaagaagagctgggcacagtgtcacatgcctgtaaacccagctattcaggaggctgaggtgggaggatcggttgaggccaggagtttgaggctgcagtgagctatgattgcacagctgcactccagcctgtgctgagacctcatctcttaaaaaataaaaaataaaaagtctaagaggatacacagaaatttttaagtggttacctccacggaatgggattaggggatcagaggtgagggaactcatggtttggctatttctcgttctttctgcactgtttcaaatttttacaagtgtatgttattgtacttttaaaaagattagcttggcaacaagtctagcctgaaatgggtgctattttgactagtctgagtgaaaagtgaggatttaaatgaagtaacccctaaactcagccagtcccatgtttttttaacacttggaatatctaattccatttacactgcattcttcaaatgtaattttcaaagatgccttttgcctcatcccttgcttttaagtattattatagacttttggagactcacgaaacaagcaatccctaaattctcgcccaggaaagtatcttggattaaatggtttttgagaaccttgagagtgtatattctatgaaatggaagaaacaagaactagacagagtcacaaatgctgttgatcacagacaatctctgccatccataaggtaaatgtaatacatctggcgacctgctgagtgtgaacttgcagcaggtgaggaaggaactctgaactctcacaatcttgtttcttcatttcccagagagaaactcggcaaagagaaaaaggacatttccctccaggttatctgaaagaatttcaatgcttacctttaatcatgtgacattgtttatcttggattaaaagaaaagaaaatgtatttattttgtgcatattttcaataaaatatataaaatcg

SEQ ID NO: 817 - DNA, 3079 bp, Homo sapiens
cgctcttccgaagtgtctgggtgggtgcctctgtctctcctctctcttcccaagtgtgctgcccacagcattttaccagctggctctttccagccagagtgacctaggaaggcggctgggcgtggtactggggtccagcttgtcacacccagccctgcaaccgtggggacagtgcatcgtggctcacacccccacccccgtgttccagagctgcctggattgacaagtgccgccccaacctgctcatcacagagtccacgtacgccacgaccatccgtgactccaagcgctgccgggagcgagacttcctgaagaaagtccacgagaccgtggagcgtggtgggaaggtagctgcagcaggggtggggacatgggccctcggccatgctgggctggtctttctggcaggcttggctgcccttggcatgggtcagggtctcagggtggggggtactgcattttcaggcagggagggaagaagatttgctcaacattgaggaggaaaactcagagaccctttcctagggagccccttttccctcctacctcaggtgcggacgaagccctggccaggctccttctgtctctcatgcagctcccttctgtctctcatgcggctccctcctgtctctcatacggctcccttctgtctctggagagcggctgggacgggactgggagcagatgagaggctaaggtccctatgaggccgcagctcttgggcacctggccgtgccctcactggacgctgcctgctgtgtcgaggggccatgtgcccagggctcctgccttgtgtccccctcaggtgctgatacctgtgttcgcgctgggccgcgcccaggagctctgcatcctcctggagaccttctggtaggtgccgccaggacggctctttaaggagcccctggcccggcctgaacacagtccagttggtgggcagccctgtccagcgtagcggtggcatcttggccctgcttgctgctgtcctggggggccgctcgtgtgctgtgtgaccccaggaagcctgtgacatcccgtcagcgccaccgtgtgcggctcttgtaggggttcctggttctccgctgagcccggctgctgcagggcttaatgggacaagtggtcgcgactggactcaacctggcccgtgcgtgggctgtgcagacacgggtgttgggggtgacccggccgagtcctgccctgcagcattctcccctgtggccactgtgctgactgggccggtggtccccagggagcgcatgaacctgaaggtgcccatctacttctccacggggctgaccgagaaggccaaccactactacaagctgttcatcccctggaccaaccagaagatccgcaagacttttgtgcagaggaacatgtttgagttcaagcacatcaaggccttcgaccgggcttttgctgacaacccaggaccgatggttgtgtttgccacgccaggaatgctgcacgctgggcagtccctgcagatcttccggaaatgggccggaaacgaaaagaacatggtgagggcatggtgaggtgtgggaatctggaagctggaggccgacgggttgtccttccacccatgctgcctctgagctctcactggcttggcctcgtgctggccaagggacgtggctgctgctgctggggaacgggggcgatgtccgcctggagctgctcagtctctgtgacacagcttgtccacctcgggcagaacagccccagcccagccctggacagtcttgtgccaaaacctgagccctttggagtctgcagctaggcttggtcgggcgccgctggcaggtggaaacagcttccaggggttcaggcgggggcatcccgggcaaggccttgaggtgccaaggctggagttccctggctgtgagctctgtgcctgcccccaggtcatcatgcccggctactgcgtgcagggcaccgtcggccacaagatcctcagcgggcagcggaagctcgagatggaggggcggcaggtgctggaggtcaagatgcaggtggagtacatgtcattcagcgcacacgcggacgccaagggcatcatgcagctggtgggccaggcagagccggagagcgtgctgctggtgcatggcgaggccaagaagatggagttcctgaagcagaagatcgagcaggagctccgtaggcagccgggcgggcggcgtggggcccacctcgggtcagcacgggcagcctgggctgaggctctctcttcccccggggtccaggggtcaactgctacatgccggccaatggcgagacggtgacgctgcccacaagccccagcatccccgtaggcatctcgctggggctgctgaagcgggagatggcgcaggggctgctccctgaggccaagaagcctcggctcctgcacggcaccctgatcatgaaggacagcgtgagtgccaggacggtctctggaggggggagggccgctgctgcgctcactgacctgtccctgccccacagaacttccggctggtgtcctcagagcaagccctcaaagagctgggtctggctgagcaccagctgcgcttcacctgccgcgtgcacctgcatgacacacgcaaggagcaggagacggcattgcgcgtctacagccacctcaagagcgtcctgaaggaccactgtgtgcagcacctcccggacggctctgtgactgtggagtccgtcctcctccaggccgccgccccttctgaggacccaggcaccaaggtgctgctggtctcctggacctaccaggacgaggagctggggagcttcctcacatctctgctgaagaagggcctcccccaggcccccagctgaggccggcaactcacccagccgccacctctgccctctcccagctggacagaccctgggcctgcacttcaggactgtgggtgccctgggtgaacagaccctgcaggtcccatccctggggacagaggccttgtgtcacctgcctgcccaggcagctgtttgcagctgaagaaacaaactggtctccaggctgtcttgcctttattcctggttagggcaggtggtcctagacagcagtttccagtaaaagctgaac

SEQ ID NO: 818 - DNA, 2460 bp, Homo sapiens
agacactttaccagatgcacaacgctgagcattacagcagtgtgtatgcttcatcttcctgcagtatggactcattggcaagtagtcttgatgaaggagatacaacttcccttttgaaactccagcgatacaactcctatgatattagcagagacaccctgtatgtttcaaaaagtatatgcttgatcacaccgttaccattcatgcaggcctgcaagaaattccttatccagctttacaaggctgttacctcacagcagccaccacccttgccacttgaaagctatatccacaatattctttatgaagtaccccttccacctccagggaggtcactgaaattttatggtgtttatgaacctgtcatctgccagaggcctgggcccagtgaactccccctctctgattacccccttcgggaggcatttgagctcctgggattagagaacctggtgcaggtgtttacctgtgttcttttagagatgcaaatccttctctactcacaagattatcaacgcctgatgactgtggcagaaggcatcaccacacttttgttcccatttcaatggcaacatgtttatgtgcccattctacctgcttctctgctacattttcttgatgctcctgtcccttatctgatgggccttcagtcaaaagaaggaactgaccgttctaaactagaacttcctcaaggggctaatttgtgttttgtggacattgacaaccattttattgagttgcctgaagaatttccacagttccccaataaagtggattttatccaagaactctctgaggttcttgttcaatttgggatccctcctgagggcagcctgcattgcagtgagagtaccagcaaactgaagaatatggttctgaaagacttggtcaatgacaaaaagaacggcaatgtctgtactaataacatcagcatgtatgagttactgtaagtcctcatcttctggtaggtcctgtaactctaattaggcatttgtacatttttagcagcaaaattgcctcagcagagctcccagttttattcccagttgtggctgaaaagcaaagccatggcatcagtatccttgtgcaatcggaggttgctgggctttcaccacctgtgttgttaaccttatttcctggaggaagaaacagatgaaacaagtgcctaactccctttatcaaacacagccaaggacagcctcttttaacatgtgacttcatacttgaggaaaaggagagttgacagctgtatttaaaaacccatggagccgggtgcggtggctcacgcctatgatcccagcactttgggaggccgaggcaggcggatcacaaggtcaggagattgagaccctcctggctaacaccgtgaaaccccgtctctactaaaaatacaaaaaattagccgggcgtggtggcgggtgcctgtacaggaggctgaggcaggagaatggcgtgaacccgcgaggcggagcttgcagtaagctgagatcgcgccactgccctccagcctgggcaacagagcaagactccatctcaaaaaataaatagataaaaataaaaacccatggaaatggtttaagaaaatggttctgggtacaccagaaatttgtttgcctgaagctaaagtgtgtctacaatggtacagctcttccagggacatgggaagtttatcgtgggagatatccagaacctgttttacactgggctcctactgtgtttggtgatcagaaactatagaggggtccaacccaggatttcatgtttgtatcttcataaggccatgctcctgacaggtctaggcaacctgggggatgacttaggttagtgtgctaggattgacacacctcatccagccttcttactttgtggatgggaacacttaaggaatagagagactaaatcttacacttaccccacagctggttactgacaacacaagctctagaattcatgtttgtttgtttgttttatttcaccaggctgcatgagactgaccttccggcattcttacaaatagtctttctattatactattggatctttattcatccacctatacaagtaggaaataaggatgaatattcatttagaagaattaatattcatattaacacattactctcagattattgggaattaacatcttgtaaaaactgggagcaggccaggtacggtggctaacgcctgtaatcctgacactttgggagtctgaggcgggtggttcatctgaggtcagtcaggagttcaagaccagactggccaacatggtgaaaccccgtctctactaaaaaaaaaaaatagacaaaaattagcgggggggtggtggcagggcctgtaattccagctactcaggaggctgaagcaggagaatcgtttaaacacaggaggtggaggttgcagtgagccgagattgtgccactgcactccaacctgggtgacaagagcgagactccgtctact

SEQ ID NO: 819 - DNA, 3122 bp, Homo sapiens
ctttgaaccatgggagaagatgttctggggtcaacttcaagacagggctggcagtactgggacacttggctgagaaacagggggcctgcccaggtaaagagcttccccccatggacgtaaatggagggtcacagctgagcttcaggaagggaaggaaaggaaaagaaggagcaaggagtatgggggcacactttctcctcatactgggattccagctcacatcccagtccttcccagtgagcagtcatgagaacctcaccctgagaaaggaggcagcgatggggcttttctctaggtgccctagctctccctctccactgaagttggagactagacactggtggtggaggggcagaaacttaggccccaggtcctatgagcagatccctctacaggtacctggggctcagatggtataagacaggaaggagggagcctgggtagggtcaggtggtggctccccacaattagaaaacatggcttttctgcatgcatttctttggatgggtgaggtggtctcctgccctgtattcttgcttgaccaataatcacaggctttgattcttgtgaaagaacaagaaagtcaggagacatctggaacaaaggcagcagcaggaagagcaacacagatgcaatatagtgtcaggtatagcccggcttactgtccccaactaggcagcaagatcaatcagcctccctcacagaaaccagcagaatggggcattgtgattttgatgatttttttattgtattgagaacacttcacttgagatctcctcccttaacaagtttttaagtgtacaataagctattgttaactacaacaatgtacaacaacattgtacagcagatttctagaatgtattcaccttgcatgactgaaactgtgtacctattgaataacaactctccatctccccctcctcccagtccctggcaaccaccattccactctctgcttctgggagtttgactattttagatactccatataagtgaaatccagcaatcctactcctgggtattcatccaaaagaattaaaatcaggttctcagacatgcacttccatgttgattgcattatccacaacagccaagatgtggaggcaaccttggtgttcattaacgaaggagcggttaaagaaaagtggaatatacatgtaacggagtagaattcagccttagcaaagaaggaaatcctgccatatgcaacaacatgggaagtggtgagggctttcactagaggtaggggtggagaaggaagcttcttagggtagtttaaggaggtaggaagcaacatcacagtttggccacatctccttcctgtaggaaatacaaaatccaaagagacacaaagagaagagagaaagaaaatatagcaaacattctaatgccatctttgctactggacttgtacacgttttactgccatttctcatttcaccctcagaataacctctgaagaggtctttgtagttcccattttacagacaaggtctctgggctggtagaaggcctgggtaggatggttattcatgagctgagaaggagaatctcagaccaccacagtgggtgctctcaggaccattccaaggctttctggctaagagtccaggggaacatcacctggggctagggaagagcttttggaaccaagagctccaaaggctgggattgcccaagaggacaagggggaggggcatgttgggcaccttgcagtgtggtgattccagaggcatgcaccctggcttgccaaatgtctcagagggcttgggctccacaggccctctgctatggagagcttttctcagccctttccacctactacatgattctaggaatcttcttctgtggaaggaggagctttgggaatctgctgggctgcagaggtagtccccatccagctctatgccactagtgacagctccagagttttgctctcaccaacacccacatgcttctgctctgtaaagatatcatatttacatattgaccttcttgcccctcctactgtatgaaccacactcacaaatgcacacacgaaggctttgagcagcattgaaattgatcaagcctgagtatcatagaacaagtgtcctatctgctagagtttggctgtaccttgacctcagatatctgccattcagaatggaatgcccagctctgggcaggcactggatcagaacaaccataagcttaggcatctgcttctccctctttctccacctccatgtcaagggcaccccctcactacaaactgggcctggggtggtggtataaggcatggggcagggaactgggaagctccctccaccccatctgatttcagacctgcctcctcagtgccccatgtgtgacccagctatatttagcaagctcaattcagtaactagagcaactggtctagcgccctccccttccaaggactctgaaggggccagtttctcacaccttttaatcatcttccatttctccaggcaaccaacacaaaaggcctggaccaggtggtggagatgctggggctcctacacagaggctctattttctgtttgcagtcttccaggccagataagaaaactgagacacagaaaagtcacacaagattatcgaggtcaacacagagaacagtggaacctgcacctgaccccaggcaggcggaaccttcatgaccacagcacaccaccacagggaacaggcagggaaaacaatgggtctagcaggacaaaagtgacatttcccagagtttcttgctgtttggatctggctgcagtttcagttttgccaagaagaggcatttccatgagctctggacagtggcagagaggcagaggtgctccactgcagtgtgctggatggtccgcgggctcctgccaatgtgaggatttgcagcaactggtatatccatggtcttgtcaccagcttcctgaattcggggcagctggagccacactagtggtccttccttgcaggggcagcagctgtctcctggtctcagaatcacagctgtggggatgcaaccttaagccaaaagcctagcggtgggtggtcctaaacttcttttgtctaggccctctgatccctctgtaagtcgctatttcccttattaaatctctttctgctgg

SEQ ID NO: 820 - DNA, 2290 bp, Homo sapiens
ctgaaaaggttgttcacctgtgtggataccaggatatcaggtgggacattcaaatgttatgaggacatgggaaagttttttctttttcttcttgttgttttgtagagacgggctctcactatgttgcccaggctggtctcaaactcctgagctcaagcaatcctaccaccttggcctcccaaagtgctggaattacagacacaagccaccgcacgcagccatgggatggtttttttaaaaattaattttagtgtgggatagtttttgattgcacaggattgtcctgagtatgtagcgtccctggccccctcccacaaccttcacttgctaggttctagtcattgtgacaactaaaattgcctctgatttgtaaagcacctcagcaggggcggtgctgccccatggagaatcactggtctggtgcagttcaccggccctgtaccttagtgtcagcagtgttctttgcctagtgcttactgtgtgtctagtcctgggctgtttaccgatgatgtagctcatttttatcctcacaatagctaagtgctgttgctgttatgtagttgcagttgaggaaactgaggcttaaagaagagaagttacttggccacagtcatacaggagaatcggtggagtccaggttgggtttcaagtctctatcactccacaccccctgtcctggctgttaggttctgccagtccctggggctcagagagaagcgactgagggaacaggagcccttgctaagtcatgtgagggagaatgtggtggcagagtcccagccagcaaggagaagtagccctgagacatgctgcttttgttttgtaacctcttctgtgaagcactggtggactgaagtcagaatgggagccctcaggaatctccttcctgggccctgggccttgtgcacccagggtggatgggtaaggggctctactgggcttgttggggagctgtgcccctgcccagctgggtgcaccatgggtggagggcttgtggatgggtagccctagctggcatcctgagggcctgccgcctgccatctgccctgcagccctcacctgcgcctctgttctttaaaggggtgctcctcctaggggagccggtccgctgggagaccagcctgcagctgatcatggatgtcctcctcagcaatgggagccctggggctggcctggcaacacccccctacccccacctccccgtcctagccagcaacatggatctcctgtggatggctgaagccaagatgcccaggtttggacatggcacctttctgctgtgcctggaaaccatttaccagaaagtgacgggcaaggagctgagatacgagggcctgatgggcaaacccagcatcctcacttaccagtatgccgaggacctgatcaggcgacaggcggagaggcggggctgggccgcccccatccggaagctctatgctgtgggtgataaccctatgtctgacgtatacggcgccaacctgttccaccagtacctgcagaaggcaacgcatgatggggcgccagaactaggggccgggggcacacggcagcaacagccctcagcaagccagagctgcatctccatcctggtgtgtacaggcgtctacaatcccaggaacccacagtccacggagcctgtccttggaggaggggagcctccattccacgggcaccgagacttatgcttcagtccagggctcatggaggcctcccacgtggtgaatgacgtgaatgaggctgtgcagctggtcttccgcaaggagggctgggctttggagtgagggcagtgcggtggaggtgagggggtgagcctggacctgtgggcgagtcccattggctgggctctggcctgatcactgggctcaggtcagggcttggttcccttgccacccttcttgctgccccatgagtgtggcattactggtcacttggaagaagacagtgactctttttccctgctgggtagcattttgtatggaacggttggaattttctgggcccagttcccacgtgcctttcgtggcagtctaacctcaggccattctcttcccctgtgtgcctcagtgtccttctcatttcagtagggacttctgaaatgggggaggcagtgtggaatactgtggatgtctgtgcagagcctttgccggcactgaaggcatgcagcctgtcggcagagtgtcttaacaccagatgctactttttactgtattgtagtttattgcccggagatgtggggctttttttttaaataaaataatcataataaatgttcatgatgctgactcttgtg

SEQ ID NO: 821 - DNA, 2275 bp, Homo sapiens
atcacaggcacgcttcactgagtcagataccatccctgaagggatttttctttataattagaacgtagttgatggaattctattttccttttgacttttacttaattattggcttctgatctagcaccagtgaatatttattaataagaagaaaggaaatttacctgaaaattgtcagttactctgagctcttattaattatgcattctcagggtaaatttcttgttttcttcagtggcttcaaactggcagccttggtatcttgcttacatatgtgtgtgtgtctgtttttgttttcgttctgttcttttagcttcttagtatggaggttttcaaataccaataaatgtagagagaacattgccatgaattctatgtactcatcacccgacttcagcaatcatcagctctatgctaatcttgtttcatctatcacctcccttcccttgttttgtgggagtattttaaagcaaaatccaaacatcataacatttcatctgggagttcctcaacattttcctctaacagatgaggattttaaaatgtaacaatattattatcacatccaacaaaattagcaattctttgtcatctaaccttcagtctgattgtctcaaacaggcattttgtttgtttgtttgtttttatagtttgttttagtttggatctagacattggtctacgcattacatttaaaatggttatgtttctttcggtattttaaaaacctgtaagtttcctcttcattttttacaaatttatatttgggaatattttcagatttatagaaaagttgtaaaataatacagtccctcattcagtctcccttaatgataacatcttacatcaccatgtcatattacgaaattaacattggtgcatgactaactaaactacagactttattcagatttcactgttttttctactaatgttctgggtttttttttgacggaggctggctctgtagcccaggctggagtgcagtggtgtgatctcggctcactgcaacctccgcctcccaggatcaggcggttcccctgcctcagcctacctagtagctgggactacaggtgcacgccgccacgaccagctaatttttgtatttttttggtagagacggggtttctccatgttggccgggctgatcttgagctccagacctcaagtgatgcacccacctgggcctctcaaagtactgggattacaggtgtgaaccaccacgcccggccctttgctaatgtccttttactatcccgcgatccaacattatatttattcatcctgtttccatagttgccaacaatccatgacaatttcccagtcgtttccttcattttaccatcttgacggttttgaaaagcactggtcagatatttttgtagaatcctctacaaattgggtttatcttgtttttttcatgattagactgaggttatgggtttggggaaagaatgccacagaggtgaagtatgttcacgtcatcatattaggggttacgtatcaacatgagttgtcactggcagtattaacctggatcacatggttaaggtagtctctgccaggttgctgcattttaaagttactatgtttccttgtattcttctgaagcagatcatgaagtccagcccacattcaaaatgatgagaattaagctctacctcctgggtgagggagtatctacatttggaatttttatataaggaagatttatctccactcatttcttcagttattcaattctttgtgtcactatagacctaagtatattgattttatattttagattatagtctgatgacttaaattgcctaaattgtttcagctttagccactggtgctctttcaggtttacctttttttatttcagattggcctcttttttgttctcagcactttctgacagtataaaatgctctgtgctcatcttgtattaatattttcccttccctagccctagaatcaggaatttcttcaatagaaaaatggtattaaccagccggcacggtggctcacacctgtgatcccagtactttgggaggccgaggtgggcaaatcatgaggtcaggagttcgagaccagcctgaccaacatggtgaaaccccgtctctcccaaaaatacaaagattggctgggtgtggtggcgtgtgcctgtcgtcccggctactcaggaggctgaggcgggagaatcgcttgaactgggaggcgggggttgcagtgagccgagattgccccactgcattccagcctggacaacagaacgagactccatctc

SEQ ID NO: 822 - DNA, 3237 bp, Homo sapiens
ctgtgctgtgcgctcctctcccggggaccaccgtcctcagatctccccagggaatgggtcgtcctcttcctgcccccacccgcgagacgcggcagaaaagcccgcggctatcttcccgccagcaacagcctcccgccgagccggccgggacagaggcggcccccacccccactgggcaggggactgcagacggcgctccccgactctcaagacgaccagggagcttcccttttcctcagcggggtgaggggcatctgtcgcccgccgacttggaggtggaggggcagggacattccctcgccatcacctcaggagctagaacgcgcccttctcgcagcagggcgtgggcctcccaatccctccaaggggcggacggcgtgcgcaaccccctggagaagcaacaggcgcccccatccccctccaagccgggtaacgccgaccccctcgtccctcccgctcttcacctccggaagccgggccaaagcctgggcgaacgactgcgcctcactccgccccctgcgccattttatcgccccctccccgacctcccctaccccgagtcagccgggccaacaccagggggagggcaaaccagcagtgattggcaggaaaccgtcccgcctctaggagggttgtgccccgctcaggcgcctcagccccgccctccgcaccgcccaccgtgcccactggctccaccttttcccgtctcatcgacctgctcgactctctgctgctcctcactttttccggccgctgccggaggggtccaggccgagtaagcggagcgccgagcccagctgatgcaacctggctggactcgcgtgacagttcccggcacgcggcggcgacggtgacccaggaaggggctctggtgccgggctgagcgggggaagcaggggtagcggagccatgggggacgctcccagccctgaagagaaactgcaccttatcacccggaacctgcaggaggttctgggggaagagaagctgaaggagatactgaaggagcgggaacttaaaatttactggggaacggcaaccacgggcaaaccacatgtggcttactttgtgcccatgtcaaagattgcagacttcttaaaggcagggtgtgaggtaacaattctgtttgcggacctccacgcatacctggataacatgaaagccccatgggaacttctagaactccgagtcagttactatgagaatgtgatcaaagcaatgctggagagcattggtgtgcccttggagaagctcaagttcatcaaaggcactgattaccagctcagcaaagagtacacactagatgtgtacagactctcctccgtggtcacacagcacgattccaagaaggctggagctgaggtggtaaagcaggtggagcaccctttgctgagtggcctcttataccccggactgcaggctttggatgaagagtatttaaaagtagatgcccaatttggaggcattgatcagagaaagattttcacctttgcagagaagtacctccctgcacttggctattcaaaacgggtccatctgatgaatcctatggttccaggattaacaggcagcaaaatgagctcttcagaagaggagtccaagattgatctccttgatcggaaggaggatgtgaagaaaaaactgaagaaggccttctgtgagccaggaaatgtggagaacaatggggttctgtccttcatcaagcatgtcctttttccccttaagtccgagtttgtgatcctacgagatgagaaatggggtggaaacaaaacctacacagcttacgtggacctggaaaaggactttgctgctgaggttgtacatcctggagacctgaagaattctgttgaagtcgcactgaacaagttgctggatccaatccgggaaaagtttaatacccctgccctgaaaaaactggccagcgctgcctacccagatccctcaaagcagaagccaatggccaaaggccctgccaagaattcagaaccagaggaggtcatcccatcccggctggatatccgtgtggggaaaatcattactgtggagaagcacccagatgcagacagcctgtatgtagagaagattgacgtgggggaagctgaaccacggactgtggtgagcggcctggtacagttcgtgcccaaggaggaactgcaggacaggctggtagtggtgctgtgcaacctgaaaccccagaagatgagaggagtcgagtcccaaggcatgcttctgtgtgcttctatagaagggataaaccgccaggttgaacctctggaccctccggcaggctctgctcctggtgagcacgtgtttgtgaagggctatgaaaagggccaaccagatgaggagctcaagcccaagaagaaagtcttcgagaagttgcaggctgacttcaaaatttctgaggagtgcatcgcacagtggaagcaaaccaacttcatgaccaagctgggctccatttcctgtaaatcgctgaaaggggggaacattagctagccagcccagcatcttccccccttcttccaccactgagtcatctgctgtctcttcagtctgctccatccatcacccatttacccatctctcaggacacggaagcagcgggtttggactctttattcggtgcagaactcggcaaggggcagcttaccctccccagaacccaggatcatcctgtctggctgcagtgagagaccaacccctaacaagggctgggccacagcagggagtccagccctaccttcttcccttggcagctggagaaatctggtttcaatataactcatttaaaaatttatgccacagtccttataattggaaaaatactggtgcccaggttttcttggagttatccaagcagctgcgcccctagctgggatctggtacctggactaggctaattacagcttctccccaacaggaaactgtgggatttgaaaaggaaagggaagggaaaacagagagcctagtggtctaccaagtggttggcaactttcccaatgtctgcttactctgaggcttggcactgggggccagggcctgccccagggctcctggaatttcccttgatccagctaggctgggacactccctaaatcagctgcgtgttgttagcatcaggcagaatgaatggcagagagtgattctgtcttcatagagggtggggtacttctccataaggcatctcagtcaaatccccatcactgtcataaattcaaataaaatgtctgaacaagg

SEQ ID NO: 823 - DNA, 2269 bp, Homo sapiens
ttaacacctatagttctctcaggctttttttgaaaagttccttcgtttctatttctattccactctatttagctattattgtgcggcacccccaatggttcctttcctctcagcatcgctgtagcttgcctgtacccaggacatgcccttgactggcacaaaccgtgacagacatgcccttgactggcacaaaccatgacagacaaggccacctcctcagaagcggaacaacctattatcttttggcaatgggagctaacttcactgttttcttacaatacctggtttttcctatctttggtttccttttgattatctctcatccatctcagccactattctcctcccctcccttgtgtctacaacaccccattttaccaagtctcccatttaacctccccatccttttctttcccttaaagtctcatatgatactgcagtcctcatttgtcttcccaaaaaaaaaaaagaatttttttttttttaaggaacccttccttgactcctaaagactcctaaggatgctgaggcctcctcagcatgatttccatatacttactttctctgttggactgcagacaacttgaaagcaggaactttggcagtgtttccccagcaccagcatcatgcctggtccatagtagctaccaataaaaaagtaagcatcatgaacccaaaagtatctgagaaaggtctcaattaatttaaaaagtttttattttgctaaggttaaggacacacatgacccaccctcagaaggtccggaggacatgtgcccaaagtggttaaggcacagcttggttttatacattttagggagatataagacatcaatcaacatatgtaagatgtacattggttgggtctggaaaggcaggataactcaaagtgggggcttccaggtcataggtaaataagagacaaaagattgcattcttttggggttttgatcagccttttactaaatacacaatttacatgtgagaaggaggtagctcaggtgaacagagggatgactttgagttctgtgtatcctttgtcccacacttgtgaagatcagcaccattgtgatgcatggaggggtgtttctcattttaaagacgtatttgagcatgtctttggcagctcactctgccagataaggtgtcctctttccatgaatgacagaagatgggtaactctgttctgccattgccccaagcggttttcacaatctgcccttctcccctctgccccccaccactagtaaaaaccccaaaccaagttgctaggttcaccagatctaggtgatactcaccaacatacagctaggctttcattcctcaggaaaattgcaattttgtggtcttataatgatatatattggtttccatccatggttgcgggctcctgatgtcagaggtgtttgaaccaaagcaactccatcttgaatagaggctgggtaacataaggctgagacctactgggctgcattctcaggaggttaggcattcttagtcacaggatgagataggttggcacaagatgtcacaaagaccctgctgataaaagaggttgtggtaaagaagccaaacaaaacccaccaaaaccaagatggtgacgaaagtgacctctggtcatcctcacgcttattatatgctaattataatgcatataattagcatataatatgcatatgttaacatgctaacagacactccctccatgacagtttacaaatgccaaggcaacgtcagaaagttaccctatagggtttaaaagggggagaaactcacagctctgggaattgcctactcctttcctgtaaaactcatgaataattcacctcttgtttagcatataatcaagaaataactcaggccaggcatggtgactcacgcctgtaatccgagcactttgggaggctgaggtgggtggatcacctgaggtgtcaggaattccagaccagactggccaacatggtgaaaccccatctgtactaaaaatacaaaattagtcaggcatagtggcatgcgcctataatcccagctactcaggtggctgagacgagaatcgctttgaacccgggaggtggaggttgcagtgagccgagattgcaccattgcactccagcctgggcaacacagcgagactgtcacaaacaaacaaacaaacaaacaacaacaacaacaaaactgtaagtatactcaattgagcagcccacgctgttgctctatggagtagccattctttcattcctttactttcttaataaacttactttcgcttt

SEQ ID NO: 824 - DNA, 2126 bp, Homo sapiens
aagagcacactgttgcagctgccctccttggatggaactatggaatgatttttattcttctacttcccaggtgaatgggaaaccaaggacacagtcagcatttaacaaaaaggaatctgcatctcagtcagaactgtattgcatttgcttctctctggattaccttgaagttactccccttccctcaataataatggcattatgaaaaaaattggaattgatcaaatgaagtaaagagtaaacagaggaaagactacccaaagtctgttttgcttcagttcggggctgatgatctggggaggaggaggttgggacatatttgtgctgcaaggaacaatattgtttcatgcaggggaggtgcatgactaacaaaagggttaactggatcctataagctatagacagcttctaggcagtgccaacctgtgctgcatacctgaacattgttgcttcccccacggaaggtaataagctgtggagctgcacaggcattttgtattactcgtttcactcattggccttggtgcctgccagaaattgaggtcgggggaaaggcagaagttcacactcctggacccagtttggccagtccaggcagcctgctcttcacatcactccagagttggacctgcccagagtggaactagaatagggtgtgggtagcacctgcttcccctcccatagattagtgccctagacgggtagctctggcagaggggctgccaataacccagaatccagcacaacgaaaggcacttctggcccagctctgactaaccccactgttcttcctttccccagcttctttcaagctggaatcaatctgttgttcttcggacctgaggtcaacatgactttgatgaacggaattcatgtcttcttgctaaagttatctggacacttggtacaacacagagtgtctgatatctgggcctggggagacctcagaggccctggggagcccagagacttgtggagtgtcagggcagctctcctgctgtgaatgcaagctccctgggaaagttctccctagaaaaagatgtgggggaggagctcaggtgaaggacagagcctcctgcccgtggagagaaagtgggccctggagaagctgcatgagtcctctccagcagaagggccagaggtgcacattagtggggctcgggtgggtctcatggtgacattggctggagatgccaaatccacaggcgttaggcctgggcaggttctagtgtgcgagtgggctagtttttctagactagcacacaggaagagggtggcctggcttgccttccctctgaagctcaggactgaggcccaggacatgtctcacaccattgatatgagttggggacagatgggtggcagatgtgcccaatcaggctgcattgacacctgactggctggaagaagagcctgtaaagcaaagagcccagtcttcctgtaagaaggaagaagatggagggctcatcatgcacgtgggccagaaaaagtgccagtgaggttgttctgactccataggtgttctggacataatctaggctgtcacaaaacagccaagcctgctgccagtttccaatctgggatctcagggaggcccaggggcttgctgagttccaccttccctctttcccttggtttggagacaactttctccctgtggtgaatgtgacacttagaacaaggtgcagccctactaaaagctggagcttaggtcactgggactgtgtgctaggggaaagagggggagggaagagcagggctgtggcattagacagactttggctgaaatcttggacctgcctcctactagctgtgagatcttagcaaattacttcctgctataggctaaatgtctgtgtccccctaaaatgcacatgttaaatcctgatgcccaaggtgatggtatttggaagcggggcctttgggaggtgatgagggtggaatcctcatgaatgggattagtacccttatgtaacaaggccccagagagctccctcacaccttccaccatgtaagattacaggggaaagacaggcccttcagcagacactgaatccactggcaccttgatcttggacttcctagcctccagactgtgagtaataaatgtctattgtttataagcc

SEQ ID NO: 825 - DNA, 2004 bp, Homo sapiens
ttatcagtgctgaagccatcctgagaggatggactgggggaaggcagtcagctgctttggagggagaagcgtgcatggtttctcaggttgctcctctgccctctcctcccacaatgtggggactgcaacaccctgtgtggcacagaaggctgggcccacccccaccaggggatagatccaggattacgtccccagagccagtcaggcccttcagcatgggctgccctcctagagcattcctttgatcctttctggggctggaagaagtaggggttgggcactggctattcaatagggacctctgaggacctctagggtccttagagtccatgattgatatgttccccacagcccagtttgaaggaccggagaagagctgcctgtcacctggccgggaggagaaggggcggctacctccccgactctctgcagggaaccccaagtcagccaaacccctaagcatggagcccagcaaccccctgggggagtggacagatccagcactgcctctggaaaaccaggtgtgagtgtctgtgtccagctggggactccctccccactcctcccctcctggcactggcttccctacaggggtcacccacaatgggtgggcctggacagcgagggacccagcagagatgccccccttcctctctctcatccttagctggtatcacggggccatcagccgaaccgacgccgagaacctgctccggctgtgcaaagaggccagctacctggtgcgcaacagtgagaccagcaagaatgacttctccctctccctcaagtgagtggggacagttgtggtttcagggacagcaagcagggtggaaggggactccagtattccccttatgcccaaccaagctggggaggtccccatcccccatgaacaatccccaggcactgggggtcctgagatgtctgagactcagcccctgctctcaaggagctcagagtccattgggagaaatagttgatccgcagcatccagctcagaagggttctgttctagttgtgtggcctggcccccttaacctctctaggcctcagtttccttactaatgaaatggatgggggataatatagggaaggattaggtgaaataatgcatgggaagtgcttagcatagtgctaagggctcaataaattatcactgtcattattaatggaagcccaagatgttctagaagcataggcaaggagataggagctttgcgtgagggagtctgtagggtgttggcgggggctggttcctggaaggagggcagggcagtggacacaaagtatttctgtttactctgaggaagagtgtgtgtgtctgtgtgtgtgttcggggatggggggtgtctgagcttttgggtcctggaagacgtagaggaggcaaggccctccctccccatcaggctttcctcccaggagcagcagatcagcctcccagactccctggtagcatggccagccctgccctgggcaaccaggagttctgcctggtagaccctgcaccccgttaggaagccagtggggtggtatgttcatttgccccccaccatcactagtaggacacctgcaccactttctaccacattctctgggaccatcagagtacagatataccctcccattcagacaaatccaatctatgggaacttggggctgctaaacaagacatatttgggggataattattcaacttccctcaaagataatagaaaaagtggtgggtgtgttggctcacatctgtaatcccagcactttcaaaggccgtggcaggtggatcacctgaagtcaggagttcgagaccaacctgaccaacatggtgaaacctcgtctctactaaaaatacaaaaattagttgggtgtgatggtgagcactggtaatgccagctactcgggaggctgaggcaggaaaatcgcttgaacccaggaggcggaggttgcagtgagccgatattgcgccattgcactccagcccaggccaacaacagcaagactctgtctcag

SEQ ID NO: 826 - DNA, 2577 bp, Homo sapiens
aagcatgaagttctcttcctgcttaaaccgaggagcaaaacctgatgagataaatggcaggaaaaagatgcccgccattctcttccaggagagacacgggctgaaaggagaaaggacaacagtgacaaggggaaggttccggccccaccgggctgcaagggccgggaagctgtgccgggggcgctttagaggccagagccagggagggggcccgcgacacaggcgggtcttccaggcgggcccagggccaggacagcgcggcatcacccggccagtcctctgcagccaggatgaaggccggggacagacgttcagtcctagaccctccagacagggctgggcagtgccggtgggtgcctgggagaggcggaggcgggcgcacttccagcaccaggttcgggaaggacacgatgcccagccgctggagcccctggcctgcgtgccccaccctgattttctggcatctggtgaacggcccctccgcagggtgggggtagccaggggatctgccgaggaaagctggggacagcgggcttggtggcgcggcccggcgcggcgcgtgcctggggcgcgtggccggccacagaacccggggagggtggaggctcccgggcacgcgccggggtggtgggcagcccgggacggcagcggcgatccgtcacctgaggaggggcggggacttcatcgcggccaggccgaggcgccgagggtcccttgcggcttccgcccctctccgctggccccgacgccgcgctcgggccgggactcgagccccggttccgcggggcaggctcaggtctgcgcgctgcgcctgcagccgaggcagaaatccgtcccgaggcgcgggcgccgggtccgggtcccaaggatgcgcgtcgggctccctcccgcggggacagccgagctccgccggggctccaggtgttcccgcagtgcgtccgggcgcggacgcctctctgccctcggaggggaagcgggagggcccttggggtaacgccccgacctcgggcttcctaacctgggtcgacagccggctggcacagggaggcctgcgcgggagaggggcggagagagcgcagcgcggggtacagcgggcggtctccgtgccgcgcgcgcgactggaaacggcgtgcagatcctaaaacgagggttccacagagggccacgaggggcaggagagagtccccggagaactctagctccccgacacggctacctctcggcaaacgagcgagaattggggcgcagagccttgggagggccgttccctcggcgggagcggcccgagcacagcctcacagcagatgcgagcgcggcgggcgctttggtgacgaagtagcgggacctgcaggaggcagaggcctggtggggccgtggacgccacgccgagctgcccagacccttccagaagacagtggggactattcaacggtttccagcagaaactaagccaggtgttcgttttacggagattgctcggctgcagggtggaggctggatgagaacaggcgtcctctcaggtaggcgctcgtggtggtaacgctgcccaggaggagggcacgggttccgggaagacttgcgaggttaaaccggcagctccggagaactgagcgcaagaggtcggtgacacagagaggagtccgggaggccgcatgtttcaggctgaagtcacttggcggggacgtttattgagatgcgaaacacaggaagggatagaggctgcgcagagggaaaaggcgatggactcggttttggaaacgctgatgtgaagtccctacgatgaaaaaagaaatcttccgatttctccctttgaagtctttgcttcttccgttgcaaagaacacagcctatgacatcaggttgaaaccaagaatgtagttctctgaaaatactgtgtgtgggggagggagtttatcttgtctcattccttacaaggatactttgctctccgacaccttagctccctgaaagtttcctagatcgtccatcttttcctcattttttcgactgcaagcaatgaactgttaataattttttacagtttggttttacagccacacactttattcttctttgtcaagtttaaagtattctagggcttgtgccttcccacataaaatttagaataaacttgtctgtttctacaaaaagccatgttggtatttcgagaggaattgcaatcaacctatggatcaaattgagaattgtatccttattatgttgaatcttccaacccacgaacatggtatgtctgtctatttaaatagtttttttttttcactactttcatcagaattgtgtgattttttcaacatcagatcctatcacgttttgttaggtttatacttaaatatttcctttgctctcaagagatttaaactgttattatttttatttcagtttttacatgtttgttgttagcatacagaaatgtgattgtgtttctcatgttgatctcatatcctgtgaccttggcaaactcacctattaattttaagaggttatttgtgtattacttggcattttccatgtagataatcatgtcatctgcaaatatggagagttttatttctacctt

SEQ ID NO: 827 - DNA, 3389 bp, Homo sapiens
cttgtgcagaggactctccaggtgaaggctcaagggtggatccagctcgagacaccctcgctccccctcacagtcggaccttaggatttaggctttaacatctccacatcatgagattcgaaacctttaggtcttgtcttccgttctgtcctccaaatcggcctcttccgagcctgttgaccagggccagccgggcagagggctgggctcgctcaacgaggctcctctcgcacctcctggagcttcaggcttctttccgttgcagagaagctttatgggccaattcgttcggcatccccgggggcaggtgcgcggtgcgcggggaagaagaggatttgactgcggttctccacccccggcgcccaacctccaccccggtgcgcgcgctcttccaggctcctgctggtcccacttgccaggagttaggtctcaggtcagcctgagctcctgagacgcccaggcccggaaagacacgtaggggaaaccatctgctcacttctgtcctgtccggaagggatccctttctgacgggaaagaaaggcggtgagtcctgtcctgttgagtaggcggaagagagatcaaagggaagacaagaaaaatcctgtgagttttcaggatctaaagttaccatgaggtcgacctaacctcctctggaggtcctcccggtcctcccgtggctgtcgaaggtgaatctagcttccgtctccagttcgccaaggcggacaaagccgacgacaatgggcctgtccactatcttctttcatatgcacaaaatgtcagctcttcttgtttctaacttgcaacatcccacctgatgaccagctcagcaaattagagaccctccatgggattccatctctgtcttagttcgggcttccataactatataccataaactgggtggctaattcacgacagaaatttatttctcacagttctggaggttggaagtccgagatcaaggtgccaacatggtagggttatgatgagggacttttttctggttgtagactgccaccttctcattgtatcctcagggggcagagagagctccctggggtcccttttatagtggcattagtcccactcagactaacgggactaaatccagacccagttattgcaatgtgtgcaaaagaacaaggacttgtactatctgacttcaaggcttactataagctattacagacaaggcatcaggagggacaaatagataaacagactgagttaagagacctgaaactgatccacagccatacagtcaataaatgagctttcaatgaaagcagttcaatagaagaaaataaatcatttcaattaatggactttcatatggaggtgggggagaccaacaatgttattctccctcacactacatacaaaagtaatttgaggtgcattatacaccaaaacttaaaagttaaagatataaagcatttcaaggatactctgtaggtaaagattagcctaccaacaagtaggacactgaaaaaatatatataaaagacatgataaattagacttcatcaacattagccataccttctcatcaaaagataccactaagaaagtgaaaaggcaagcaagccacagacagagagaaaatagtcacaaaacgtatctgacctccacatcctgtaattagaattattgtggtctggtacactgcacccagtttctgcaggagtactttctgggtgtctctaatgagtaagagagggccccatgggatattcctacagttcccagatgaacagtgggaaagactctacgttgacaaaccccggggacctgaaacctcaggtcctcaaggagggtagaggatacctggaccctgacccagacccctagatgggctgtgccaagagacccagcaagggaagggattccctcctgcctcaggttctctgttcttctgtggttagaagacctgaacccaactccctccccaagcagtggagatagggcttttccaagggctggggatcttgctgtcctaaggacagctgagcaaggaggtcgaggaggatcttgggtggtggaggagaggaaaccgggtaagatgtgtgaagcagtcggctataccaggcacagagaggacccactgggacacaagagcctgcatgtgaagccaggccttgggccaccttgttcctcaaaggggtgcttacttccatgggatcttcaaagggactgtggaaagagaagccttcagcccacacctctgaatgcttttccaccacagcatgccctgtggcctgtatcctgctggtgtggaacagtcagacccctgcagggctgcagagcctctgtactgggcggcatcccagcctgagtgccagagctcagtgggcaggcccccgagcaagtagagaggagggcaccttttggacagaacctgtgggacaagagcgacgtctcatccgttcaggttcctcacaaaatgagagtcaggaagatcagggtgcagacctgatttcccacgaagggctgaaagcagacaaccggagggagagcagcacctgggccaatgaggtagaagacagaagaccacagtgtacttctgccctcaacctcaccccctcccacctacatcctccacaccccctgaccaccttcttcagaaacgtaataggaatcaagatcccccctggcctggttgctatgggaggcacagtggcctgatggagcctgaggcaggtgtgggaagatgtggattgtctaactggaggttgggagtccagggtgcagaaggagaagcttggagtgcaggatttggtggtatgtgtgtggcagtaggcactatgttctaattgccagtttttttttcttcttcctttttttctctagctaaacaagcactggccttgagataagcaatgctgaagcacttgcagctcacctattaccataaactgactgagccctccctacacaagccgtaactactgctttgattggacaagagactgatttcagtagttttctcttgataagagaccactggccgtgggcgggttctggacagtttacagaagctatgcacttgattgcctttgtgtccctgcttcaccttttgaagcatagggcctaattataatgtatttaaatgttgtctccaccccaaagtgaacatgggttgcatgtaacaggcatgtttactcagcatgcatgcagcaggatcccttcacaaatattcagagctccccctattccctgttgaatatgtatatgtggccagccagatcaacgtaaatcactattcgccctcccctccctggaaacctacttttcgggtttcagcaggaagctatgcctcccagtctgtcagaatggccacttgcaggctgtaaccctttataaaaaaataaaatctcctttctaaattt

SEQ ID NO: 828 - DNA, 2804 bp, Homo sapiens
agactactgacttggaccagcaggggaatggctgtgacaataaataagattgggaaaacaagaagtcctttccaggacactgaaggctgcagaggtgtgactggatgctggtggagggatgcatggcggggaagctgagtcagatcctgaaatcctccaagcatgcgcctgaaatgaccaagggaaatgaaggcggaggctgctgtcgcctggtggcctgggaagggccaagagccagggagctggagggaggagagaacgtgcgacctcagcacggagcactgtaggggaggcggggctggagggagatggcgccgcgctcccggatgaacagagaaagcgacagggtgggtcgcagggcacagtgtgggatgagtcaccgacagcaaggcatggactccgggaagaaggggagacgagccgggaaagacttgcatcggggatgtgagctgagctgcacccagacaaaagcggctcggggctcctgaaagcagcaggcaccgccggtcctgccaaggggctacttcctgcgcggagtaggagagtaggagaccccaggccagtcccaatccccggcccgttcgggatgaggggggctgcgggagctgcgggggcctcctccagggaggacggttgcagggtccctcggccgccgcccactcccgggggcgttccttcctcccagctgcgcccggagcgcctgctgcctggcgagagcccgcccctctgcaaccagcccgctgcagcggagggcgcctgggtgccctcggccgagccagcagcccacggtcggcgccgcactgtcccctggtggcggagcgctcccgcgacccggctcgccacgcctgggaggggtccaggaggacgcggctgggacctgggggctctcagggtggggccttgggggatgaggctggggcccgcgggaaaccgggctggggcgaggaggctcgcaggacttcctgccacagaatgtttcgatgctttttttaattctgcaaatgtaagcctttccactttaagtccaagctcagcgcagaggactgttctataatacatacaatttagtttaaaaatgttgcaaatgttaacatgtgtcacaaactcaagcaatccagtattatagaaagcaaagaatgaaatgtgctgcttctttctcctccagacgcccttgcatacattaagatatgtatatatggaaatgttaccgggagtcccggttatcccaaaaagggttgtttcctgttgcgtggtgaggccaatgcacgaaaccgaaagggagtgtgtcaagcagtgcaggctgtattcaatggctatggaattggaagatctgaaatcaacttagcttgtgagagctgggaagtttcagaggtagggtgtctttaatgaaggggctgggcattaagagcacgggggggaatattcgtgctttccttgggaaagaacggagatttttcccggaatcaagaaacccctttttttctgtcccttcttggtctcttccagtcgttgtcatggcgacatgttgtttagcatgagaacaggatgatgataaagccagaggctcttcagaggcgccatcttggatttcgccagcttcagctggtttcgtcctaagaaggaacttcgaaacacaggcattctttttcctgaaaataagcagagttacagctgagtaggaatttagctctgtcccatatgctatcgcattgggcagcaaaagcagggtggggtccagcgaaatcagcaggcactgcaatgagtaacatacccagccacgtttatgcagcatttttacgaaaatgaaaccatactacctgtaaaggaagatatgctaacaaacaacaaaactggcaggaaccaagattcctactgacactacccttagttttaattttccctgacaacaaatgaggttaacagagcataattatctaccgtgaccccttcaaaaagacaggctgtatacatttgcactaagagaagaaatcgtgtaatgtcagcaaatttcccccacttaaagcttctctatttaaaaagcttcacgcacacatgcacgcacatgtcttcaagatgaccacaatttattttgcagtcattctttgcaccagttcccaatttttcccactagcttgcaagctccgtgactcgaggagaccgggggatcagagtttgtttttgcggagaagtgagtcctttatgccccaaatagtgactgacatagagaaggtactcagtaaacactttttaaaggaatgcctgcctgactgaagcttaatgatgtgaggcttctagtgggataccctaccttgttttaacctgaagtgactcttccttagctaagagagccagacggactccatcgtgactccttcactcgcagccccttacccacccccttcctcaaggacttaacttgtgcaagctgactcccagcacatcaagaatgcaattaactgataagatactgtggcaagctatatccgcagttcccaggaattcgcccggttaatagcacccagagcccctgcgtttgtgtccggttgataacgcccaaagcccggcgtccatcaccttaggatagacttaaagcctctgcacctggaactgtttactttcctgtaaccgtttatccttttaactttttgcctactttacttctgtaagattgtttcaactagactccccctctcccctgtctaaaccaaagtataaaagaaaatctagctccttcttcggggccaagagaatttcgagcgctagctgtctctcggctgccggctaataaaggactcctgaattcg

SEQ ID NO: 829 - DNA, 2344 bp, Homo sapiens
gcccatgcttgggagggtggggcacagtggccacctttcctctgcccccaggacctgaagcccggcaacctggctgtgaacgaagactgtgagctgaagatcctggacttcggcctggccaggcaggcagacagtgagatgactgggtacgcggtgacccggtggtaccgggctcccgaggtcatcttgaattggatgcgctacacgcagacgggtgagaagctgcccagagatctgggcctctcaggctgcaccatctgcttctccacttcttcacggacagccctgtggtggctgctcccagggaggctgttgagctggggtgggagccgggcaggtgggctgtgttggtgtctcctccctccccgtctcatcctgtccccctgcccacggagctgaccagggcttctatctcagtggacatctggtccgtgggctgcatcatggcggagatgatcacaggcaagacgctgttcaagggcagcgaccgtatcctccagccgcagggcggcaccaggggcgggtggggatggctcctgcccaggtgggggcagtgggggccctgatctctggcccccgagctgtgttcctgacctcggtgcagacctggaccagctgaaggagatcatgaaggtgacggggacgcctccggctgagtttgtgcagcggctgcagagcgatgaggccaagaactacatgaagggcctccccgaattggagaagaaggattttgcctctatcctgaccaatgcaagccctctggctgtgaacctcctggagaagatgctggtgctggacgcggagcagcgggtgacggcaggcgaggcgctggcccatccctacttcgagtccctgcacgacacggaagatgagccccaggtccagaagtatgatgactcctttgacgacgttgaccgcacactggatgaatggaagcgtgagtggggggctcctggcacggcctgtgtggacccaagtggggggctctgggcagggcctgtgtggacccgtgagttgggggctctgggcagggcctgtgtgaacccgtgagttgggggctccgggtagggcctgtgtggaccccgtgggccctgtgcaggtggccaggctcagagtcctagatccccatccctgggatgcaggtcaggtgaggaggatgggaggtcagggcagcatggggccgtgtggcctggtggagatgacctctggctggagctggaagatgaagggaagggtgttcctggcaggctcagcacagaggctggcacagaaggagccgggagtggtgaaaggcagctgtgagtcagggaaccagggcccacttagcccctcctggcccccagacctgctgcccttccgccatgtccaggccagagacctgggccaccctgacaccctcaccacgtccgcttgtccctaaggcctctctgctcacacctcctgaatctgtccttgcctctccttgccccatttttgttttttgagacggagtctcactctgatgcccaggctggagggcagtggcacgatcttgactcactgcaagctccgtctcccgggtacacaccgttctcctgcctcagcctcccgagtagctgggactacaggcgcccgccaccaggcctggctaattttttgtatttttagtagagacagggtttcaccgtgttagccaggatggtcttgatctcctgacctcgtgatccacctgccttggcctcccaaagtgctgggattacaggcgtgagccaccgcgcccagccctctccttgccccactttaggatccctcccccctggacaactgtatacccaagacagtccccagggcctcgcctgtctcccccagcccccgctaagcagtccagactccaaccccaactgctggggtccatcatcccctataccaggggctatcccctcaacttggagggctggccaaagcctgtgcagcctcaggctggactcagagaagcctccccagctcccgcagctatgctgtggcctgaggctgtgctggacctggcttcatttctgctccaggatggcaggctgtgtcttcttcatggctgcatgaccagcctggggtgggtgtgcccggggaaagtaggtgtacactgggagccgtgccatgtttcaggccctgtcctggctctgcctcgggtgcgggaccttggtcctccacactggctgggtggggctggatgggttgagattcacatgtgctccttacgaccacgggtccctgggtgcccgcagcagggcctccacccttcgctgtgtgcatattcgtgtgcttatgagtttggctttgtttgattaaaggtttctgctgctagaaagat

SEQ ID NO: 830 - DNA, 2376 bp, Homo sapiens
acggtgctgtggaattctctggtttttcacgcaaggtcaggcgtcctgctggcgccctctcgccaccctgccctcccgtcagaagcccggctcctcgccggggaaggccggatgctggcccgccgggacctgggacttgtgccacatggagtgtcgggagtctccattgccgcgagttctacaccacagggccaggctgtttgctccccatcggtcgctgcccccagcaccctgttgttattaaggactcatttgcttggagcggcatcattacaagggtgtggggtactacatatactccctatttttctattttcgaaaggctgcaggcgcgatgcacagtgcgcttgcacggtggggcctagtgctagcccgaggagcggacgggggccgggcaggggcggtgggcgccggcctcgtctcggtgctgctcggtcaggctgtcccggcgcggcggccgcgggaggccctgccgtccttcacccctggaggcgggctggggggcgggtgcggggcgcttcccctcctcagggccctcaaaccgcaagggggtttccgcttcccagtcgatggtcgtcctctcccatccccggctgcatctccatttacccgtcgcccatttcctttgcccatccaggctccttggctccactggggtctccgttcccttctcccggtcccccctccaggtcgcggctcctttgtccaggactacgcaggggcttgaccccagggcgctggtttaggccggatctggggtcccttgtcactcccaggcttcttccacttccgaattctggagaaccgggaatcaagccctgcgcgttcctcttcttcctccttcgtgccgaaagcacgcttcatgtctgccagggcatcagttctgaaagtgagcggagaacaaggagtttctttttcttccccagaagttgccttttgtaaggactatgtctgcgccagggcttgatacatgttgctactcctgggagtgtgagactgggaagctgatggaaatgtcagcattagctttaatggtgaggccaaagggaggatggacccagcatcaagcctgggtagaggagaacgggagagggaggaccagaaccaggggccgcctgttcactgccttgaggtgtctgaatcctgcctttgctgtttgtgagctctagcactatgggtaagttggttaactttttgagcctcagtttcctgttctgtcaagtgggaatacaacttcctagctcacagagttgtggtgaggattatgaactattatgcatctacagtgtcctcctggcaagtgaaaaggctcagtaaagggtaactgttatcatggtccagtctaaacttccgtgctagcccttcaccaaattgatcttacagaaatcaaaaggttcctgcttttcccaccttgtttggaattagaaaaaaacttcccctgcactattagtgttttataggcctcttctctccaagacagaaaggaggagagggtaacggggcttattttcttctcccaggactcttgaagaaggattcaggatgtggctgtgccgctggggataaacggtgtaacactggggcaggtcagtttccttgttggtacgatgggactcttacacaggccccttcctttccagcaccagatactgctacaccatctcatcggcatggacctatatgtggcagcaagtccatctcatcgcttttggtgaaagtcagtccagtttgtaaagattctcattgtcactgtagacgaggaactgggacaccaaaaggagaaactctggccacacttgcaccctgttcccaatcctggtccagtgtcacccacagatggtaaggagctctagagacctcaccagcccctgggattggtcacctcactcttctatggacagagattcctgctgggatcctttgagggcaagcagacccttcttccagctcggactgtgaactccactgcagccgtaaggactgtctgtgacagtgagcccgagatgactgggctctgtgctccctcccggccctccaatccttggcctgccacagagaactgagctcttttattagcaccatgaatgtgactgatacagctagccattcccttgtgcgaatgactcagtttattaatgctctgctaaagatggcttctttgcttgccagcagccttaaacagtatttcattaaaactggcttaattattttgagaagacggcccaattaaaagctatacactccctctatgtgagtgtttatacatagagctgtatatataatacatatttgtaagtgtgtgtatatatatatgtgtatgtatgtgtctataaatatataggcttagcaatttcattacatgggataaattgttgg

SEQ ID NO: 831 - DNA, 1851 bp, Homo sapiens
aagtttggtagagtgtgttgtggggacagcagtatggtgtgagggaaggagagggttcagtctattataatcattagtctattgacttgtggtaattgagctataggagataaattcctacttactctacacatttaatggactcttcctcccaccccatcttccctgtccctttctttttccacagcagctctgcaacgggccaatagcttccagtctccaaccccaagcaaataccagaactggaggagagaattctggtggagtttgacgccagtgaacaaaagaactatgtcacctcctaaggacccttctccttctcttcctcttccttcatcgtcttcccattcatcttccccaccatcttcttcttcaaccagtgtttctgggaatgctccagatggttcctccccgcctcagatgacagcttctgagcccctctcgcaagtctcgagaggtcatccaagtcctcccaccccaaactttcggaggcgagccatagcccaaggagcacccagggaaattcccctgtatctgcctcatcacccaaagccagagtgggcagagtactgcctggtgagccctggtgaagatggcctctcagaccctgcagagatgacttctgatgagtgccagccagcagaggcccctcttggggacatcggaagcaaccacagagacccacaccccatctgggggaaggacaggagctggacaggccaagagctatctcccttggctggagaagaccgggaaaaagggagtactggagccaggaaggaagaagagggagggccagtgctggtaaaggagaagttgggcctgaagaagttagtcctcactcaggagcagaagaccatgttgttggattggaatgactccatccctgagagtgtgcacctcaaagctggggagcgaatttcccagaaaagtgctgagaatggtagaggaggccgtgtgctaaaaccagtccgccccctgctgctccctagggcagcaggagagcccctgccaacccagagaggggctcaggagaagatggggacccctgcggaacaagctcaaggggagcgaaacgtgcctccacccaagtccccactgcggctcatagccaatgccatccgaaggtctctagagcccctcctttccaactctgaaggtgggaagaaggcctgggccaagcaagaatccaaaactttgcccacacaggcctgcactcgctcattcggccttcggaaaaccaattccaataaagacggggaccagcattcccctgggagaaaccagtcctcagcctttagccctcctgaccctgccctccgcacccacagtttgcccaatcggccatccaaggtctttcctgcacttaggtccccaccctgcagcaagattgaagatgtccccacactcctcgagaaagtgagtttgcaagagaacttcccagatgcttctaagcctccaaagaaaagaatctcacttttttcctccctcagactcaaagacaaatcttttgagagtttcctccaagaatccagacaaagaaaggacatcagggacctctttggcagccccaagaggaaggtgctgcctgaagatagtgcgcaggccctggagaagctgctgcagcctttcaaaagcacctccctgcgccaggcagctcctcctcctcctcctcctcctcctcctcctcctcctcctcctcctacagcgggaggtgcagactccaagaactttcccctcagagcacaggtaacagaggcttcctcttctgcctcttcaacctcctcctcctctgcagatgaagaatttgatccccagctttccttgcagttaaaggagaagaagacactt

SEQ ID NO: 832 - DNA, 2711 bp, Homo sapiens
tgcttgaggctcacttttggggccccacagctggagccggtataatgactgggacaacatcaaggggtggatgaggggcctctcctcccgcaacactgccttcccatgctgttcccctgccagctccttaacactgccgaccaaggccagccctggcattcagggaaattggagggcagcacccgtagggtggccagcctcaggccccaccccagctgtgtcctctagtctctggggacccctggggggaagaagtctaccctgcttgtgagtcccgtctcagtgtggaggaactggctgcacatgggacctgaaggtgccctctgtgtttatgttgggggtgggggggcagtgctggctgcctctgtcctgtgtgtgaccctaccctcgaagggtcctgtcctgtcagtcccgagggagccacaaccaaagctgcggagagaaggtggggaagggtgcggaatggccgtggggcacagcgtggcagactgttcagtctctgctgggtctttcctagggacctggaaggccagtgttgcttccccctcactccctttcactgcaggcagcctctctgcttccccaatgccttatgcctgggcacactgccacagaatatgcaatatgtgtgggtgaccatgccctcacgaccacacccccaccccgggcagcccccggactccaaaggtcgtggctgccacagcctccctcagctcttcctgcctatctgtcttcacactgagaatggcgcccaataaatgctatccacggagaccaggctcaggctccagctgcctctgtcatcgtatgcccttgctgctgccagggaggggccatctcccaccccctcccctgccggggtctacaaacatatctagctgctgggtgccgtggctcacacctatagtcacagcactaggcgggcagattacctgaggtcagaagttcaagaccagcctggccaacatggtaaaaccccgtctctactaaaaatacaaaaattagctgagcgtggtggcgcatgtctgtagtcccagctactcggctactcaggagactgacgcacgagaatcgcttgaacccgggaggcggaggttgcagtgagctgagatcgtgccactgcactccagcctgagcgacagagtgagaccctgtctaaaaaaaaacaataataataaaataaaataacatacctagctgactcgccatgggctcgctggcctgtgggcgacactggcttcccttttgggatttcccagaagatccagattttcttaagtccccttggaacagactaagaaaggatcaccttagaaatcacctggtcctattgtcccccccgtacatgagtaactgaggcccacagagagcaaatcgcctgcctgagtcacacagcagtgagtggcagacctaggctaggaactaggactggggattgctattccagtgctccccatcctcacacagactgcacagtccgcctggacacaccccagctgacagtggtacctcccagtcagccaggagaatggattccttctcctgcagtaggggccccctggctgagtggcctgattgactaaaacatatgtctttgaaggagagtgcatcacaagcacctttctttggggtagatttttctctgggtctagagggacagctcaggcttgggactgggcctcagaacctacgacagaccgtgagagcagacccaccttatccatctggtgccagctccccaggtcagctacagcgacccccggacttcatagagtacaatccacagtaatagcacacagctctgtacctatctagctccatgcctatctatctgcctacctttcacaaaataattcttagcaaccctgctacagccaatgattctaatacgttctgttctattgcatgttataaaatgctggtcacgatccactaaattgatgtctctacctgctaatggtttaatacctgcagattgaaatatactggagaaataaagagagtgggagtagggacactttctcccagtgcccacaccgcccctcgttacccgcataggtcaactgaaagatacagagagggaagctttgatggggggttcagagttcaaaggaagaaatgatggcacctgcactccctgcccccagaggcaggacacagccagccctcctgtgacagcactcctggcagctccttgttggcctgcagccctcagggggcttagttgccattgactcacccactcctaaggccaccacatcaaaatctgaggcttactgccctgtcccacctgcctctgtctttcttaaaacagctaaatgcaacaatagcaggaattagcttgtttttgaggttggcaatgaccagttcaaggtgactcttattttcttaagcagtgcttgcaggacataaatgtgatgacacttgccctcctttctttatcgcctgggacagactttacaaacagacctgggagaagtcccctaaggggctgcatttatccccatctccctaggggtgatcagcattgtgacagctgggcagagcagtggtgaactgcacccatgtccctgctcacatctcctaagatctcagaattgcctgaggttctagcgtgggctccttctctccagatgatgccatccccacccccctcatttccacacagcatctgaggcatcctgcactaaaagatatatgtacagcaaaac

SEQ ID NO: 833 - DNA, 3245 bp, Homo sapiens
ggaatccaacaagggcaaatcaatgttggagttccaggagctaatgacagtttttcaactgctacactggaatggcagccttaaggccatgagggaacgacaatgctctcggcaggaggtgttggctcattattcgcaccgggccctggatgatgatattcgccaccaaatggccttggactgggtgagccgggagcagagtgtgccgggggcactgtctagagagctggcctctactgagcgggagctggatgaagcccgactggcaggcaaggagctgcgcttccacaaggagaagaaagatattcttgtgctggctgctgggcagttgggcaatatgcattcttccaactgctaggcatccacccacataactccccaggctttccacagcctttttttatgtctcctttctaaaatttaggatgattttttgtacatactttctcatttttatactttaaaaaatatatatgtgtataaattctacacctagattcctatttgctaagagatcccttttcttactaccagtttttggatgtagttttatttgaaacatcttcagtccactttacaacaaagagcagcttgtctttgcagctttgttagctcttaaacttccagattaactgtgtagccatttcagtagcactaaaagattaactctagtgttcatgtgtccttcttttcaaatatcaggtaacttgaataaggattatgtgccccacccttactctcattcctgcttcctcttggactcaaacagggtatgagtatgaagattttgcctttagttcctgaactgaacctgcttgctatccctttcctccccaccactaccttattccttctctgcctccaaattgccactttgttttgaggcttccttccctaccttattattctgaaggaagtagagatcttgcttctgaaacccctcctaagaaactgcccagggacaagataaattacaaacaattcatgggagtttactacctaagttgcttctagggcatatgtataccatactagtagtctagatttctggatatactctacagtagatgggggttatggttgaaactgattctctttcagtattccctctaaacatctcccctactcccccagcttagttaaaccctgcgtttggaccttcctgcctgcagctattagtagaaagtaaaacatatttccatatttcccttcacctaacattttattttttggaagcgttatcagtcctatttggttagtgagaaccatgttccccttattcccgctaagttgctgctgtttactaccttagattctcatttgttttctctttctttcctctccttccacattaattattagaacataagttgatcaggaaaattaaatgagactttagtattttggcacttcctaattgacaccttgggagactgcaggaagggaaagagaatcaatgatcagttatttgtgtgtgtgtgtggtttttttttttttttggaagacagagtctcacacttttgcccaggctggagtgcagtggcgtgatctcggctcactgcaacctctgcctccagggttcaagcgattctcttgcctcagcttcccgagtagctgggattacaggcacacgccacaacgcctggctaatttttatatttttagtagagacagggtttcaccatgttggccaggctgttcttgaactcctgacataaggtaatccacccgcctcagcctcccaaagtgctgggattacaggcgtgaggcactgagcctggcctatttgtggttttttttttggttttgtttttgtttttgtttttgagacggagtcttgctctgtcgcccaggctagagtgcagtggcgcgatctcggctcactgcaacctccgcctcccagattcacaccattctcctgcctcagcctcccgagtagctgggattacaggtgcccaccaccacgcccagctaattttttgtatttttagtagagacggggtttcaccatgttagccaggacggtctccatctcctgacctcgtgatccacctgcctcggcctcccaaactatttgtgtgtttttttttttttttgagacggagtctcgctctgtcgcccaggctggagtgcagtggcgctatctcggctcactgcaagctccgcctcccgggttcacgccactctcctgcctcagcctccttagtagctgggactacaggcgcccgccaccatgcctggctaatttttttgtatttttagtagagacggggtttcaccgtgtttgacaggatggtctcgatttcctgacttcgtgatccgcccgcctcggcctcccaaagtgctgggattacaggcgtgagccaccgcgcccggcactatttgtgtttttaacaccattctcccccacttctctcctgggtgacataagagagaaataacctgtagtacagcagctaaagtattctcctttcagagaatttttttggaggtctctaatatatatttcccccttgtctctgtgatctcttatttatactatattattgtcccatgtactttctaaactgagcttggaacatttagtattcctgcaattggacttcccacttaacaattatacagactttgcttttagaaatagattaggttccaaacagaaagttcaagtgtaacaacaacaataaaaatagattatgaaacaggctataattggctcttttggatttgataggggcaagatgaaaggcaactttcttgcttttgaaatcatgttgggtaagaggtaaggaatccagctacaattttattagtgcttgaaacgggcttccttgaattctccaggccctatcatttttttttcttactaatcagaagagagctggggtagaagccccatgtttgtattccatgaaacacgtcgggttggagtaaaggcaaaaacagctagacacaccaggtgtgtctgtttgacatttataagctggcactcatcaacactcctgtttctcctttctctgggacgtgtggattaaggggtgtgagttgtgggaagaattgccctcgtacctcctggatttattatttttctcaaataccaaccagtaagatcccaaataacttgagaaaaattgtttcctgatctgtccacttctggtgtcaaagattttactcatcttcttagtacattctatgtattttatatgtataattttatacaattaaaaatagatttttgtctagtg

SEQ ID NO: 834 - DNA, 2906 bp, Homo sapiens
gaggggttcggcgacgcggagggagggagagtctgggccgcgcgggagccgcagggcgccctagccttcgcagaaacgatggcggaggaagaaggaccacctgtagagctgcgccaaagaaaaaagccaaagtcttcagaaaataaggaatctgccaaagaagagaaaatcagtgacattccaattcctgaaagagctccaaaacatgtattatttcaacgctttgcaaagattttcattggctgtcttgcagcggttactagtggtatgatgtatgctctctacttatcagcataccatgaacggaaattctggttttccaacaggcaggagcttgaacgggaaatcacgtttcagggtgacagtgccatttattactcctattataaagatatgttaaaggcaccttcatttgaaagaggtgtttacgaactgacacacaataacaaaactgtatctctgaagactataaatgcagtgcagcaaatgtctctgtatccggaacttattgctagcattttatatcaagccactggtagcaatgagattattgagccagtgtatttctatattggcattgtttttggattgcaaggaatatatgttactgctttatttgttacaagttggcttatgagtggaacatggctagcaggaatgcttactgttgcgtggttcgttattaacagggtagatacaacaagaattgaatactccattcctttaagagaaaactgggcactaccatattttgcatgccaaattgctgcacttacaggctatttaaaaagcaacttaaatacttatggagagaggttttgctacttgttgatgagtgcttcaacttacacatttatgatgatgtgggagtatagccactatctcctgtttcttcaagcaatatctctattcctgctagataccttttcagtggagcaaagtgacaaggtttatgaagtttataaaatctacatattttccctctttctgggatatttactacagtttgagaatccagctttgttggtatctcctttattaagtttagtagcagccttaatgcttgctaagtgccttcagctgaatgtgaagaaaggaagttttgtagctaaaataataaaagtgattaatttttacttggtgtgtactctgacaataacattgaatattataatgaagatgtttgtcccacacaaagaaaatgggcacatgctgaaattccttgaagtaaaatttggactaaatatgaccaagaattttacaatgaattggctcctctgtcaagaatccctgcaggcaccatctcaagatttttttctgcgattgacacagtcttctttattacctttctacattctagtgttaattatttgttttctttcgatgttgcaagttatttttaggaggattaatggtaagtccctgaaggaaactgttactcttgaagatggacgaattggagaaagaccagaaataatttatcatgtaattcacactattttattgggttctcttgcaatggttatagaaggcttgaagtacatctggattccttatgtgtgcatgttagcagcatttggtgtatgttctcccgaactttggatgacacttttcaagtggcttcgattaagaactgtacacccaatattgttggctcttattctgagcatggccgtgcctactataataggtctcagcttatggaaagagttttttcccagattaatgacagaattaatggaactacaggaattctatgacccagatacagtggaacttatgacctggataaaaaggcaagctccagttgcagctgtgtttgcagggagtccacagttaatgggtgcgattaaattatgcactggatggatggtgacaagtttgcctctttacaatgatgatgatcttctcaagagaaatgaaaatatctaccaaatctattcaaagcgatctgctgaggatatttataaaatactgacatcttacaaagctaattacctaattgtagaggatgctatctgcaatgaggtgggacccacgagaggctgtagggttaaagatttattagacattgcaaatggccacatggtttgtgaagaaggtgacaagctaacctactcaaaatatgggcgattttgtcatgaggtcaaaattaactattctccatatgtgaattatttcactagagtatactggaacagatcctactttgtatataaaatcaacactgtgatatccttccagtcttgaaaaataacagagccttcatttcaaagactacctgaagtaaaatgcagttttcttctacctactcggtgtcttttgcagatcagagtatggacatttgaaatattgctgcttctttcccccttctgctgttaactggatccagagttctgtgggaaatagaagatcaagcattactgtcctttgattaaatgtgatatctaccactctgcaatattccagacaggtgtcttccttaccgttacatggtctttaacacttttactgattgcaatattttccccataaaatcttcattctattataatattgatcttgaatttgaatatgtgcaaggtcagatacatttctcaaacataacatttaataaataatgtgatataattatttaatagaaagaataattccgaccttcaagcaagtttctgaaggtattttatgatgtaaaacaatgtaattgaaaagtcagcttccatattttgtaggggaaatagaacaccctactttttatctagtgtgaaatatttaatcgaatttttgttgatttatattatgttacctgtgctgaattaggtttggtacttgtgttttgtttgacatattagtaagttgcttttgcttctttctgtcaacttattttttaaataaaattgatctgg

SEQ ID NO: 835 - DNA, 1894 bp, Homo sapiens
agctctgagctcgcggaggcgtggccggtgcgcggggcccgcggcgcgcggggatgggggtctcggtggatgtgcaccaggtgtacaagtaccccttcgagcaggtggtcgccagctttctccgaaagtaccccaaccccatggataaaaatgtcatctcagtaaaaatcatggaggaaaaaagagatgaatcaacaggggtcatctacagaaagaggattgcaatctgtcagaacgtggttccagaaattttaaggaaggtgagcattttgaaagtacctaatatccaattagaagaggagtcatggctcaatcctcgggaaagaaacatggccatacggagtcactgccttacgtggacacagtatgcatccatgaaggaagagtctgtcttccgggaaagtatggaaaacccaaattggacagagttcattcaaagaggcaggatttcaatcacaggggttggatttctcaactgtgttttagaaacttttgccagcacattcttacgacagggagcccagaaggtaaccatatttctgctttgaaccaacattaattttaaaaaacaataggagttccaatagggttattgaataagactcatgagcagacataatgagaaaaacatatagttaataaacaaatatatgcaaaaataatcaacctcaaaattattacataaattcaaatcaaagtaaaactaaagtggcatttatggctcattaaattaaaaatatgccaatgaagagtatgtgaaaatttggagcatacttataatctaattaaaagaaataatcagaatgaataataatgtatagtatgatgacaactatttaataaagataatgatagttaatatttattgagcacttactatgtactactgactgctaaaagaatttgtattattaactcattgaatcctcacaaacctttgcaggagctgttattgttgtcctaatattatggatgaggaaaatacagagaccccaattgtccactcttatagttttcaaactctattctcaagggagcttaggcttccatgaaagtgattcagaagccatgttggagttctaaggtcctgtgtgctctattttaagtagagcttttccattttaatctgtcctctatggtattccatataacatttatatcttctattttctttccttaatagcattatttttaaaacttcatgtcaaaacccattgcttatgcatttttatgtgcttattgcagtgctcagtataaagcagttgctcctaagtgttttattattgttattaattacgatgataattatactcatttatttccagattttactcaggactttttgtataagtttacctcattttgttttgtgggatagaattaaccgctggtgtaaagaaccattgttatgaccctcagagacttcctggcaatggacccttgttttcatttttgcatgtctaggttcaaggatgaacctgtactaggaggtgttcatctgggaggctgagggcggtgaatgaatattcagtaccgttctgtacaccatagacatactgttgtgattgatgatgtgttcttgctccagttgaggtggttcctggcacatattcagactggtccagcctctttaaacctggacttgaagggagtagttgaacttccggaagatcttatgtcacctttactcactcagacattattgcaaatttttctgctatattgcaatttatgcgtttgtaaaaactcccatgttctgcagcattgcattctaaaaatagtggaactgatgagaaaagtaatttcattgccatgtttcttactgagttgactttttgtgcatcctttaaactctgtatgatgataatagtaataataaattgaatttttttat

SEQ ID NO: 836 - DNA, 3254 bp, Homo sapiens
gcactcggctcggcccggcccgggccgcagcatggccgagccgctactcaggaaaaccttctcccgcctgcggggccgggagaaacttccccggaaaaagtcggacgccaaggagcgcggccacccagcccagcgcccagagcccagccctccagagccagagccccaggctcccgaagggtcccaggccggagcagaggggccctccagccccgaggcatcaaggagccctgcacggggagcctacctgcaaagcctggagcccagtagccgccgatgggtgctgggtggggccaagccagctgaggacacctctttagggcctggggtacctggcactggggagcccgccggcgagatctggtacaaccccatccctgaggaagaccccagacctccagcacctgagcccccggggccacagcctggctcagctgagtcagagggcctggccccccaaggtgcagcccccgccagccccccaaccaaagcctcccgcaccaagtccccgggccccgccaggcgcctctccataaagatgaagaagctgccggaactgcggcgccgcctgagcctgcgaggcccccgggctggcagggagcgcgagagggctgcccctgcgggctccgtcatcagccgctaccacctggacagcagcgtggggggccccgggccggcagcagggcctgggggcacccggagcccgagggccggttacctcagcgacggggactcaccggagcgcccagctgggcccccatcacccacctccttccggccctacgaggtgggtcccgcagcccgggcacccccggccgcactctggggccgcctcagcctgcacctgtacggtctcggggggctgcggccagcgccgggggccacccccagggacctctgctgcctactgcaagtggatggggaggccagggcccgaacagggccactgcgaggggggccggacttcctgcggctggaccacaccttccacctggagctggaggccgccaggctcctgcgcgccctggtgcttgcgtgggaccctggcgtgagaaggcaccggccctgtgcccagggcaccgtgctgctgcccacggtcttccgagggtgccaggcccaacagctggccgtgcgcctggagcctcaggggctgctgtatgccaagctgaccctgtcggagcagcaggaagcccctgccacagctgagccccgcgtctttgggctgcccctgccactgctggtggagcgggagcggccccccggccaggtgcccctcatcatccagaagtgcgttgggcagatcgagcgccgagggctgcgggtagtgggactgtaccgtctttgtggctcagcggcagtgaagaaagagcttcgggatgcctttgagcgggacagtgcagcggtctgcctatctgaggacctgtaccccgatatcaatgtcatcactggcatcctcaaggattatcttcgagagttgcccaccccactcatcacccaacccctgtataaggtggtactggaggccatggcccgggaccccccaaacagagttccccccaccactgagggcacccgagggctcctcagctgcctgccagatgtggaaagggccacgctgacgcttctcctggaccacctgcgcctcgtctcctccttccatgcctacaaccgcatgaccccacagaacttggccgtgtgcttcgggcctgtgctgctgccggcacgccaggcgcccacaaggcctcgtgcccgcagctccggcccaggccttgccagtgcagtggacttcaagcaccacatcgaggtgctgcactacctgctgcagtcttggccagatccccgcctgccccgacaatctccagatgtcgcgccttacttgcgacccaaacgacagccacctctgcacctgccgctggcagaccccgaagtggtgactcggccccgcggtcgaggaggccccgaaagccccccgagcaaccgctacgccggcgactggagcgtttgcgggcgggacttcctgccttgtgggcgggatttcctgtccgggccagactacgaccacgtgacgggcagtgacagcgaggacgaggacgaggaggtcggcgagccgagggtcaccggtgacttcgaagacgacttcgatgcgcccttcaacccgcacctgaatctcaaagacttcgacgccctcatcctggatctggagagagagctctccaagcaaatcaacgtgtgcctctgagccagatgacggggtgggaccccggttagtaaggaccgggcgcccagtggctaaggcggtgccctggtgaccaaggagagccagacctgttgctcaggccgagctcctggttgccagcgagttaccacgggaccagtcgcgtgtatggctgagactcattcccagtttccagggcccggtatttggacactagttgccaagtctggggcctggggattttagggaccagcggttgtgaccatctttcctgagcaccaagggcttccccttttgttgccaaaaaggtagttctcgcgcttgctaggctggcctctcttgcctccccttggccggggcaacaccagttactgtgagcatcaccctggtgtggtgagtcacctctagtcggccctcttgctgctgccaaccaaatcagtattagctttgagcactgcactgtttctccctcccttggacgacacaaagactagcatgaggcactctttgtggggggcagcccctatcctgggttccagcatggacacaggggtagcctggggcttatagagaaacagctggtttcccctaccctttcccggggaagaccccacgattggcctctagtcagcaaatggagataacagagtctggcctttccaatccccatctccttgccccccccttgcccccccccccgaaaaaaattgagcacttaaacccctcccttttggagggggccccctgaagcgtcaggctgggggcagtctggtacggaacatatttattgcctccatgcatgtgtgtgtgtgtctgtgaggactggtgtgcgtggacacgtctgaagcaggcgtgtggggctctttcagggaccacagaggagggagcagtttgcagtgcccagccaccctgaaatccccaataatggtgcctcagtgggccccagagttccagtgggagagtacggttccctcctgtctccctcttcttttccgcacctccatctttgtggataataaataaatatgcacaggttctg

SEQ ID NO: 837 - DNA, 2364 bp, Homo sapiens
ttctaagttcaaattaatgttggtgcttttcctcctttttcttggcagatggtttgctaggtgagtgtgtcctcgattctttaaatcagggtccccagtccccaggccacagatcgttaccagtccatggcctgttaggaaccaggccacacagtaggaggtgagcagccagccagtgagcattactgtgtgagctcggccccctgccagagcattactgtgagctccgccccctgccagagcattactgtgtgagctccgccccctgccagagcattactgtgagctgcaccccctgccagagcattactgtgtgagctccgccccgtcagagcattactgtgtgagctccgccccgtcagagcattactgtgtgagctccgccccgtcagagcattactgtgtgagctccgccccctgtcagagcattactgtgtgagctccgccccctgtcagagcattactgtgtgcgctccgccccctgccagagcattactgtgagctccaccccctgccagagcattactgtgtgagctccgccccctgtcagagcattactgtgtgagctccgcccctgtcagagcattactgtgagctccgccccctgtcagagcattactgtgtgagctccgccccctgtcagagcattactgtgtgagctccgccccctgtcagagcattactgtgtgagctccgccccctgccagagcattactgtgtgagctccgtcccctgccagagcattactgtgtgagctccgtcccctgccagagcattactgtgagctctgccccctgtcatcattactgtgtgagctccgcccccatcatcattactgtgtgagctccgcccccgtcagagcattactgtgagctccgccccctgccagagcattactgtgtgagctccgcccccctgccagagcattactgtgagctctgccccctgtcatcaatactgtgtgagctccgcccccgtcatcattactgtgtgagctccgcccccgtcagagcattactgtgagctctgccccctgccagagcattactgtgtgagctccgcccccgtcatatcattactgtgtgagctccgccccctgtcatatcattactgtgtgagctccgccccctgtcatatcattgctgtgtgagctccgccccctgtcatatcattgctgtgtgagccccgcctcctgtcagatcagtggtggcattagattctcataggagtggaatcctgtcgtgaactgcgcatgcgaaggatctaggttatgccccgcttatgagaatctaatactgatgatctgagatggaaccgtttcgtctccaaaccatccccacacttgtcagtggaaaaagtgtcttccgtgaaaccagtccctggtgccaaaaaggttagggactgccggtttaaataaccaaatgctaaaagaactggcatagaagtaaatgggctgctgctttatttttaggctgttctttttagagaacaatgacagttatttccaagtttgtcattagaaaataatattaggttggtgcaaaagtaattgcggtttttgctattgctttcaatggtaaaagccacgattacttttgcaccaacttaatatgataaatttgttccttaaagtgtatttttgataagaaagcccttttgtttttccttctgttaattttttgtttttttcttggtagagacagagttttgccatgctgcccaggctggagtgcagtggtgtgatctcggctcactgcagcctccacctcctgggctccagcagtcctcccacctcaacctccctaagagctgagactacaggtgtgagccaccatgcctggctaatttttagagacagggtttcaccctcttgcccaggctggtcccaaactcctgggctcaagcagtcctcctgcctcagcctcccagagtattgggattataggtgtgagccactgccagaaaaacgtttcctaagacaaggcaggtcttacattatatttaaattttttttaatgatgtcttttttggcagtgcacagccagagaacaacacatcacacacaagaaacagttgtgctcatgtgatgggggcctcagcactaggaaggagtggactgttggcgcacgcagcagcttgaataaatctgaaagtcactacgctgcgtaagagaagccaaataaagcgcatgctgtgtacagagggtgtcgagaatgcctcctacgtgacggaaagcagatccgtggttccctgcagactggcaggagcagattccaaaggcacaggaagaagcttgcaggtagaatgtgttcattaccttctgcgcattataccacaaaaaagctgggaataaaaatgctaacc

SEQ ID NO: 838 - DNA, 2398 bp, Homo sapiens
attttgctcgagggcatggcctaagccggtcagctaaggccatgttaatacggggctgtcccatctctctgcggggcgcgacagctggaagagccgaacggataagagaagaggaggtgagaggagctgtacaccacaagaggcactgagggactcaggataacgggatgaagccgtcagtgcccccagaaacgaagcggccccggacgaatttctgagtcaccgtcgcgagaaagcgggctgagccgccattttgaagcctggcaaaccgaagcaagaaatgctgccgtgttggatctttgccagccttcgtgccgaatgggagcaggttggagggagggagagccaatatacactatgggctgattaagcccggttggctgccatgttgttaacgagcaccgatttcctctacttttgtcgaagaagtttattgtgggtcagggacgtcaggtcgcttgccttcgtttactgtggtcatgattgagcatatgaggacggccattattgttgggggcaaatggaaatgctctaggcggggccatttttcttaggggcaagctgtcgtcacccttgtcaactggttcggatgaagcccctgtggccgccatcttgatctcgggcggccccgataagggaggcggagtgtgcggagaggaggcggggcaactgcgcggacgtgacgcaaggcgccgccatgtcttttgagggcggtgacggcgccgggccggccatgctggctacgggcacggcgcggatggcgtcggggcgccccgaggagctgtgggaggccgtggtgggggccgctgagcgcttccgggcccggactggcacggagctggtgctgctgaccgcggccccgccgccaccaccccgcccgggcccctgtgcctatgctgcccatggtcgaggagccctggcggaggcagcgcgccgttgcctccacgacatcgcactggcccacagggctgccactgctgctcggcctcctgcgcccccaccagcaccacagccacccagtcccacacccagcccaccccggcctaccctggccagagaggacaacgaggaggacgaggatgagcccacagagacagagacctccggggagcagctgggcattagtgataatggagggctctttgtgatggatgaggacgccaccctccaggaccttccccccttctgtgagtcagaccccgagagtacagatgatggcagcctgagcgaggagacccccgccggcccccccacctgctcagtgcccccagcctcagccctacccacacagcagtacgccaagtccctgcctgtgtctgtgcccgtctggggcttcaaggagaagaggacagaggcgcggtcatcagatgaggagaatgggccgccctcttcgcccgacctggaccgcatcgcggcgagcatgcgcgcgctggtgctgcgagaggccgaggacacccaggtcttcggggacctgccacggccgcggcttaacaccagcgacttccagaagctgaagcggaaatattgaagtccagggagggagcgccccgggccgcgtccgccccgtcccacactacgcccccgccccactcccggggcctgctaatctgaggccgatccgggaccggcctccttgcgtctcccattcccaagattgtcccgcctctgccaatccccgccgtccttccagcccacgacctgccgcgccgaggagcggcatctgtcccgtttcccgattgggtctgtcgtctctctccgcctagcgacagattccttctattaagggattggctcgctgagttctaagctctaaatgggtcaactcctttgttttccgcctagcgacaagggatttgctcgcacggcattggctccatcccctagtcgctggacagctctttttttgattggctcaaatcctgtaaagggcttgaccagtctctacatagtcaccgtccgcttttcctgagttctccctcccaattgttccagcttcctgggggcgtggccaagccctcctcttcccagaattggcccggggccttcaatttacgttctttacactacggggactggggtcgtctttgcccacgtcccgacaacttgttccctgaccccctcagggatggccccaaactgtccctgcctctggcaccccctttcattgattccatccatccccacaacagcctgccaatcgaagcccgtccctgcatccaggatggtaccagctcccgcccctcgccccccacctccacaggtgccttaaagggccctcgtccacccaaggtggggggcaggggccctcactctccggccctggtgtgggggagagagtgaggggttgggggatcggcagttgggaggggcgctctgagattaaagagttttacctctg

SEQ ID NO: 839 - DNA, 1828 bp, Homo sapiens
aaaggcaaggaaggattggtatatgattgcctgtaataaataaattgcgtgattattggagtacattggggtaaaagtaaagaacagaggagtattgaggagcttgaaagggaacattcaaactaaagccaagcctgaagataacttgaatcagttgtaaaagtgtgttggcaatgtccgaaattgaatgaaaaacatctggcttataagaaatgttaaagaactaccatcttaagtaaaattggtgtttttgttatttttaaggtgaatgccaatgcaaaaggtatgtttttctacttcacattggttttcttttcctgtttacatctgcacttgttttttgctgagagccagaggaaaagataattagactttgtctcttccacccatgaaatcccccagtacccagggcttcttctgaactactgccgatgtgatgtcactttgtatctggaaaatcactttggggtccatttactgttattttgttgcctacaaaaacagccaggtgaaagctaaatcttgtgtgagagtttgcagaggtttttctatacaataaagtagtatagcacactagccaaatccatccaaaaggaccttttttttaggaagtagacttgaattcacaaaacagtcttgacatgggtagctggtgaaaaaccctctggagagcaagtggagccagtccccattggctgacagtgccacctggagctggtctctggggtgttcggttgtttattcctgaggaagactagctgctgctgctgctgctgctgcaaactgtactgtacacatcatggctgctggacacgaaggaggaggtgagagaagtttcatgctaccgaaatagagggtgttggtaccactgcccctggcctgagagccagggtttaaacctgcctcagtagagtctagtttgaaatgacaccaaaattcctcagcccctactcagcaattggttttggtttccaaatgacttctgcatttgtaaagataacagagtggtggggtcaaagtttatcttgtgtttagatctcttcaagactgcttaagcaaaaacaaaaatcccttggaacctatcgtttgagcctgtaaagttgttttagcagttgtcataaatgcatatgttgtgaaatcagaacactgtcgagtttatactcatttagctgcaatgtgggacaatgaaaaatgctttacaggcctggagtatcattacttatggtatctcctgctttaaaatctcaagcgatatctatctggttaaattccattttaggagattgagatgcagaacgttaatgttcattacctcctcctaccccaagagaaatggattcagacatgtcttgtctcaacaagaaattgatttttttttaaactatctcattctgttgccaaatatcacagaagtaatgaggagtttagttacatttggctgttgtgctctgaaagagccaggtttggaatttgtgggggtgatctaggaagaaggttccaaagaagcagaggcatttgtcaagttacctaccctatatccagcatcctcctcatgagcttcagtagctgctctttgcccacgcctgtatcctacgtttgctatttgggcaaaccattacttcagttatttaacttccctttttttttaacttcacctttgactatgaacaagtaacggtaacattccttttgtgtattcaataatgcagttagtttacctttttcagaatattttgaacaaagatctttgtctctttctgctggaatgcgcacacagtgaacgtttgttagaactacacacaataaagacactgttttccttttcttg

SEQ ID NO: 840 - DNA, 2124 bp, Homo sapiens
gagcatgcgcctgggacttgcaatgatgaaacagggccattggcaaagctggggtaccagtcacccagccacgctctagggtggtagccaagaagacggaccccgagtgggaggcagagagacaagaggtggatgaagcagagcaagcgtgagcatggtgaagagaagacggagccccgcgctgggagaggaacgcttcagtccgagttccattctgcacccaaggctccccttggtcctcctgggaaccagggtgccccttagtggtggtggcccaggagaacccgaccaaggcaggagcgccccctcctggaagagcctcgcttcaacgcatcatcattcccggccggcagcaggggcgacgccagcaaggcctgcgactcagagccagcttggcccgttcgccccgccccttcccggtgtccgccccgcccctttcccggtgtccgccccgcctccttcccggtgtccgccccgcccccttccctgtgtccgccccgcccccttccctgtgtccgccctgcccgcttcactgtggtcctgcctctgggtggtgccggggcggggggtgggagcccggggcccgcgcaggcggagatgtcgcccaatgggaagggtcggtcgggaagggggtgggcgcaggcgggtgggcgggaagaacgctggaggttgattggcggtcttgccggccagtgaagccagggcatgggcggggcgcggctcggagcgcgaaacatggcggggcaggacgctggctgcggccgtggcggcgacgactactcagaggacgagggcgacagcagcgtgtccagggcggctgtggaggtgttcgggaagctgaaggacctaaactgccccttcctcgagggtctgtatatcacagagccaaagacaattcaggaactgctgtgcagcccctcagagtaccgcttggagatcctagagtggatgtgtacccgaaatgacgaagctgggccacgagctgatgctgtgtgcgccagatgaccaggagctcctcaagcccttgtggcccgagagtttctcccgaggtccctcatctaccctgcgagatttattcacgtgaccaatggcctatgacacagccccaggaggtcctgagaacatgtgcacaagggctgtgcctgcgcccagaagcagctacacttcatggaccagttgctcgataccatccggagcctgaccattgggtgctccagttgctcgagcctgatggagcacttcgaggacaccagggagaagaacgaggccttgctgggggagctcttctctagcccccacctgcagatgctcctgaatccagagtgcgacccgtggcccctggacatgcagcccctcctcaacaagcagagtgatgactggcagtgggccagtgcctctgccaagtccgaggaggaggagaagctggcggagcttgccaggcagctgcaggagagtgctgccaagttgcacgcgcttagaacggagtctacgacgacgagctgggcgagtgctgccagcgcccaggccctgacctccacccgtgcggccccatcatccaggccacgcaccagaatctgacttcctacagccaaatccccagaggccaacctaaaaagccggctttagttacgatgactacagttcccacgtgcgcaactctgcccttggctcaaggattccgtgatgttcattttggttttctaagcgagaggctccgagccttccaacctctgactggctggtcctgtgagacccctcgatcagggatgctgctgcaagtggtcatggcagttgctgacacctctgcgaaggccgtggagaccgtgaagaagcagcaaggcgagcagatctgctggggtggcagcagctccgtcatgagtctagctaccaagatgaatgaactaatggagaaatagaaagtcttcagtgatggcctacgccaaagcacaggatggggcgggcaggaagccctctcccaagatcgagttggccgaggatggatgattgtggcagcagaagccgttgcagccccacgttgtgctctaggcagggacctttggcccctttggggagggagagacagacgggcggtttgacttggacacaaagaaagccttggtttct

SEQ ID NO: 841 - DNA, 2253 bp, Homo sapiens
gaaaaatagaaacaaagttggtcacaaatcacattagctttgcccgaagtttttccccacactcttctttagcatgctattatggggaaagtgaccactcctgggagcgggggtggtcggggcggtttggtggcggggaagcggctgtaacttctacgtgaccatggtacctgttgaaaacaccgagggccccagtctgctgaaccagaaagggacagccgtggagacggagggcagcggcagccggcatcctccctgggcgagaggctgcggcatgtttaccttcctgtcatctgtcactgctgctgtcagtggcctcctggtgggttatgaacttgggatcatctctggggctcttcttcagatcaaaaccttattagccctgagctgccatgagcaggaaatggttgtgagctccctcgtcattggagccctccttgcctcactcaccggaggggtcctgatagacagatatggaagaaggacagcaatcatcttgtcatcctgcctgcttggactcggaagcttagtcttgatcctcagtttatcctacacggttcttatagtgggacgcattgccataggggtctccatctccctctcttccattgccacttgtgtttacatcgcagagattgctcctcaacacagaagaggccttcttgtgtcactgaatgagctgatgattgtcatcggcattctttctgcctatatttcaaattacgcatttgccaatgttttccatggctggaagtacatgtttggtcttgtgattcccttgggagttttgcaagcaattgcaatgtattttcttcctccaagccctcggtttctggtgatgaaaggacaagagggagctgctagcaaggttcttggaaggttaagagcactctcagatacaactgaggaactcactgtgatcaaatcctccctgaaagatgaatatcagtacagtttttgggatctgtttcgttcaaaagacaacatgcggacccgaataatgataggactaacactagtattttttgtacaaatcactggccaaccaaacatattgttctatgcatcaactgttttgaagtcagttggatttcaaagcaatgaggcagctagcctcgcctccactggggttggagtcgtcaaggtcattagcaccatccctgccactcttcttgtagaccatgtcggcagcaaaacattcctctgcattggctcctctgtgatggcagcttcgttggtgaccatgggcatcgtaaatctcaacatccacatgaacttcacccatatctgcagaagccacaattctatcaaccagtccttggatgagtctgtgatttatggaccaggaaacctgtcaaccaacaacaatactctcagagaccacttcaaagggatttcttcccatagcagaagctcactcatgcccctgagaaatgatgtggataagagaggggagacgacctcagcatccttgctaaatgctggattaagccacactgaataccagatagtcacagaccctggggacgtcccagcttttttgaaatggctgtccttagccagcttgcttgtttatgttgctgctttttcaattggtctaggaccaatgccctggctggtgctcagcgagatctttcctggtgggatcagaggacgagccatggctttaacttctagcatgaactggggcatcaatctcctcatctcgctgacatttttgactgtaactgatcttattggcctgccatgggtgtgctttatatatacaatcatgagtctagcatccctgctttttgttgttatgtttatacctgagacaaagggatgctctttggaacaaatatcaatggagctagcaaaagtgaactatgtgaaaaacaacatttgttttatgagtcatcaccaagaagaattagtgccaaaacagcctcaaaaaagaaaaccccaggagcagctcttggagtgtaacaagctgtgtggtaggggccaatccaggcagctttctccagagacctaatggcctcaacaccttctgaacgtggatagtgccagaacacttaggagggtgtctttggaccaatgcatagttgcgactcctgtgctctcttttcagtgtcatggaactggttttgaagagacactctgaaatgataaagacagcctttaatccccctcctccccagaaggaacctcaaaaggtagatgaggtacaaggtcctaagtgatctctttttctgagcaggatatcaggtt

SEQ ID NO: 842 - DNA, 2924 bp, Homo sapiens
attcccccggtgtagcccccccccttcactttccttctcgtcctctgtgtttctcctctcttctttcttcccttccccctctagcattgctaccttctctcctacacgcacgcaggcatataaacgtaggtttttgatgctcctctgcctgttgaccccgctattttcatgtttccaacaggtttttcttcccccagtccctcagctgctgctgctgctcaggaggtcagatctgccactgatggtaataccagcaccactccgcccacctctgccaagaagagaaagttaaacagcagcagcagtagcagcagtaacaggagtaacgagagagaagactttgattccacctcttcctcctcttccactcctcctttacaacccagggattcggcatccccttcaacctcgtccttctgcctgggggtttcagtggctgcttccagccacgtaccgatacagaagaagctgcgttttgaagacaccctggagtttgtagggtttgatgcgaagatggctgaggaatcctcctcctccccctcctcatcttcaccaactgctgcaacatctcagcagcagcaacttaaaaataagagtatattaatctcttctgtggcttcggtgcatcatgcaaacggcctagccaaatcttctaccaccgtctctagctttgctaacagcaaacctggctctgctaagaagttagtgatcaagaactttaaagataagcctaaattaccagaaaactacacagatgaaacctggcaaaaactgaaagaagcagtggaagctattcagaatagtacttcaattaagtacaatttagaagaactctaccaggctgtagaaaatctctgttcttacaagatttctgcaaacttgtacaaacagctgagacagatctgcggagatcacatcaaagcacagattcatcaattcagagaggattcattggatagcgttctttttttaaagaagattgatagatgctggcaaaaccattgcagacaaatgatcatgatcaggagcatttttttgtttctggatagaacttacgttcttcagaattcaatgctaccctccatttgggacatgggactggagttatttagggctcatattataagtgatcagaaagtgcagaataagacaattgatggcattcttctcttgattgagagggaaaggaatggtgaagcaattgatagaagtttacttcgaagccttttaagcatgctgtctgatttgcaaatttatcaagattcttttgaacaacgatttttggaagaaactaaccggctctatgcagctgaaggccaaaaattaatgcaagaaagagaggttcctgaatatctacatcatgttaacaaacgtctagaagaagaagcagacagacttattacttacttagatcagaccacccagaagtcattaattgctactgtagaaaaacaacttctaggtgaacacttaacagcaattcttcagaaaggtttaaataacctccttgatgaaaaccgaattcaagatttgtctcttctgtatcagctcttcagtagagttcgaggtggagttcaggttcttttgcagcagtggatcgaatatatcaaggcatttggcagcactattgtaattaatcctgaaaaagataaaaccatggttcaagaattgctggattttaaagataaggttgaccatataattgatatctgctttctgaagaatgagaaatttatcaatgccatgaaagaagcatttgaaacgttcattaacaaaagaccaaataaaccagctgaacttatagctaagtatgtagattcaaaacttcgtgcaggcaacaaagaagctacagatgaagaacttgagaaaatgttggataaaattatgatcatatttagatttatctatggcaaggatgtttttgaggccttctataagaaagatttagccaagcgcctgttagtcggaaagagtgcatctgtagatgctgaaaaatcaatgctgtccaaacttaaacatgaatgcggagctgctttcaccagcaaacttgaaggaatgtttaaagacatggaactttctaaagacatcatgattcagttcaaacagtatatgcagaatcagaatgttccgggaaatattgagttaactgtgaatatcctgacaatgggctattggccgacatatgtgcctatggaagttcatttaccaccagagatggtaaaacttcaggagattttcaagacattttacctaggcaaacatagtggcaggaaacttcagtggcagtcaaccctaggacactgtgtgttaaaagcagaatttaaagagggtaaaaaggaactccaggtctctctttttcaaacactggtgctgctaatgtttaatgagggagaggagttcagtttagaagagatcaagcaggcaactggaatagaggatggagagttaaggagaacactgcagtcattagcctgtggcaaagctagagttctggcgaaaaatccaaagggcaaagacattgaagatggtgacaagttcatttgtaatgatgatttcaaacataaacttttcaggataaagatcaatcaaatccagatgaaagaaacggttgaagaacaagcaagcactacagaaagagtatttcaagacagacagtatcaaattgatgctgcaattgttcgaattatgaagatgagaaagacacttagccacaatctccttgtttcagaagtgtacaaccagttgaaatttccagtaaagcctgctgatcttaagaagagaatagaatctttaattgaccgggactacatggaaagagataaagaaaatccaaaccagtacaactatattgcatagaatgttggccttgcagcatttggtgtcatatgcagtagccagtggataaactaacctgttgattcaat

SEQ ID NO: 843 - DNA, 2543 bp, Homo sapiens
cagtttgtctggcctgcgcttgcgcgggtctccgccgcctgggctcctagggactgtggcctcggcgggagcaagctcggctgaaggcccacgtcgtagaccgggacaccgaggcgtggcagcgagaccccgccttctcgggtcttcagagggtcgggggcgttgacgtgtccttcgtgaaaggggacagtgtccgcgcttgtgcttccctggtggtgctcagcttccctgagctcgaggctttggggtggcctgccaccttggcgtccttacagacctgccgtgtgttggggtggccaagaaacttctgcaggtggatgggctggagaacaacgccctgcacaaggagaagatccgactcctgcagactcgaggagactcattccctctgctgggagactctgggactgtcctgggaatggccctgaggagccacgaccgcagcaccaggcccctctacatctccgtgggccacaggatgagcctggaggccgctgtgcgcctgacttgctgctgctgcaggttccggatcccagagcccgtgcgccagcactttgttgaacgtggtggtgagagcacacgtcctcgtctcattcctgatcgaacgcggtggtgagagcacacgtcctcgtctcgttcctgatcgaacgcggtggtgagagcacacgtcctcgtctcgttcctgatcgaacgcggtggtgagagcacacgtcctcgtctcgttcctgatcgaacgcggtggtgagagcacacgtcctcgtctcgttcctgatcgaacgtggtggtgagagcacacgtccttgtcttgttcctgatcttaagggaacgtttgcagtctttcaccactagatgtgatgtgagctgttagattttcaaggatgctcttcatccagctgaagacggtcccttctagtcctaatttgttaagtgtttttatccttaaagggtactggattttgtcaaatgcttttctggcctctattgaaaagatcctgtgttcttctgttaatatgaggtgttacattgattgattttcatatgttgagccagtttccatttgtggaatacatctaactcggtcatggtgtataatccatttactctgctgctgaatgtgatttgcttgtattttggtgcggatttttacatctgtatttataagggatattggtctggtgttttcttatgatgtcttcctttggttttgatatcaggataatattagcctcatagattgggttaggaaatgttctctcctccgttttttttggaagagagagattggtgttaattcttgctagaacctttggtagaatttgccagtaagcctatctggtcttgggtctttgggaggattttgattcgattcaatctatgtatttgttatagatcgttcggattgtccatccctgagtcagttgctagcttgtgtgtttcttggagtttttccgtttcgtccatgttatctcatctgttggcataccgtcgttcacgggattttattgatgtgtgtgaggtctctgagaacgtccctgccttcactcctgcttttagtcactggcatcttcttttaacttgggccatctggccgtgcatggttttgggagagtcctccttgactctgcagatgctgagcagtgatctggctgggaaaggggaccaggagtgcagggcacctgctgaggactcacctaagcccaagagtcagagagtcggagctccaaccacatctgcctgcatgcctttcccaggctctccccaggcggacagccagcaccccctccccaaagaccgggcagttcctgaccagcaccccaccaagtcctcagtaaggcctgtctttgggggagcagggtttcaggaggacagtgggggtggtgtagaactcatggctggcggttccgggcctctcaggaagctttgccactgggcttggggttaagtgggtgtggggctccgaaccctaaatgggtgagagttgaaatgaaagcggcacctgtagtccgtttggggtgcaggtgtgtgccaggggtcttcagccccggctgatggccacatgaaccacatgaggagaggcagggcgtgtcagcagcaaacctaagtgtgtgctcatttctgtgggcccttactctgtgacactgcagctctccagagagacgctttgaaaacaaaacaggaaagaacacacggccccgcgtctgttgcctgagtcactgtattccttaaaaggtgaaggaccctggtccttggcttttcgtgcacatgagaaaatgttggccaaggttagcgattatgcttctgtaatctgtaaccagaagtgctcttatgcccaaaccttgatgtgattctgctgtaatgtaacttcggagccagctggatggatgtgactgtgcaggtcctgagccccggcccccgtaaccaagcagtgggccgagacactgagccgggcagtcaaacaggagctctctaaggctgctcccgggctgggacctgggtctaggattctcagtaagacctttgaataaaactaacttgaattcttc

SEQ ID NO: 844 - DNA, 2704 bp, Homo sapiens
atttctccccgagatggcgggtctgacggcggcggccccgcggcccggagtcctcctgctcctgctgtccatcctccacccctctcggcctggaggggtccctggggccattcctggtggagttcctggaggagtcttttatccaggggctggtctcggagcccttggaggaggagcgctggggcctggaggcaaacctcttaagccagttcccggagggcttgcgggtgctggccttggggcaggtgtaggtggagcttttgctggaatcccaggagttggaccctttgggggaccgcaacctggggtcccactggggtatcccatcaaggcccccaagctgcctggctatgggcccggaggagtggctggtgcagcgggcaaggctggttacccaacagggacaggggttggcccccaggcagcagcagcagcggcagctaaagcagcagcaaagttcggtgctggagcagccggagtcctccctggtgttggaggggctggtgttcctggcgtgcctggggcaattcctggaattggaggcatcgcaggcgttgggactccagctgcagctgcagctgcagcagcagccgctaaggcagccaagtatggagctgctgcaggcttagtgcctggtgggccaggctttggcccgggagtagttggtgtcccaggagctggcgttccaggtgttggtgtcccaggagctgggattccagttgtcccaggtgctgggatcccaggtgctgcggttccaggggttgtgtcaccagaagcagctgctaaggcagctgcaaaggcagccaaatacggggccaggcccggagtcggagttggaggcattcctacttacggggttggagctgggggctttcccggctttggtgtcggagtcggaggtatccctggagtcgcaggtgtccctagtgtcggaggtgttcccggagtcggaggtgtcccgggagttggcatttcccccgaagctcaggcagcagctgccgccaaggctgccaagtacgggttagttcctggtgtcggcgtggctcctggagttggcgtggctcctggtgtcggtgtggctcctggagttggcttggctcctggagttggcgtggctcctggagttggtgtggctcctggcgttggcgtggctcccggcattggccctggtggaattgcagctgcagcaaaatccgctgccaaggtggctgccaaagcccagctccgagctgcagctgggcttggtgctggcatccctggacttggagttggtgtcggcgtccctggacttggagttggtgctggtgttcctggacttggagttggtgctggtgttcctggcttcggggcagtacctggagccctggctgccgctaaagcagccaaatatggagcagcagtgcctggggtccttggagggctcggggctctcggtggagtaggcatcccaggcggtgtggtgggagccggacccgccgccgccgctgccgcagccaaagctgctgccaaagccgcccagtttggcctagtgggagccgctgggctcggaggactcggagtcggagggcttggagttccaggtgttgggggccttggaggtatacctccagctgcagccgctaaagcagctaaatacggagtggcagcaagacctggcttcggattgtctcccattttcccaggtggggcctgcctggggaaagcttgtggccggaagagaaaatgagcttcctaggacccctgactcacgacctcatcaacgttggtgctactgcttggtggagaatgtaaaccctttgtaaccccatcccatgcccctccgactccccaccccaggagggaacgggcaggccgggcggccttgcagatccacagggcaaggaaacaagaggggagcggccaagtgccccgaccaggaggccccctacttcagaggcaagggccatgtggtcctggccccccaccccatcccttcccacctaggagctccccctccacacagcctccatctccaggggaacttggtgctacacgctggtgctcttatcttcctggggggagggaggagggaagggtggcccctcggggaaccccctacctggggctcctctaaagatggtgcagacacttcctgggcagtcccagctccccctgcccaccaggacccaccgttggctgccatccagttggtacccaagcacctgaagcctcaaagctggattcgctcatagcatccctcctctcctgggtccacttggccgtctcctccccaccgatcgctgttccccacatctggggcgcttttgggttggaaaaccaccccacactgggaatagccaccttgcccttgtagaatccatccgcccatccgtccattcatccatccgtccgtccatccatgtccccagttgaccgcccggcaccactagctggctgggtgcacccaccatcaacctggttgacctgtcatggccgcctgtgccctgcctccacccccatcctacactcccccagggcgtgcggggctgtgcagactggggtgccaggcatctcctccccacccggggtgtccccacatgcagtactgtataccccccatccctccctcggtccactgaacttcagagcagttcccattcctgccccgcccatctttttgtgtctcgctgtgatagatcaataaatattttattttttgtcctgg

SEQ ID NO: 845 - DNA, 2239 bp, Homo sapiens
ctcacaactctaaggagccctccaaagttccagtctccaggtgctgttactcaactcagtcctaggaacgtcgggtcctgggaaggagcccaagcgctcccagccagcttccaggcgctaagaaaccccggtgcttcccatcatggtggccgatcctcctcgagactccaaggggctcgcagcggcggagcccaccgccaacgggggcctggcgctggcctccatcgaggaccaaggcgcggcagcaggcggctactgcggttcccgggaccaggtgcgccgctgccttcgagccaacctgcttgtgctgctgacagtggtggtgtgcagcttgatcggcggcgccgccagcctggaccccggcgcgctcggccgtctgggcgcctgggcgctgctctttttcctggtcaccacgctgctggcgtcggcgctcggagtgggcttggcgctggctctgcagccgggcgccgcctccgccgccatcaacgcctccgtgggagccgcgggcagtgccgaaaatgcccccagcaaggaggtgctcgattcgttcctggatcttgcgagaaatatcttcccttccaacctggtgtcagcagcctttcgctcatactctaccacctatgaagagaggaatatcaccggaaccagggtgaaggtgcccgtggggcaggaggtggaggggatgaacatcctgggcttggtagtgtttgccatcgtctttggtgtggcgctgcggaagctggggcctgaaggggagctgcttatccgcttcttcaactccttcaatgaggccaccatggttctggtctcctggatcatgtggtacgcccctgtgggcatcatgttcctggtggctggcaagatcgtggagatggaggatgtgggtttactctttgcccgccttggcaagtacattctgtgctgcctgctgggtcacgccatccatgggctcctggtactgcccctcatctacttcctcttcacccgcaaaaacccctaccgcttcctgtggggcatcgtgacgccgctggccactgcctttgggacctcttccagttccgccacgctgccgctgatgatgaagtgcgtggaggagaataatggcgtggccaagcacatcagccgtttcatcctgcccatcggcgccaccgtcaacatggacggtgccgcgctcttccagtgcgtggccgcagtgttcattgcacagctcagccagcagtccttggacttcgtaaagatcatcaccatcctggtcacggccacagcgtccagcgtgggggcagcgggcatccctgctggaggtgtcctcactctggccatcatcctcgaagcagtcaacctcccggtcgaccatatctccttgatcctggctgtggactggctagtcgaccggtcctgtaccgtcctcaatgtagaaggtgacgctctgggggcaggactcctccaaaattacgtggaccgtacggagtcgagaagcacagagcctgagttgatacaagtgaagagtgagctgcccctggatccgctgccagtccccactgaggaaggaaaccccctcctcaaacactatcgggggcccgcaggggatgccacggtcgcctctgagaaggaatcagtcatgtaaaccccgggagggaccttccctgccctgctgggggtgctctttggacactggattatgaggaatggataaatggatgagctagggctctgggggtctgcctgcacactctggggagccaggggccccagcaccctccaggacaggagatctgggatgcctggctgctggagtacatgtgttcacaagggttactcctcaaaacccccagttctcactcatgtccccaactcaaggctagaaaacagcaagatggagaaataatgttctgctgcgtccccaccgtgacctgcctggcctcccctgtctcagggagcaggtcacaggtcaccatggggaattctagcccccactggggggatgttacaacaccatgctggttattttggcggctgtagttgtggggggatgtgtgtgtgcacgtgtgtgtgtgtgtgtgtgtgtgtgtgttctgtgacctcctgtccccatggtacgtcccaccctgtccccagatcccctattccctccacaataacagaaacactcccagggactctggggagaggctgaggacaaatacctgctgtcactccagaggacattttttttagcaataaaattgagtgtcaactattt

SEQ ID NO: 846 - DNA, 2181 bp, Homo sapiens
agtgcagcccgaagccccgcagtccccgagcacgcgtggccatgcgtcccctgcgcccccgcgccgcgctgctggcgctcctggcctcgctcctggccgcgcccccggtggccccggccgaggccccgcacctggtgcatgtggacgcggcccgcgcgctgtggcccctgcggcgcttctggaggagcacaggcttctgggggtccactggacggggcctgagctacaacttcacccacctggacgggtacttggaccttctcagggagaaccagctcctcccagggtttgagctgatgggcagcgcctcgggccacttcactgactttgaggacaagcagcaggtgtttgagtggaaggacttggtctccagcctggccaggagatacatcggtaggtacggactggcgcatgtttccaagtggaacttcgagacgtggaatgagccagaccaccacgactttgacaacgtctccatgaccatgcaaggcttcctgaactactacgatgcctgctcggagggtctgcgcgccgccagccccgccctgcggctgggaggccccggcgactccttccacaccccaccgcgatccccgctgagctggggcctcctgcgccactgccacgacggtaccaacttcttcactggggaggcgggcgtgcggctggactacatctccctccacaggaaggtgcgccctgcccctccgtccgccccggtgttctgcgccctcagccgctgtgccccgggccgcgctgaccctggtggtgctgaggcggccccgcccgcagggtgcgcgcagctccatctccatcctggagcaggagaaggtcgtcgcgcagcagatccggcagctcttccccaagttcgcggacacccccatttacaacgacgaggcggacccgctggtgggctggtccctgccacagccgtggagggcggacgcgacctacgcggccatggtggtgaaggtgggccggcccaacgccctgcgcgccccccggccaccttcctcccgagacgggacaggcgagcggtggccgcgccacccggtcccagctgccctggacacccgcaggtcatcgcgcagcatcagaacctgctactggccaacaccacctccgccttcccctacgcgctcctgagcaacgacaatgccttcctgagctaccacccgcaccccttcgcgcagcgcacgctcaccgcgcgcttccaggtcaacaacacccgcccgccgcacgtgcagctgttgcgcaagccggtgctcacggccatggggctgctggcgctgctggatgaggagcagctctgggccgaagtgtcgcaggccgggaccgtcctggacagcaaccacacggtgggcgtcctggccagcgcccaccgcccccagggcccggccgacgcctggcgcgccgcggtgctgatctacgcgagcgacgacacccgcgcccaccccaaccgcagcgtcgcggtgaccctgcggctgcgcggggtgccccccggcccgggcctggtctacgtcacgcgctacctggacaacgggctctgcagccccgacggcgagtggcggcgcctgggccggcccgtcttccccacggcagagcagttccggcgcatgcgcgcggctgaggacccggtggccgcggcgccccgccccttacccgccggcggccgcctgaccctgcgccccgcgctgcggctgccgtcgcttttgctggtgcacgtgtgtgcgcgccccgagaagccgcccgggcaggtcacgcggctccgcgccctgcccctgacccaagggcagctggttctggtctggtcggatgaacacgtgggctccaagtgcctgtggacatacgagatccagttctctcaggacggtaaggcgtacaccccggtcagcaggaagccatcgaccttcaacctctttgtgttcagcccagacacaggtgctgtctctggctcctaccgagttcgagccctggactactgggcccgaccaggccccttctcggaccctgtgccgtacctggaggtccctgtgccaagagggcccccatccccgggcaatccatgagcctgtgctgagccccagtgggttgcacctccaccggcagtcagcgagctggggctgcactgtgcccatgctgccctcccatcaccccctttgcaatatatttttatatttt

SEQ ID NO: 847 - DNA, 2600 bp, Homo sapiens
acgagaattttttacttttgagggaaaaaaaattgtcttatgtattgcatgtgctgtactttaaaaaaaaaaaatctgttctccctaggttctaagactttttcagtaatataaaaatagcagtgtgaattccttcccccaacattatggctttatcagtaaaaagaaatactggtatttcattgtagcactttctaaaattcagtactaagtgaatcctctaatccagagatttggttatctaggcaccaaaagaaacatgatttaaagtggttatagaaataggtcacatgtactagtgacagatttagtaatgaacttgttaatgcaaaatcagaataccctcttaatccctcctatacaccctccctccctaatcaaaataataattaggttttctttttttgctttttatatcaatagtgtcatcaataatatttttgtcacagcttggtggcagggatgaggtggagggatccctccctaattctgaatggtcctgcagtctgggaaatttcagctgttaggttcaatgtcctgggcagtgtttcctccaaatgatgatgtgaggattccactgtgtatattttaaagactacccaatcagggccccatgcattcctcatcttttagatttgtgaacatctggcctgctctcttctttgcccccaggtcggttgtacgccgtgcagcaagtcttttaagtaaagtagtggacagcctggccccatccattactaatgttttagtgcagggcaaacaggtaactctgggtgcctttgggcatgaagaagaagttatctctaatcctttgtctccaagagtgattcaaaacatcatctattataagtgtaacacccatgatgagagggaagcggtcattcagcaagaactggtcatccatattggctggatcatctccaataaccctgagttattcagtggcatgctgaaaatacgaatcgggtggatcatccatgccatggagtatgaacttcagatccgtggcggagacaagccagccttggacttgtatcagctgtcacctagtgaagttaaacagcttctgctggatattctgcagcctcaacagaatggaagatgttggctgaacaggcgtcagatcgatgggtctttgaatagaactcccaccgggttctatgaccgagtgtggcagattctggagcgcacgcccaatgggatcattgttgctgggaagcatttgcctcagcaaccaaccctgtcagatatgaccatgtatgagatgaatttctctctccttgttgaagacacgttgggaaatattgaccagccacagtacagacagatcgttgtagagttacttatggttgtatccattgtactggaaagaaaccccgagctagaatttcaagacaaagtagatctagacagactggtcaaagaagcatttaatgaatttcaaaaagatcagagtcggctaaaggaaattgaaaaacaagatgacatgacttccttttacaacactcctcccctgggaaaaagaggaacatgcagctatttgacaaaggcggtgatgaatctgctgctggaaggagaagtcaagccaaacaatgatgacccgtgtctgattagctagtggggaaggtgtaggaagctctgttgagacacatgttctgaagtgtgttgtgtttcatgttcaagcttaatcaaggcagccattaatatacgaactgagcatgctggggaggtgaatgccacatccttggcggggttatggacctcttgcatgtcatagccaatctaacggtaatggtaaatgcttttaatcaagcaggaaaaagttctcatgattatgccaactataatagtaatcctcactgagtgataaaaatagtttatgaattgaaaatttgccgctgcatgttgtatgatcaaatagttcatcaaaatgaatctttgctctttggactgaattcttaccatactgccattaaaataaatttgccaactagtaatgcatactggaaatcaaaagatactgaaagaatggtgaacttctcttagtggtattgtcatgctaaaagatgttaatatacatcataaaagcaaagtcagccagctgatattttggttctcaaaaactgcattattaataatattttagtatacagagctattctacagtttttacattgtaaacatgactgtggttttgtatttgctaaatataggggttggactaaaatataataaatctgtaccttatcaaacattttctttgagctcctgctaaaaataggacatgtctatgattgttcaaaaatatgttaaatttaggctcagcacagtagctcacacctgaaatcttagcacttcgggaggctgaggcaggtggatcacttgaggttaggagttcaagaccagcccagccaacatggtgaaaaccctgtctctactaaaaatacaaaaattagccaggcatgatggtgcatgcctttaaacccagctactgaggaggctgaggcatgagaattgcttgaaccaggagacggaggttgcagtgagctgaaatcctgccactgcacaccagcctgggtgacagagcgagactccatctc

SEQ ID NO: 848 - DNA, 2757 bp, Homo sapiens
gtttcaggaccgttggcaccgggctaacggttccaccacgtccgccgccctggacgcccgcggcctgcccctccctgcctctcctgcgccggacctggggacacgggtgactcagacgtgactcaggaaggctcaggtcctgctggcatccgcagaggtgagacggtgatcagagctgggatgggagactccccaggcagaggggcacccgagaggaggcacaaggcccagcctggccgggctaggaagtatgaatggagaccagaaggccccaccagcatgggcagcctcggccagagagaagatctccaagatgaggacaggaactcagcattcacctggaaggtccaggccaacaaccgtgcctacaacgggcagttcaaggagaaggtgatcctgtgctggcaaaggaagaaatacaagaccaatgtcatccgcacggccaagtacaacttctactcgttcctgccgctgaacctgtacgagcagttccaccgcgtgtccaacctgttcttcctcatcatcatcatcctgcagagcattcccgacatctccacgctgccctggttctcgctcagtacccctatggtctgcctcctcttcatccgtgccacccgggacctggtggacgacatggggagacacaagagtgacagagccatcaacaacagaccctgccagattctgatggggaagagcttcaagcagaagaaatggcaggatctgtgcgtgggggatgtggtctgtctccgcaaggacaacatcgtcccagccgacatgctcttgctggccagcacggagcccagcagcctgtgctatgtggagacggtggacattgacggggagaccaacttgaagttcagacaggccctgatggtcacccacaaagaactggccactataaagaagatggcgtcctttcaaggcacagtgacgtgtgaggcgcctaacagtcggatgcaccacttcgtggggtgcctggaatggaatgacaagaaatactccctggacattggcaacctcctcctccgaggctgcaggattcgcaacacagacacctgctatggactggtcatttatgctggttttgacacaaaaattatgaagaactgtggcaagatccatttgaagagaaccaagctggacctcctgatgaacaagctggtggttgtgatcttcatctccgtggtgcttgtctgcctggtgttggccttcggcttcggtttctcagtcaaagaattcaaagaccaccactactacctctcgggggtgcatgggagcagcgtggccgcagagtccttcttcgtcttctggagcttcctcatcctgctcagcgtcaccatcccgatgtccatgttcatcctgtccgagttcatctacctggggaacagcgtcttcatcgactgggacgtgcagatgtactacaagccgcaggacgtgcctgccaaggcccgcagcaccagcctcaacgaccacctgggccaggtggaatacatcttctcggacaagacgggcacgctcacgcagaacatcttgaccttcaacaagtgctgcatcagcggccgcgtctatggtgcggccccgacacctgagctcccagctgggtcctcgatcttcaaggggctcagggtgcctgagaaccagagccacgtctggccccatgcccagcacctccgcccgaatctgaaccagggaaccgtagccagatggcctggtttcctttggagggggccaggaaaattttttttttttttgaggcagagtctcactctgtctacccaggcaggagtgcagtggtgcaatcttggctcactgcaatctccacctcccgggttcaggcgattctcctggctcagcctcccgagtggctgggattacaggcacctgccaccacacctaatttttttgtatttttagcagagatggggtttcaccatgttggccatgctggtctcgaactcctggcctccggcgatccacctgcctcggcctcccaaagtgctgggattacaggcgtgagccaccacgcccggccgacttttttttttttttctctctgagacggagttttgctctcgttgcccaggctggagtgcagtggtgcgatctctgctcactgaaacctccgcctcctgggttgattctcccgcctcagcctcccaagtagctgggattacagttgcgtgccaccccgcctggctaatttttgtattttttttttcagtagagatggggtttcaccctgtttcccaggctggtctcgaactcctgacttcaggtgatctgcctgcctcagcctccaaaatattggcattgcaggcatgagccaccatacctagccaaacttttaaacagtgtgtatttatttattttttgagatggggtcttgctctgccgcccaggctggaatgcagtggtgcaatcatagcttattgcagcctcgaattcctgggctcaagcaatcctcccacttcagcttcccaagtagccgggactacaggagagtgccaccttacccagcttatttttgtattttttgtcaagacagggaatccctatgttgcccaggctggtcttgaactcctgggcttaagcgatccgcctgcctccgcttttcaaagcactggaattacagatgtgagccaccacacccggccactgctcttcttttgactttcacaagcctttatttgtggatgctgaaattcgaattgctgagtatttctcagatcacaaaataaaatagttttgtttgtt

SEQ ID NO: 849 - DNA, 2765 bp, Homo sapiens
agtcacgatgatggcggccaccatcctgtggtgagctagcggattccctgcttgtctcgccgaccccctcgcgccttctgcagactccgtggctggcgctcggcgcgtgaggaagcacggcggcccgagttcgcggggaaggccgcagtcgcggaggcagcggcgcggtccggggcacgggctgggggagaggccgctccgctgggcgaatgtgacaagcccccacccccaccgccttcctccccagagcgcgaggagcgcgggcgcaggcccggcagccgagctgcgcggcggcaccatgcaggtcaccctgaagaccctccagcagcagaccttcaagatagacattgaccccgaggagacggtgaaagcactgaaagagaagattgaatctgaaaaggggaaagatgcctttccagtagcaggtcaaaaattaatttatgcaggcaaaatcctcaatgatgatactgctctcaaagaatataaaattgatgagaaaaactttgtggtggttatggtgaccaaacccaaagcagtgtccacaccagcaccagctacaactcagcagtcagctcctgccagtactacagcagttacttcctccaccaccacaactgtggctcaggctccaacccctgtccctgccttggcccccacttccacacctgcatccatcactccagcatcagcgacagcatcttctgaacctgcacctgctagtgcagctaaacaagagaagcctgcagaaaagccagcagagacaccagtggctactagcccaacagcaactgacagtacatcgggtgattcttctcggtcaaacctttttgaagatgcaacgagtgcacttgtgacgggtcagtcttacgagaatatggtaactgagatcatgtcaatgggctatgaacgagagcaagtaattgcagccctgagagccagtttcaacaaccctgacagagcagtggagtatcttttaatgggaatccctggagatagagaaagtcaggctgtggttgacccccctcaagcagctagtactggggctcctcagtcttcagcagtggctgcagctgcagcaactacgacagcaacaactacaacaacaagttctggaggacatccccttgaatttttacggaatcagcctcagtttcaacagatgagacaaattattcagcagaatccttccttgcttccagcgttactacagcagataggtcgagagaatcctcaattacttcagcaaattagccaacaccaggagcattttattcagatgttaaatgaaccagttcaagaagctggtggtcaaggaggaggaggtggaggtggcagtggaggaattgcagaagctggaagtggtcatatgaactacattcaagtaacacctcaggaaaaagaagctatagaaaggttaaaggcattaggatttcctgaaggacttgtgatacaagcgtattttgcttgtgagaagaatgagaatttggctgccaattttcttctacagcagaactttgatgaagattgaaagggacttttttatatctcacacttcacaccagtgcattacactaacttgttcactggattgtctgggatgacttgggctcatatccacaatacttggtataaggtagtagattgttgggggtggggagggagggatctaggatacagggcagggataaatacagtgcatgtctgcttcaattagcagatgccgcaactccacacagtgtgtaaaatatatacaaccaaaaatcagcttttgcaggtctttatttcttctgtaaaacagtaggtaacttttcctaggtttcactctttttagtgtactagatccagaaacttagtgtaatgccctgctttatatttctttgacttaacattggtttcagaaagaatcttagctacctagaatttacagtctctgtttcatggcaacactggataatggctttgtgaaatttaaaaaatttttgtagcgactgtaaacagaaatgccaaattgatggttaattgttgctgcttcaaaaataagtataaaattaatatgtaaggaagcccattctttcatgttaaatacttggggtgggaggggagaaagggaaccttttcttaaaatgaaaataattactgctattttaaaatttcttgatcattgaatgtgagacccttctaacatgatttgagaagctgtacaagtataggcagagttattttcctgtttacatttttttttttgttttggggaaaaaattggtaggtgtctaattactgtttacttcattgttatattgcagtaaaagttttaaaacaaccattgcatgtttgcttttgatgtatccctttgtgaaattagcacttttggggccaatggagaaatgcagcattcactctccctgtcttttccccttccctcagcagaaacgtgtttatcagcaagtcgtgagtcaaactgctgccttttaaaaaacccacaaaatgctgattcagttcaaaattaatgcaaatgtttcaaaactgggtttctgatatttgtaaatgtgtttctttattagataagagtgtattaccattaaagtcattagtataatattgctttcaaaaagaaatggtagacaaaactataatccagcatcttttattgcattggaaagactggcaaagtcttttggatgggttgggagatgtggctggaaagtactttggaaaatatacaatcaagatatctcatggcatattaaaagaaaaatcttaatagc

SEQ ID NO: 850 - DNA, 2069 bp, Homo sapiens
ctctccttccccggccgcgcgtcctctcgccgctccgacgccagcagcgcccgcgtgccgctcgcccagtcccgggggagcccctgcaagtttcccgggccgcgcgccgcgctcgctcgcctcccagcccgcggcccgagccgccgccgcgcccgccatgccctcggccaaacaaaggggctccaagggcggccacggcgccgcgagcccctcggagaagggtgcccacccgtcgggcggcgcggatgacgtggcgaagaagccgccgccggccgctttctcgggctggtgcgtccaccacgtcctggaggaggtccagcaggtccggcgcagccaccaggacttctcccggcagagggaggagctgggccagggcttgcagggcgtcgagcagaaggtgcagtctttgcaagccacatttggaacttttgagtccatcttgagaagctcccaacataaacaagacctcacagagaaagctgtgaagcaaggggagagtgaggtcagccggatcagcgaagtgctgcagaaactccagaatgagattctcaaagacctctcggatgggatccatgtggtgaaggacgcccgggagcgggacttcacgtccctggagaacacggtggaggagcggctgacggagctcaccaaatccatcaacgacaacatcgccatcttcacagaagtccagaagaggagccagaaggagatcaatgacatgaaggcaaaggttgcctccctggaagaatctgaggggaacaagcaggatttgaaagccttaaaggaagctgtgaaggagatacagacctcagccaagtccagagagtgggacatggaggccctgagaagtacccttcagactatggagtctgacatctacaccgaggtccgcgagctggtgagcctcaagcaggagcagcaggctttcaaggaggcggccgacacggagcggctcgccctgcaggccctcacggagaagcttctcaggtctgaggagtccgtctcccgcctcccggaggagatccggagactggaggaagagctccgccagctgaagtccgattcccacgggccgaaggaggacggaggcttcagacactcggaagcctttgaggcactccagcaaaagagtcagggactggactccaggctccagcacgtggaggatggggtgctctccatgcaggtggcttctgcgcgccagaccgagagcctggagtccctcctgtccaagagccaggagcacgagcagcgcctggccgccctgcaggggcgcctggaaggcctcgggtcctcagaggcagaccaggatggcctggccagcacggtgaggagcctgggcgagacccagctggtgctctacggtgacgtggaggagctgaagaggagtgtgggcgagctccccagcaccgtggaatcactccagaaggtgcaggagcaggtgtacacgctgctcagtcaggaccaagcccaggccgcccgtctgcctcctcaggacttcctggacagactttcttctctagacaacctgaaagcctcagtcagccaagtggaggcggacttgaaaatgctcaggactgctgtggacagtttggttgcatactcggtcaaaatagaaaccaacgagaacaatctggaatcagccaagggtttactagatgacctgaggaatgatctggataggttgtttgtgaaagtggagaagattcacgaaaaggtctaaatgaattgcgtgtgcagggcgcggatttaaagtccaatttctcatgaccaaaaatgtgtggttttttcccatgtgtcccctaccccccaatttcttgtcccctcttaaagagcagttgtcaccacctgaacaccaaggcattgtattttcatgcccagttaacttatttacaatatttaagttctctgcttctgcatttggttggtttcctgaagcgcagcccctgtgaataacaggtggcttttcatggatgtctctagtcagagaaaaatgataaaggcctaaattgaggattaacagaagcagattaacctcagaaatcctgtctggctggcagatttcaagt

SEQ ID NO: 851 - DNA, 2068 bp, Homo sapiens
gcggtgctctgggtccgggagcgctgtccccagcatgaacgcggccggcggcgggagtgaatgactgcagctgcgacttccttcccgggccgcccgagcctccttccccaccgactttcttgttttgattaactccgtggactcctgactctttcttcgcccggaacatcaatatgtgtcatgtcattgtcacctgtcgctcgatgctctggaccttgctgagtattgtggtggcttttgccgagctcattgccttcatgagtgcagactggctgaccgggaaagcgaggagccgcggcggcgtggagccggcgggcccgggcgggggctccccggagccctaccaccccaccctgggcatctacgcccgctgcatccggaacccaggggtgcagcacttccagcgggacacgctgtgcgggccctacgccgagagcttcggcgagatcgccagcggcttctggcaggccacagctattttcctggctgtgggaatctttattctctgcatggtggccttggtgtccgtcttcaccatgtgtgtacagagcatcatgaagaaaagcatcttcaatgtctgtgggctgttgcaaggaattgcaggtctattccttatcctcggtttgatactctaccctgctggctggggttgccagaaggccatagactactgtggacattatgcatctgcctacaaacctggagactgctccttgggctgggccttttataccgccattgggggcacagtcctcactttcatctgtgctgtcttctctgcacaagcagaaattgcaacctctagtgacaaagtacaggaagaaattgaagaggggaaaaacctgatctgcctcctttagtttggaagagacaatgccattttctcccttgagtaatcttgtgaaacagtccacagtttcatcatttgagtcaagtggagaactaacctttacctaccaaagccacgttccacggcccgaggcttaaacaggaccaatgagaggccacatccagctacgcaaagttactggacatgcggtctgcagtgcacattataaggaatggaacatgaaaatagtatataatcctagacctggagttgccaagttctgtcagactccatctcccccaggttcaatgaaggataataatctaaatcattagggcagcagtttctctggtaacggaagagaccgtccgccagatctgcaggctgtttctgctccaacactgcttgcttgtgagcatctctgcctcagaatggggttttgggttggagttcttgttttcctctgttctttcaagttgtctccaacgaacagaaaactataaacttactggggacaggatgtgtgctaaagggcacagcaagacactgtcttttgcttagctgaccaaaggggtcagcagggatggcgtggagtcatgctgtggaacttattctaggctgaatcctagggtaaggtggatcaactgaactgtcactccagagattttagaaatttgagtaaagaaacaataaggacctatacaatcatatgagaacaaaaatatgaaatcttgctagtgaagacgtattttttcttcttcccagcagccaggctagcaccagttctggcccagtctcctcttcttctggagatcacatgtttttcttctaaggttaggattgtgctttgactgcgaaaggaaacctcactgtttcctccttccagggactgagggtctccaagctagctgtggcttatgcagatgttcactgggaggacctgccagaatctcggcacttggggggagacctttactcccagtttggtgaccatgctgtagtcagctctatttccaatcccgacagtagcagaatggcattctacaacaaaaagaagctagttatgggagttaagtttttatagttactggtgttgatcctgaaagcagactgagataacattaaattgctgcaactgaagaactgcagccaagaccttaattccaggaaagcacagaggacaaagttaattcaaaaagaggcgctagatcaaggtcacagcactgcctacacctgttt

SEQ ID NO: 852 - DNA, 2339 bp, Homo sapiens
agattcagtacctctcgccagactctcacctggatcccagactccttcttctccaggtgatcgggagagcgagtttggggcgagggtaggagggatggagagggcgtgggagacctaatatccactcccccggcccgtgacgcctgctcggtgtcccttccctgcagtcttctgagcggacgcatctcgacgctgaaagatgagaccggagcaatcttcatcgacagggaccctacagtcttcgcccccatcctcaacttcctgcgcaccaaagagttggaccccaggggtgtccacggttccagcctcctccatgaagcccagttctatgggctcactcctctggttcgtcgcctgcagcttcgagaggagttggatcgatcttcttgtggaaacgtcctcttcaatggttacctgccgccaccagtgttcccagtgaagcggcggaaccggcacagcctagtggggcctcagcagctaggaggacggccagcccctgtccgacggagcaacacgatgccccccaaccttggcaatgcagggctgctgggccgaatgctggatgagaaaacccctccctcaccctcaggacaacctgaggagccggggatggtgcgcctggtgtgtggacaccataattggatcgctgtggcctatacccagtttctagtctgctacaggttgaaggaagcctctggctggcagctggtgttttccagcccccgcctggactggcccatcgaacgactggcgctcacagcccgggtgcatggtggggctttgggtgaacatgacaagatggtggcagcagccaccggcagcgagatcctgctatgggctctgcaggcggaaggcggtggctccgagataggggtctttcatctgggggtgcctgtggaggccttgttcttcgtcgggaaccagctcattgctacaagccacacagggcgcatcggggtgtggaatgccgtcaccaagcactggcaggtccaggaggtgcagcccatcaccagttatgacgcggcaggctccttcctcctcctgggctgcaacaacggctccatttactacgtggatgtgcagaagttccccttgcgcatgaaagacaacgacctccttgtcagcgagctctatcgggacccagcggaggatggggtcaccgccctcagtgtctacctcacccccaagaccagtgacagtgggaactggatcgagatcgcctatggcaccagctcagggggcgtgcgggtcatcgtgcagcacccggagactgtgggctcggggcctcagctcttccagaccttcactgtgcaccgcagccctgtcaccaagatcatgctgtcggagaagcacctcatctcagtctgtgccgacaacaaccacgtgcggacatggtctgtgactcgcttccgcggcatgatttccacccagcccggctccaccccactcgcttcctttaagatcctggctctggagtcggcagatgggcatggcggctgcagtgctggcaatgacattggcccctacggtgagcgggacgaccagcaagtgttcatccagaaggtggtgcccagtgccagccagctcttcgtgcgtctctcatctactgggcagcgggtgtgctccgtgcgctccgtggacggctcacccacgacggccttcacagtgctggagtgcgagggctcccggcggctcggctctcggccccggcgctacctgctcactggccaggccaacggcagcttggccatgtgggacctaaccaccgccatggacggcctcggccaggcccctgcaggtggcctgacggagcaagagctgatggaacagctggaacactgtgagctggccccgccggctccttcagctccctcatggggctgtctccccagcccctcaccccgcatctccctcaccagcctccactcagcctccagcaacacctccttgtctggccaccgtgggagcccaagccccccgcaggctgaggcccggcgccgtggtgggggcagctttgtggaacgctgccaggaactggtgcggagtgggccagacctccgacggccacccacaccagccccgtggccctccagcggtctcggcactcccctcacacctcccaagatgaagctcaatgaaacttccttttgaacaacgcagctgccatgatgccttgggatgccctggtcctgggggactcaggtgcctccctgattcctgtgggaaccccgggttcagggccagggcctccttggaataaatggttattgttactaggtccccaccttccctcttttctggaagccaaagtcagcctccccaataaagtcctcactgcc

SEQ ID NO: 853 - DNA, 2423 bp, Homo sapiens
cgcccctcgcatccactgcaaggcagttggaaaagctccaagcacaaggcatggacttctcagcaccagagctgcagctcaagcccaccagagctgccactcacagaaccacttccttcccaccccggagaatgcagtggggatggctctttggcagcctgcacagctgccattggttgggcagacagcccctgctttccctcaaggcagtggtgtcctttagggttttcagctggaagagcaggagaaacagttccctgattaggagatggggaccgggaggtggatcaggcatcagaggtcaggccgcacatcggatcagagcaagtctgtgcccccctgatgctccttggggagaatccagtgtgtaaggtgtcacgtggcagtgccagcactcccttcatcctcctgatctagatgctgattggccataggtccagggtttgatgcagttgtttttatttttaaggttttgtttgatcttttttcttttctttcttttttttttttttgagacaggatctcgctctgttgtccaggctggtatgcagtggcatgatcacagctcactgcagcctcagccccacagacccaaacaaccctgttgcctcagcttcccacatagctgggactttaggcacgcaccaccacacccagctaattttttattttttgtagaaacaggatctcacgcttgtaatcccagtactttgggaggctgaggtgggaggattgcttgaggccaagaggtggagaccagcctgggcaacatagcgagatcgcatgtctacaaaagagtaaaaaatagaaataaaaaagaaatttcaaaagtctaaaaagatatctgtcaaagggcagttacctctgagaataggactggggaatggagacttttgctttttttggtatcatttgcattcttttataatgagcctatatttgtttgcaattaaaagtaagatcagggccgagcacggtggctcacacctgtaatcccagcactttgggaggctgaggcaggtggatcacaaggtcaggagttcaagaccagcctctggccaagatggtgaaaccccatctctactaaaaatacaaatattagccgggtgtggtggcaggtgcctgtaatcccagctactcaggaggctgaggcagagaattgcttgaacctgggaggcggaggttgcagtgagccaagatcacgccacagcactccagcctgggtgacagagcaagactcagtctcaaaaaaaaaaaaaaaaaaaaagaagtaagatcaggccaggcctgtggctcatgcctgtaatcccagcactttgggagaccaagggtggtggatcacaaggtcaggagatctggccaacacagtgaaaccccatctctactaaaaatacaaaaattagccaggtgtggtggcgggtgcctgtagtcccaggtacttgggaggctgaggcagaattgcttgaacccaggaggcagaggttgcagtgagccgagattgtgccactgcactccagcctggcaacaccagagtgagactctgcctcaaaaaaaaaaaaaaaaagaaagatcaggcggtgcggcacttatacctataatcctagcacttctttgtagagaccccatctctacaaagaaaaaaaattagccaggcatggtggcatacacctgtggtcctagctactcgggagactgaggtgggaggatcgcttgagcccaggaagtagaggctgcagtgagccaagatcgtaccactgcactccagcctggacaacagagtgagaccctgtcccccaaccccacaagaaatgggatcctactctagggactattctgtaccatgtttttttcatgcaataatatgacagatttccttattggcatatatacaactctcttatgctttttaacggccatgtagaagttcttatcctagtcagtggatggattgataggatccatgaattctaggaaatttattcaaaagagtgtttgtcggccaggcgcagtagctcacgcctgtaatcccagcactttggaaggccaaagcgggcagatcacttgaggtcaggagttcgagaccagcctggccaacatggtgaaaccccatctctaccaaaaatataaaaaattagctgggtgtggtagcgcatgcctgtaatactaactactcgggaggctgaggcaggagaatcacttgaacctgggaggcagaggttgcagtgagccaagatcacaccactgcactccagcctgggcaacagaatgagactccgtctcaaaaataaaagaataccaaagaaggccgggtgtggtggctcacgcctgtaatcccagcactttgagaggccgaggcgggtgaatcacctgaggtcgggagttcgagaccagcctgaccaacatggagaaaccctgtctctatt

SEQ ID NO: 854 - DNA, 2573 bp, Homo sapiens
agaggcggggccaggacggcgggaccggccgctgggtcccagcgagggctgagccgggcggtgggaggaggtcaggatggtgggggaacggcatgctggggacctcatggtgcccttagggcctcggctgcaggcatatcctgaagaactcattcgacagaggcctgggcatgacgggcatcctgaatacctgatccgatggagtgtcctgaagtgtggggaagtgggcaaagtgggtgtggaagaaggcaaagcagagcacatcctcatgtggctgtcggctcctgaggtctacgccaactgccctgggctgttaggtgagcgggcactatctaagggacttcagcacgaaccagctggggtttcaggaagctttcctcgagatccaggaggcctggatgaagtggcaatgggagagatggaggctgatgttcaggcgctggtacgcagggcggccaggcagctggcagaaagtgggaccccaagcctcacggccgctgtgcttcacaccatccacgtgctcagtgcctacgccagcatcgggcccctcactggtgtcttcagggagacaggagccctggacctgctcatgcacatgttatgcaatcctgagcctcagatccgccggagtgcaggcaaaatgctgcaggctctggcagcccacgatgctgggagtcgggctcacgtccttctatcactgagccagcaagatggcatcgagcagcacatggattttgacagtcgctatacattgctggagctgtttgcagaaaccacatcctctgaagaacactgcatggcctttgagggcattcatctgcctcagatcccaggaaagctgcttttctccttggtgaagcgctacctttgtgtcacgtccctcctggatcagctgaatagcagtccagagctgggagctggagaccaaagctccccatgtgccacaagagagaaaagccggggacagcgggaactggagttcagcatggctgtgggcaacctcatctctgagcttgtgcggagcatgggctgggcccggaacctcagcgaacagggcatgtcacctccccggccaacccggtccatctttcagccctacatttcaggccccagccttttactccccaccattgtcaccacccccagaagacaagggtgggtcttccgccagcgctctgaattctccagccgtagtggctatggagaatatgtgcagcagacactgcagccagggatgcgagtgcggatgctggatgattatgaggagatcagtgctggggacgagggcgagttccggcagagcaacaacggcattccccctgtgcagaccctgggtgaaaaggccctaggtgagatctctgtgtccgtggaaatggccgagagtctgctgcaggttctcagtagtcgatttgagggcagcactctcaatgacctgctcaactcccagatctacaccaagtatgggctgctgtctaatgaaccaagcagctcgtctacttcacgaaatcactcctgtaccccagatccagaagaggagtccaagtcggaggccagcttctcagaggaagagactgagtccctcaaagcaaaggccgaggcccctaagacagaggccgagcccaccaagacaaggaccgagacccccatggcacagagtgattctcagctgtttaaccagcttctggtgactgaggggatgaccctgcccactgagatgaaggaggcagccagtggtgagtcaggttctgggaggaagcaattggaacaagtcctgggtagtctcagtagaagaaatggatagtcaggatcgaaggaaagccatggaggaaggtgatttttgcaggggaaaatgccttggaaccatgcgtccatcttcttccttttgaccttgattgtatttaattaaccagcgctcccttccttcagtatctctggaaaaggaggatccgttttctggggtgtcttcatctcctttgtttgatcattagatccctgacacagaattggaaaactctgcaagctgcagtagccgataatgtgtttaaatattggtaggataactgggcttgactttaaagacttctaacttcaaggtgccacagttcttttagccattgccttttcccaccaatttcagaaatggccagagccttgcggggtcccggtcctcgcagctccctggatcagcatgtggcagcggtcgtggccactgtgcagatatccagcttggacacaaacctgcagctttcagggctctctgccctctctcaggctgtggaggaggtcactgagcgggaccaccctctggtccgtcctgacagatcgctgaggttagcatactggggagggaagaggttttggttgaagctgtaggcaaaggatggtggtagcggggaaggagctttgagatcacgaattagaaaagcttggggtgagggaaggctcagcctgaggagcagccgagcaggagggttggatgttttaatggctcgtattcttggagcacttctgttatgccaggcactgtgctagtattttacatgcattctctcattaaatccacctaacacctg

SEQ ID NO: 855 - DNA, 2018 bp, Homo sapiens
ctattgagcagagaaagtgctgtcccgcaggagcctgtctgcctccagccttatggctgctgttttctgcagcctctgagtgcagacagcctctactagtgggtgtcgtcatggaggagaggcagccccgtgggcttcggggagctgggtgcacctctcctctcacacagccgccgtgacatagggcatgtcctgttcttttcttgtagcctagtctcctctgggcatgatggagccttaacaagctgccgcgagtttccaggaactcacgtctgtgaacactagccgtgtgtgtggcacgcagacaagttcattctacaggcaactgtggctcctgtcattcttcttgtatttttagtcttggttatggcagcctgcgctgtaagctgtttaaactcaactttaagtgagctaaaggtgaagagagcttcactggaggagtcatcaaaatacattctcaggaccattttttcttcaatttttctttttgacatccttccagactgggcttcccagatgattctgatgcacagcctcggccacctgccctccgatgtgccgaggtcctgctgcggcggggccctagggctcctgccctggtgtctttgggaattggaggcccctgagcctttagcaattgtagcttaggatgagaaggatgggcagggaatgactgcctgtgttggggaggctgagtggccccaaggcttggaaatgggatgggtggaagcagatgtggggaagggctggtcctggctgaggcactcactcactgtgtctgcttcagtctcaggggcattgggttgaatctttgagtgccgggagtctgttctggtctgctgggggagctgcttttggagttcctggtgtcttatttcatgaggtcgtggcaagatggtgaagtagcagcagtgcttagggtgtgaggatggtccgtgccagggtggtgctgccgggccgcagctgtggacgtggtggtggtgtgtgtcgtgttggaaggtgtgtttgttcagacacactagtcctgggggctgctgggcacatcactggcgacatgcccaatggggtgaggcagcggtctcgggtgtccacagtcgagcgccccagatggcagggtctgcctggcgtccacacaagcaggtgtgtgaccagggaggggcccatgcacggtgcctcctcctcgtgcattcgccagtgccgcatatccccgactgtgtgcttcctgctgcggcagcggcctcacgcttgcttgcttcctcctctccaggtcaaacgatcaaggagcaaaggcgggctggccggccccgacggcaccaagtctgtctttgggcagatgtgtgctaagatgagctcgtttggtcccgacagcctcctccttcctcaccgtgtctggaaagtcaagtttgtgggtgagaacttgccacgtgctggagcacctgtgtccccggcagtggtcgcctgagcccacagggagcacagaggccacatggtgtgggagcgttggggctctctttacacaggactgtgtgaggggacttcgagtggctgcttctcccctgcaggtgaatctgtggatgactgtgggggcggctacagcgagtccatagctgagatctgtgaggagctgcagaacggactcacgcccctgccgatcgtgacacccaacgggagggatgagtctggggccaaccgagactgctacctgctcagcccggccgccagagcacccgtgcacagcagcatgttccgcttcctgggtgtgttgctgggcattgccatccgaaccgggagtcccctgagcctcaaccttgccgagcctgtctggaagcagctggctgggatgagcctcaccatcgcggacctcagtgaggtaactccctggggcggcaggcggggcctctagggtcttgttaacaggcacagtctgttctgcgggtccggtcaggctgtgaactctggcctaatctcagtgcccaggtgacgcagaggctgttggctgtggaccacctttgagtagc

SEQ ID NO: 856 - DNA, 2128 bp, Homo sapiens
ggctctgccagggattaaagtctggtgagttcatcttggatactaaaaccccattgagaactggactcaagggtcctccatagcctcttttgagaagatgagtttcagcttcccttgccctgctaaagccctgggctagggaccagctcggccacaaaaggcctgcttatctttcctcacctgtttctgcattatcactactgaaatccccaggttggcaggaacaaatggcctggactggcaaggtggttactggggtcgtctttaagcacaagttttgattcttttttttttttttttttttgagaccggatctcactctgtcactcaggctggaatgcagtcagtggcaggtgtgatcatggctcactacagcgcaacttctggggctccagcaattctcctacctcaggctcccaagtagctgggaccaaaggcatgcacaaccatgtcaagctaatttttgtgtttttggtagagacaggattttgtcatattgcccaggctgatctcgaactcctgagctcaagtaattcacctgcctcagcctcccaaagtgctgggattacaggcatgagtcaccacgcccagcccacagatgtcacttctgcctttccattattactcagctttctgaatgccagttgcttctagcatagtgcctgctctagagaacccctcaggaaccaaggcctatctttctgtgttgttccactctacacctaagttgctgtgatggagccatgtggtcggggtcagggttcccactgcactttctgcagtgctcccagaactcagtatgtactgggaagggcctgctgtcgtgacagcctctctttggggccagcttctgcttttgcccccatctttgcagtacagggggtaaattaaacaagaggatgcctgaatgaacgatatcctgggttcttgagagacaagtgggagctgataattctgaaaattcattagtcaaagcatggagataaaggtggcagcaggaaggggagaggcaaggagtagacccgtgacagttttagaatcttatttgtgccaaaatactttactgcattggcttggacctctaatacaatgttgaattgttaaccatgatagcactgtatcctggtctaattcctgaattgaatggctagtcttaccattaagaatgctatttgcggccaggcacggtggctcacacctgtaaccccaccactttgggaggccaaggcaggtggatcacttgaggtcaggagtttgagaccagcctggccaacatggtgaaaccccgtctctactaaaaatagaaaaattagccgtgtgtggtggcgggcgcctgtaatcccagctgctctggagtctgaggcaagagaatcacctgaacctgggaggcagaggctgcggtgagccgagatcgcaccactgcactccagcctgggcaacagagcgagactccgtctcaaaaaaaagaatgctatttgctatgatttttggatgatatctttataatattaagggatgtcccttccttggattttgctttttaagggaaggtaatgtctaagataagcctttgaaatcttgaaattcagagtgatttgggatttatagagagctgtacagagcattggtgattgttattccttgagttcttaaaacgtaaaccaggcctgggcccttccttcctctgtgcccaactctcatcctctgtggtttgtggtttcagttattgccttgtctgtcaagatccgcagttatgaagaacacttggagaaacatcgaaaggacaaagcccacaaacgctatctgctaatgagcattgaccagaggaaaaagatgctcaaaaacctccgtaacaccaactatgatgtctttgagaggatatgctgggggctgggaattgagtacaccttcccccctctgtattaccgaagagcccaccgccgattcgtgaccaagaaggctctgtgcattcgggttttccaggagactcaaaagctgaagaagcgaagaagagccttaaaggctgcagcagcagcccaaaaacaagcaaagcggaggaacccagacagccctgccaaagccataccaaagacactcaaagacagccaataaattctgttcaatcatt

SEQ ID NO: 857 - DNA, 2336 bp, Homo sapiens
agataagccagagtcccagggtcttcttcacgccccattaccgcccccaggttcctcgaccaaggtctggacgacaactattgccggagtcctgacggctcccagcggccatggtgctacactacggatccgcagatcgagcgagagttctgtgacctcccccgctgcgggtccgaggcacagccccgccaagaggccacaactgtcagctgcttccgcgggaagggtgagggctaccggggcacagccaataccaccaccgcgggcgtaccttgccagcgttgggacgcgcaaatcccgcatcagcaccgatttacgccagaaaaatacgcgtgcaagtgaggtgggggggcgggcgttgggacgtgctgctgcgggtgagacgggaggagggtagtcacgggcttagggctggaggctggcgggctagggctgagtgcagcgcctgcttagagaccttcgggagaacttctgccggaaccccgacggctcagaggcgccctggtgcttcacactgcggcccggcacgcgcgtgggcttttgctaccagatacggcgttgtacagacgacgtgcggccccagggtgaggcccaagcttgggggctacagagccggggctggaagcctggaaccgaagggccggggcgaggtctcggcctgatggctgcctgcacccgccgcagactgctaccacggcgcgggggagcagtaccgcggcacggtcagcaagacccgcaagggtgtccagtgctggtccgctgagacgccgcacaagccgcagtgagtccctggtgctcctggccccgccagggccctaaccctggggcggcatgctttgatgtctgggaccagagcctggaaatggttgagactaccctgccacgattttgctcccgctcccgcctcggttcacgtttacctccgaaccacatgcacaactggaggagaacttctgccagacccagatggggatagccatgggccctggtgctacacgatggacccaaggaccccattcgactactgtgccctgcgacgctgcgctgatgaccagccgccatcaatcctggacccccccccaggttaggagttgggccagttatgggtcaggccctttagcccacgacatccacacagtctgggtttcatccagcccaccccatcctacagaccaggtgcagtttgagaagtgtggcaagagggtggatcggctggatcagcgtcgttccaagctgcgcgtggctgggggccatccgggcaactcaccctggacagtcagcttggggaatcggtgaggcacaactgcctgtctcccacagagaggagctgaggttgtgtcctctgtggttatgccactgggggctgggaatctatccctgcccccagaggtcctagccagaagatggcaggtctagcatctgtcccaggagtctgttccctgtcctaattccccactcctctaggcagggccagcatttctgcggggggtctctagtgaaggagcagtggatactgactgcccggcagtgcttctcctcctggtgagcctcccttgtgtttggggacccagtctcatcccaccttcccctttccccaggcaagctaacaagtgagccttggggcaatggactgagagtcacaaatgacctagcagagcttctctcccagccatatgcctctcacgggctatgaggtatggttgggcaccctgttccagaacccacaacatggagagccaggcctacagcgggtcccagtagccaagatgctgtgtgggccctcaggctcccagcttgtcctgctcaagctggagagatctgtgaccctgaaccagcgtgtggccctgatctgcctgccgcctgaatgatatgtggtgcctccagggaccaagtgtgagattgcaggctggggtgagaccaaaggtacgggtaatgacacagtcctaaatgtggccttgctgaacgtcatctccaaccaggagtgtaacatcaagcaccgaggacatgtgcgggagagcgagatgtgcactgagggactgttggcccctgtgggggcctgtgagagtgactacgggggcccacttgcctgctttacccacaactgctgggtcctggaaggaattagaatccccaactgagtatgtgcaaggtcgcgctggccagccgtcttcacgcttgtctctgtgtttgtggactggattcacaaggtcatgagactgggttaggcccagccttgacgccatatgctttggggaggacaaaacttgtaagtacagtcaaggacaagacttgtactcaaagttgagatttaataaaattaatatttttactacttc

SEQ ID NO: 858 - DNA, 2322 bp, Homo sapiens
agagcggcggcttctctcgcgaggacggacgccattatcgcatctccccgacaaacaccacgagaattccgcagcccacacggtgaccaaaagccagccccactgtgagttgaactctttcgtgttgaccggccactctccgtgctctggatgatgtcggaacacgacctggccgatgtggttcagattgcagtggaagacctgagccctgaccacccagttgttttggagaatcatgtagtgacagatgaagacgaacctgctttgaaacgccagcgactagaaatcaattgccaggatccatctataaagtcattcctgtattccatcaaccagacaatctgcttgcggttggatagcattgaagccaaattgcaagccctggaggctacttgtaaatccttagaagaaaagctggatctggtcacgaacaagcagcacagccccatccaggtccccatggtggccggctcccctctcggggcaacccagacgtgcaacaaagtgcgatgcgctgtgcctgggcgtcggcagaacaccattgtggtgaaggtgccgggccaagaagacagccaccacgaggacggggagagcggctcggaggccagcgactctgtgtccagctgtgggcaggcgggcagtcagagcatcgggagcaacgtcacgctcatcaccctgaactcggaagaggactaccccaatggcacctggctgggcgacgagaacaaccccgagatgcgggtacgctgcgccatcatcccctccgacatgctgcacatcagcaccaactgccgcacggccgagaagatggcgctaacgctgctggactacctcttccaccgcgaggtgcaggctgtgtccaacctctcggggcagggcaagcacgggaagaagcagctggacccgctcaccatctacggcatccggtgtcaccttttctataaatttggcatcacagaatccgactggtaccgaatcaagcagagcatcgactccaagtgccgcacggcgtggcggcgcaagcagcggggccagagcctggcggtcaagagcttctcgcggagaacgcccaactcgtcctcctactgcccttcagagccgatgatgagcaccccacctcctgccagcgagctcccgcagccacagccgcagccgcaggccctgcactacgcgctggccaacgcacagcaggtgcagatccaccagatcggagaagacggacaggtgcaagtaatcccacagggacacctccacatcgcccaggtgccgcagggggagcaagtccagatcacgcaggacagcgagggcaacctccagatccatcacgtggggcaggacggtcagcttctagaggccacccgcatcccctgcctcctggccccatccgtcttcaaagccagcagtggccaggtgctgcagggtgcacagctgatcgccgtggcctcctcggaccccgcggcggcgggcgtggatgggtcgccactccagggcagcgacatccaggttcagtacgtgcagctggcgccagtgagtgaccacacggccggggcacagacggccgaagccctgcagcccacgctacagccggagatgcagctcgagcacggggccatccagattcagtgagcggtgcccatggcaccaggagcccctcgccggctccgcctacggcccggcccccacgcgccctgctctcacggcctcggcacaggcagcggctgcacgtgttctgctgaagtgcgtctgaaggccgctgcctccgcggggaacagcatcctatgaactgaaagagcagccgccgccgcccccagccggagacccctttcgtttgagtcctgctgttggtgtcggagcacgaggggaggcacggtgcggagagcgtcgcatatgcgcgggaaatcaagaactatgatatttttctgtttaaacagctttttttaatttgctatggtgtttataacaaaaaagaaaatttgaaaaaaaaaatcccaggggagtagcaggagccctttgctgtgtgctctgtccagtgtcatgagacgggagccctttgctgtgtgctctgtccagtgtcatgagacgggagccctttgctgtgtgctctgtccagtgtcatgagacgggagccctttgctgtgtgctctgtccagtgtcatgagacgggagccctttgctgtgtgctctgtccagtgtcatgaggcaggtgtttgcaaagccagctctcggttccgatggggtattgctgacctacttttctaggggaaatgctcttaaacactgtaattatgcatttctaatgaaataaaatgtatttatgaccac

SEQ ID NO: 859 - DNA, 2406 bp, Homo sapiens
acagactagccaagtggctgagacgagtgtggggtgcgtgactctgcctgcgcgcgcgccagccccgcagctctcgccagagccttgggatcaagggaggaagagaaccggcagctggcctcggactctaagcggtgcgcagctccagcccgagcggatcggccctgaacccacaaaggactcctcgctccttcaagcctccaccacctcgcagccggggaggcaactggagcgaaaccagcgacagatgcagccatggacaagacaaggagagcttcgtccctcccgcccctcgggttccttcctgctggggtctgaccgcgtcttctgtgcgtgtgggatggaggcccggctcgcccgggctccgagctgtcccccggctccgctttcggagcagcccttgggcgctggagaggtttcccattgcggtctccaggtcatggccaaggaggagaagcaattagaatgggggaaagggtcccaagacaaaggagagggaagcattctgcaatcccatcctatttgagccccgcgcaggagctggactgtccgccgtggctgggggacaaggtctcagcccgaagctcatgaggtaccagacagtgcctgggcttcgccacctaactcacaatgggtcctgaaccgcccgggcagtccccggggtcgtagactggggaccgctgcacccctccccgcccgcaatgtcccttggagtccgcacctgaggtcccaggcaatcgccgctaacttgtagctctcggacacggacaggtgcggtccatgcctggtgccggtagacgcgcagaaattccacctgtgcgcgctgcccggcgcccctggggcccctcacggggtaagtagagactcatctgggagaggtgaaaattccccagaattattgacacacacggcggcacaccctttgcctccgtccgcctccagcatccgcatccctttctctatcttcctgcccattgccgtcctcgaggctgccctgagatacagaattgtcccaggctgagtccaccgacccgccagtccctggcgatgatgccaaggctcttgcatgtacggaaataccagcagggaggttcgccaggggcagagaggctggaggagaacagagaattggaggtaaacgcgtaaagccagcagaactgtcggtggacatttcacccaggccgccctcccgcgtctttaagtcagttcaccgccacagcacgtctgtgactgcggccacccagggctccaagtctgccagcccaggcgccgcgagccaagaagagcgcggcgcctcccactcctcaagctccggaatcccccacatcgactttctatttccctgtcttcttttcttttttgtttgttttgcttttcctgctcttttcttagcgctgggtggcagtgggtatgcggcagccgtgtgatttgcccatcccctagtacacgcagccagcgacacaagcacacagcgaccagtccccacgctgtgccacacaccctccagcggtccggcgcgcagcccctgctccacagcccgggacgcctgcagccaccgccagggtcatggccatggcccacgcagggctctgcgggtggagaggggaagtcagcctagactccagagagaaaccctggggcaacccgaaaggcctgaggaaaactggaattggggttaggcatgaggggagggagtctctggggaaaacgggccgggctgtgcggagccctgagggctcctgcggctgcagcgctgcaggccgcccgcgtctcgccccgccccgccgctgggcgtccccgccaggagcccacccgcgggcggcagcttttctccatgctgcccagggaagttcgatgcctggtgctgggatgcgccagcgcttctgttcgcttctggcaatcctggcgtctcccaatgagagggctctcaaaatgaagcttttaataaactccagagtaaggaactcgggattgtgcggcaaaggccgcgcattgcactttgtgagcaatcggtaaatatgcgcaaccatatgataggaaatatatgcattttcattgataagaaaaaaagagatgatggtatttttaaacagaagccacaaacaggcatacctgtgccattgttggggagctaataataaaggcactgatgatcacaggagtaagaacaattgacttggccaagagacaattttaagctgggaactgtattcggctgcagttcagaaagtggacttttgagacttgtcaaacgaatggaagaattttgtgccaacaatgtcccagctttgcaggcttggcagctgaggactcagaagtaacaaattgatgccaggtgaattattattgttactactattatcaaaatgtgttccagttgcagcaatacaatggataagcaacttc

SEQ ID NO: 860 - DNA, 2297 bp, Homo sapiens
agtccccgctgagactgagcagacgcctccaggatctgtcggcagctgctgttctgagggagagcagagaccatgtctgacatagaagaggtggtggaagagtacgaggaggaggagcaggaagaagcagctgttgaagagcaggaggaggcagcggaagaggatgctgaagcagaggctgagaccgaggagaccagggcagaagaagatgaagaagaagaggaagcaaaggaggctgaagatggcccaatggaggagtccaaaccaaagcccaggtgagtggggaggcacctgggtagagccgggagcagaggctcagggagagaggatgatgatggaacagggtgcagtatggtgcagtggacacgggctgggggtttggtgggcacagagcaccacagtacagttgtacaagttgtgtactgcacaagcgtctcttcctaagggagtgagtgagggctgaattccacccaacactccatcaccaatcgtgcaccctagcagggatggggctatgttcttctagaggaagggccctgaacggacactctcctctctcacagtatggccagaacaccctcctccatggccgaggtgggaccttgggattaagggaagcaaattgtggggagccaaacaatgaaaccgtgccagcataggcatggcggcttcagagagctgagagagggcaggacggcttggtgccacacacgtgaagcccacctgaaggtggtgtgtgctggggggggctgggggatagggagcatttccctttttatgatgccaaccctgccagcagaggttgacccatggcacctctgcccactcacaggctcttcccatttcagtggggccttctgaaaccagcccaagacatcccagatccatttatttgcccagtgccttcccccttcctggcctcttgtgcactgcggtatctcatttcagctccacacacctgagggcagatggggacatgaagaatcagagaaccccctgggtctcagtatgtgttgggaccaggaccaaactgcaagactcccaggttcatggccagtttctgcggggtccaccaggggatttgaagtccaagaagcatggcatcttgtcacagcttctttgattccaagttgtgtggctttgagcaagtcattctacctccctgagcctcagttctcctaagtgagattaacggtacccacttcatgggcatatcatgagcatgaagtgaaatagcatatgtgaaagagctttgtgtattcccaggtgctgagcaaggctgaggactgccattgttgacgtcagtgttactatcattgctgtggttggtcggggcagtgctggaagattctctaggaaggatcagggccctgcctgtcctggacaccctcagtccctgggtccagaatggggctgatgctgactattcctctctccaacaggtcgttcatgcccaacttggtgcctcccaagatccccgatggagagagagtggactttgatgacatccacgggaagcgcacggagaaggacctgaatgagttgcaggcgctgatcgaggctcactttgagaacaggaagaaagaggaggaggagctcgtttctctcaaagacaggatcgagagacgtcgggcagagcgggccgagcagcagcgcatccggaatgagcgggagaaggagcggcagaaccgcctggctgaagagagggctcgacgagaggaggaggagaacaggaggaaggctgaggatgaggcccggaagaagaaggctttgtccaacatgatgcattttgggggttacatccagaagcaggcccagacagagcggaaaagtgggaagaggcagactgagcgggaaaagaagaagaagattctggctgagaggaggaaggtgctggccattgaccacctgaatgaagatcagctgagggagaaggccaaggagctgtggcagagcatctataacttggaggcagagaagttcgacctgcaggagaagttcaagcagcagaaatatgagatcaatgttctccgaaacaggatcaacgataaccagaaagtctccaagacccgcgggaaggctaaagtcatcgggcgctggaaatagagcctggcctccttcaccaaagatctgctcctcgctcgcacctgcctccggcctgcactcccccagttcccgggccctcctgggcaccccaggcagctcctgtttggaaatggggagctggcctaggtgggagccaccactcctgcctgcccccacacccactccacaccagtaataaaaagccaccacac

SEQ ID NO: 861 - DNA, 1597 bp, Homo sapiens
atcatccaacaaccacatcccttttcaacagaggcctctgcgaggaaagtgcttcaccatggactggacctggagggtcttctgcttgctggctgtagctccaggtgttcagtcccaggagcagttgctgcagtctgcgactgaggtgaagcagcccggtgactcagtgaaagtctcctgcagggcatctgaagacacctttaccagttcctattttcattgggtgcgacaggcccctggacaaggccttgagtggatggggataatcaaccctggtgggggtcgaacaaactacgcacagaaattccaggacagagtcaccatgacatgggacatgtcttcgggcacagtctacatggaactggacatcttaacctctcaagatacggccgtgtatttctgtgcgaagtctcgggggggctattatgatgcggaggacaactggttcgacccctggggcctgggaacgcaagtcatcgtctcctcagcatccccgaccagccccaaggtcttcccgctgagcctctgcagcacccagccagatgggaacgtggtcatcgcctgcctggtccagggcttcttcccccaggagtcactcagtgtgacctggagcgaaagcggacagggcgtgaccgccagaaacttcccacccagccaggatgcctccggggacctgtacaccacgagcagccagctgaccctgccggccacacagtgcctagccggcaagtccgtgacatgccacgtgaagcactacacgaatcccagccaggatgtgactgtgccctgcccagttccctcaactccacctaccccatctccctcaactccacctaccccatctccctcatgctgccacccccgactgtcactgcaccgaccggccctcgaggacctgctcttaggttcagaagcgaacctcacgtgcacactgaccggcctgagagatgcctcaggtgtcaccttcacctggacgccctcaagtgggaagagcgctgttcaaggaccacctgagcgtgacctctgtggccgctacagcgtgtccagtgtcctgccgggctgtgccgagccatggaaccatgggaagaccttcacttgcactgctgcctaccccgagtccaagaccccgctaaccgccaccctctcaaaatccggaaacacattccggcccgaggtccacctgctgccgccgccgtcggaggagctggccctgaacgagctggtgacgctgacgtgcctggcacgcggcttcagccccaaggacgtgctggttcgctggctgcaggggtcacaggagctgccccgcgagaagtacctgacttgggcatcccggcaggagcccagccagggcaccaccaccttcgctgtgaccagcatactgcgcgtggcagccgaggactggaagaagggggacaccttctcctgcatggtgggccacgaggccctgccgctggccttcacacagaagaccatcgaccgcttggcgggtaaacccacccatgtcaatgtgtctgttgtcatggcggaggtggacggcacctgctactgagccgcccgcctgtccccacccctgaataaactccatgctcccccaagc

SEQ ID NO: 862 - DNA, 1926 bp, Homo sapiens
agtctgctcccacgctgacagccttctcctttgactgtgccagagaagcctgccctccgctgaaagaagaggaccagaaggagatcggcaccaagctaactcattacctgcggtgctcacgttggggtctcctgaatgggaagaagaggaggagatggatcttagagcctgtaaggagttgaggcctttctcgaacccggagctggggctgagggatgcactccagtgcctcaacagcagtgactggcagatgaaggagaagggtctggtgagcatccagcgcttggcagcctgtcactcagaggtcctcaccgggaagctgcacgacgtgtgcttggtggtgactggggaggtcaccaacctgcggtccaaggtgtctcacctggccatcagcaccttgggagacctcttccaggccttgaagaagaatatggaccaggaggccgaggagatcgcccgctgcttgctgcagaagatggcggacaccaacgagttcatccagagagcagccggccagtctctgagggctatggtggagaatgtgacccttgcccgctccctggtggtcctcacctcggcgggtgtctaccaccggaaccccttgatccggaaatacgcggctgagcacctctcagctgtgctggagcagatcggcgctgagaagcttctctcgggcaccagagacagcacagacatgttggtgcacaacctggtgaggctggcacaggactccaaccaggacaccagattttatggccggaagatggtgaatatcttgatggcgaacactaagtttgatgcatttctgaagcaatctctcccatcttacgacttgcagaaggtcatggcggccattaaacagcagggaatagaagataatgatgaacttccctctgccaaaggctgcaaggtgttgaggagtctggtggtgtgtgagaacgggctgcccatcaaggaggggctcagctgcaatggcccaaggctggtggggctgcgctccacactgcagggccgcggggagatggtggagcagctacgggagctgacacggctgctggaggccaaggacttccggtcccggatggaaggcgtggggcagctcctggagctctgcaaggccaagacggagcttgtcactgcccacctggtccaggtctttgatgctttcaccccaaggcttcaggattccaacaagaaagtgaaccagtgggcgctggagtccttcgccaagatgatccccctcctcagagagagcttacaccccatgctgctctccatcatcatcactgttgcagacaacctcaactccaagaactcagggatttacgctgctgccgtggctgtgctggatgcgatggttgagagcctggacaacctttgccttctaccagcgcttgctgggcgagtgcgtttcctgagtggccgtgcggtgctggatgtcacagatcgcctggcagtgctggtggcctcagtttacccccggaagcctcaagctgtagagcggcatgtccttcccatcctctggcacttcctgaacaccgccaccaggaatggcgccctgcctgtacccagcgggaacatccgcggggtggtgtgccggctgtccaggagcctccaggagcacatgggctcccgcctgctggactttgccgccagccagccaaagcacgtcctcaagacgctccaggaactcttagactcagagtccttgggaggcagccgcaaggccactgacagaggggtggcccctgacagcaagacaactggcagctcatacccttttcagctggattaaagatgggtctgaaatgggcaattattatttatcttatttttttgatggactattctcctggttactttcccccttagagttccagatgtacatggtatattttgaagtagaaataaaagaattacttattt

SEQ ID NO: 863 - DNA, 1776 bp, Homo sapiens
attcaacatgtctcaagtcattgcatctggagcagatcttattgctcaaacactaaagaaccaaggcgttcaagtcattttcggtattgtaggtatccctgtggttgaagtagctgaagcctgtgttgctgctggcattcgatttattggcttccgtaacgaacaatctgctgcttatgcagcttcaatttacggctatctcagtggccgtcctggtgtgtgtttgagtgtaggtggtcctggtgttgttcatgcgctggctggtctgctcaactccaagatcaattgctggcctcttatcctgctgtctggttcttgcgagacagatcagacagacatgggcgcattccaagagctggaccaagtggaagcagccagacagtattgcaaatacagtgctcgacccgcttcattggaacaattgccgtttgtcattgaaaaggctttcagaacagctttgtatggtagacctggtgctgcctatgtggatttaccagcagattacattcaataccccattaccaacaaaaaggtgtttgatgctgttcaagtagcccgtgtgccaaatgcgcccaaatccatggctgaccaaaccaatgtacaccaagctgttgccttgctgaaacatgccaagagtccactcattgtcattggcaaaggagcggcatatgctcgtgccgagaacgaaatcagagcacttgttgaaaagacacaggctccatttttacctacacctatgggcaaaggcgttatttccgacagccatccattgtgtgtctcagctgctagatcaaaagcattaaaggacgctgatgtcgttcttttgattggcgcacgtttgaattggatccttcactatggacactcgcctcgttggagcaacaaggttcgctttattcaaatcgacattgcacccgaggaattgggcaacaaccgtcaagacacattgccgctcttgggcgacatccaactcgttgtttctcaaatcacgcaagcattgactggtaaactcagcaatatcaaccctgattacgtctctggattagtcaacaaagtaaagcaaaatgtggaaaagaccaagacagctggtagcaagggatcagacagcgctattttgaactattcaactgcctttacagtcatcaagagcttgcttcccgaaaacgacattgtctatgtgagcgaaggtgccaataccatggatattggcagatcttactttgacgttcatgagcctagacatcgtttagatgcaggtacaggtgctactatgggtgttggtatgggttatgctattggagctcagtcttactacggtgatgccaagcgagtcgtcagtattgtgggtgattctgcgtttggtttctctgccatggagttggaaacagccattcgctctcgtctgccactcttgatcattgtcatcaacaacaatggtatctatcacggcttggaggacgaagaataccatgctgccctcaaggacggtactttacccactacctctctctctgttgaaactcgctatgacttgatttcagaagcgtgcggtggtaaaggctggtttgtaaagaacagagttgaattagcaaaggctgtcaaggaagctttagctgccaaagatcaaacgtgtgtggttaacgtcatgattgctccaggaggaagaactaaattagatttcggttggatgcaaaagacacaaaaagctagattgtagagtgaatagagaataaaaccgtcagttgacaagtatccattgccatagcccaaaaggct

SEQ ID NO: 864 - DNA, 2898 bp, Homo sapiens
attatgccaaaagtgtatagtcgtaaggatccgttacttttctgcaggcgttttgtaggaggtattttgattgcccgtaagattttctggcctttggaaaatgtgctcctgaaaagtggaatgcttgccgaaaaggtaatgaagaaggaaaatcacatcttgagtgttgatgatctggaacaggctttggagctgactgacaaggatgatatcaaggacgaacagagcatgctgaagggtattatccgctttggtgatgagactgccaaagaggtaatgacgagccgacagaatatagtagatttggatattcatagtacttatcctgaggttctgaaatgtatcgcggaaaataactacagtcgtattcctgtttatcaggataataccgacaatattcgcggcatcctgtatatcaaggatttgcttcctcatttagaaaaaccggtctctttcagatggcagagtctgattcgtccgccttattttgtaccggagaccaagaagattgatgatttgctgagagaatttcaggagaataaggtacatatcgccatcgtggtagatgaatttggcggcacaagcggtatcgtaactcttgaggatattctggaggaaatcgtaggcgaaattaatgatgagtatgatgaggaagaaaagttctactccaagttgaattataatacatttatttttgagggtaagactttactgacagatttctgcaagattctgaatgttgatgatgaggaatttgaggaagtggaaggcgatgccgatactttggccggattgttgcttgaaatcaagggtgattttccaagcatccatgagaaaatcgaatataagaattattcttttgaggttttgggtgttgaggaacgccgtatcagtaggatcaaagtggtggttcatcccggtaaataatttgttgaggctttttaagattgattataataagaaagagggtcgagattgctataatcttgactctcttttgtttttctcgattttttttcgtaattttgtcccctgtaaaatcaattggttatggcattaataaacgtaagagaagtttatcctggagtacatttgggattgtggcaaatcggggagtctgtaaacgactttctggagagctatccttggatgaaagtttatattaaagatttggaactttataaaagtgaagggcgaaagttggagtttcttgcagtcagagctttacttagagggatgcttctgatagctggatattctgaggagcagataggtaaaatcggagaaatcacacatgataagtgcggcaaacctttgctcaacaagtttaatatcagtatttctcatacccggggttttgcttccgtcattatttctaaaagacgttctgtagctgtagatatagaatattataatgatagggtggagcgtatcgcttccaagtttttgagaagggacgaaaaggctgaagggctggatgctttgctggttcattggtgcgctaaagaaactttctataaattgttttcggcagagaatttgcaatatggggagatgcggctgaaaccgttcgaccctatgatggattggaattgcgaagttgaaaacctgaagtcgcacaaatcggtaaatgtggactttgagttgactatggagtttgttcttacttatgcggctttgtaaactatgcttcggaatattttgctaacttgtttcttgtgtttcgggtatcaggtgctttggtctgatactttacaggtggtgcggggtgatgttgaggtaggtcaatggactgtcgttcgggagtttcctcagaaatcctattcccggtttgtaccagcaggaaactatagtggcattactcatttgcatgatgatatttatgcggtagtaagcgataagtctgatagtgccttgtttttcaagtttcgcatccaggtagatgaacttacgggagaacttcggcatgtggagaatctggggtatgatgcgatggtggatggaagctgctatgacgggaaatcttggataggcaagaataggggctttgatcatgaggcgattgcaaaggtttccgattctaccctgatggtggcaagtgagggatttttctgtatcagggagttttttatcaatccttcatcccggaatgcggaatggaattcccgactcagaaagatagattgcccgtctgctgcgtttgctcctaactatgcgtttgaatctttggctttcgattctgtccgtcataacctttggatgattcctgaaagtacgctccagaaggatggggaacctgcaacgccacagaatggaggcgcaaataaactacgcctgatgaggattgatattggagatctgaagggaatagatgctcaacatttggaggggataggtgttctgaggcagaatagtgatgattcagattctgtaaatgttgggggaaaacactttatggaagcttatgcctaccggatggataagcctactacgaaaaagaaggctgaaacgtatgtgatgggtgttagcgaattgtgtgtcttgccggatggtcagttgttggtcttggagcgtgaagcttttattccaaagatgaaattgggagcattttgtaagtgcaagttgtatttgattaatccgttgcaggagaatccgtatcctattgagcaatctttctgcgaagctacaccttatattaataagcatttgcttttagaatggaagaccggtttgtcggtttttgaccgctcgtttgcaaattacgaaggaatgtgcctgggaccgaagttaaagaatggtgatcaggtggtgattctactttctgattcccaagaccaatatgcaggcgttcttaaagactggtttaaaacggttgtggtaagagaaattagaaagacg

SEQ ID NO: 865 - DNA, 2248 bp, Homo sapiens
tatgatccaagtaacacagaagaaattgcaaatgggttgctttttcttaattcaagtcatatttatgaaaaacaagacagatgttgccacaagacagtgcattccatggcatcaaagttcacggatggtgacctgaacaatgatggtcctcatgatgaaggcttacgctctagtcagcaaaatcccaaagtacagaaatacattagcttcagcctcccgctgtctgaggcaactgcacacatttacccaggtgacagtgccgtggccaacaaacaacccagcccacagctttccagtgaagactctgacagtgactatgaactttgcccagagataaccctaacctacaccgaggagttttcagatgatgacctggagtatctggaatgttctgatgttatgacggattactctaatgcagtttggcaaaggaacctgctggggactgagcatgtttttttattagaaagcgatgacgaagagatggaattcggtgagcattgcctgggtgggtgtgagcatttcctcagtggaatgggttgtgggtctcgggtgtcgggtgacgctgggcctatggttgccactgctggcttctgtggtcatcactcacaaccccaagaagttggggtgaggagcagcagagtctccaagcacggtccctcatccccacaaacagggatgactctcattttgggacctcaccaggatggaacgtcttcagtgacagaacaggggagatataaactccccactgctcccgaggctgctgaaaatgattatccaggaattcaaggagaaaccagagacagccaccaagcaagagaggaatttgccagtgacaatctgctcaacatggatgaatcagtaagagagacagagatgaagctcttgtctggtgagtcagaaaactcagggatgagccagtgttgggagacggcagctgacaagagagtgggggggaaggacttatggagcaagaggggttcaaggaaatctgccagggtgaggcagccgggaatgaagggaaatcccaagaagccgaatgccaacctgagagaaagtacaacagaaggtacccttcatctctgctctgccaaagaatctgctgagcccccactaacccagagtgataaaagagagacttctcacaccacagcagcagcgactggtcggagttcccatgctgatgcaagagaatgtgctatttcaacccaggcagagcaagaagcaaaaacccttcaaacttcaacagactcagtctccaaagaaggcaacacaaattgcaagggagaaggcatgcaagttaatactctatttgaaacaagccaggttccagactggagtgatcctcctcaggtaagacttttcttttaaagaaattacgagataaaaagaaccgtgtgtgtgtgtgtgtgtgtgtgtgtgtgtgtgtgcgcgcgcgtgcgcgcgtgtgtgtgtctcttcctttacttcacattcacaattgctataccataatgtaaatcaaaataagtttcccaacaccatcagggtacttgtgcatgacagctgctgctgctcggaaggaaatctggttttgaaaaaaaggcccagataaaccctaagccatcctaattatagcaaaagactgatagaagttaagaggcactaatgggattctggacagctggaaaaagaaatctgatattttgtctgctgcatgtgttttaccaggcaatgccactattcagaaagtttctcaagcaaatgttttgggtgtagcctttaaaggaagaagggggaaaaaaacattgtttttagtcatttgcagggaagtgctttgaaaatgataggtcttggctttaatcagaatttgtggtatgaatgaaagacttcagtgtgtctgaaagacttgtagacttcactttttttgtgatgctagggaaagcaggcagattaactgttgcctcactggtgggatgtttttgattggatgtttgtcttattttgtttaaaacagagtataaaagaggctaagagaaaaaaagctgccaagaaataaatttgttttcccttattactgatttgggagtgtaaagagatggaattaaatttataggaataatcaatgcacaaaagatgttgtgcttgatacataacttatatttttaatgatattttcagtttcaaagggtcccaaatgagctttggacttacgctgtaatatgggcaagatttgagttttgtaaataaatacctaagaaaactt

SEQ ID NO: 866 - DNA, 1689 bp, Homo sapiens
ttcttttccagatggagtattttgtagggacaggctggggagcaatgcacagagagaaagacggaagtgttttctcgttatataaatcagatcggcagagaccagagccaaacccctgtttatcctagcctatgagctgcctgatttaaagtaacctctgttcccattccagaatcctagatttggagaaaaatctaagttgaaacctcagcgtggcagtccccagctgtaccccccattttttaatcaccccctcatccccaacttcagacctcaaagttttggctgtttccctttttttttttctttcctgcccacttcgtgaacgggatggagagacggggtcccgggaccctgcagatgggagcatgcccgaggccctgcctgctcacccgctccccggagagccagacaaaaagaaacagcatgtttctgaagacttgtgtgtcaggctttgtgcacatttcagacaggagccttcacggggctgagtggacacaaagccgggtgtctgaattcctgggccccagacactgatctacatctaaacagaagaaaaatcaattaaacaatctttggaaatccctccgagcttcggggcttctcggatggtgaaggatggcagctttttatcttgtggccagagaggaaatagcccttctccttggttctcctctctccagacctgcagtttccactttttgctttcttttttttctggagacacagtttcgttcttgttgcccagactggagtgcaatgtcacggtatcagctcacttcaacttccgcctcctgggttcaggcgattctcctgcctcggcctcccttagtggctgggattgcggctgcgcaccaccaggcccggctaatttttgtatttttagtacagacggggttttgccgtgttgaccaggctggtcttgaactcctgacctcaggggatccgcccgcctcggcctcccaaagtgctgggattgcaggcgtgagtcactgcgcccagccccacttttcactttcttcccaaagtttaggacacaagattccccaccattcgcctgccaaaaagatgccaaccttcttagatctgattgtttcacttaaacaaaacaaaacaaagtttaacatatatacacccagaacactcgttagtgaaattttaggcctgatatgatggctcgcgcttgtagtcccagcactttgggaggctgaggcaaggagttcgagactatcctggccaacatggcaagaccccatctctaaaaaaaaaaaatacaaacagccgggagtggtggcgcatgcctgtggtcccagctactcgggaggctgatatgggaggatcgcctgggcctggggaggtggaggctgcagtgggccctcatagtatcactgcactctagcccaggtgacagagctagaccctatctcaaaaaaaaaaaaaaaaaaaagaaaagaaatttggccaggcacagcggctcacgcctgtaatcctagcgctttggaaggctgaggcgggcagatcgcttgaggtcaggagtcaagaccagcctgaccaatatggtgaaaccctgtctctactaaaaatacaaaaattagccagaaatcacttgaacccaggaggcagaggttgcagtaagccgagattgtgccactgcactccagcctgggtgacaaagcgagactctgtctc

SEQ ID NO: 867 - DNA, 1829 bp, Homo sapiens
acttccctctggctctccccggagcagggcttgccgcttgtcctcctctctactcacaaaaccctcctggatgggatcctgctgccctttatgctgctctcccagggcctgggtgtgcttcgtgtggcctgggactcccgcgcctgctcccctgccctcagagctctgctgaggaagcttggggggcttttcctgcccccagaggccagcctctccctggacagctctgaggggctccttgccagggctgtggtccaggcggcctcggcccccctggggctgtggacaggagctctggctgtcctacgtagcttgtggagccgctggggctgcagccaccggatctgctcccgggtgcacctagctcagcccttttccctgcaggaatacatcgtcagtgccagaagctgctggggcggcagacagaccctggagcagctactgcagcccatcgtgctgggccaatgtactgctgtcccagacactgagaaggagcaggagtggacccccataactgggcctctcctggccctcaaggaagaggaccagctcctggtcaggagactgagctgtcatgtcctgagtgccagtgtagggagctctgcggtgatgagcacggccattatggcaacgctgctgctcttcaagcatcagaagctcctgggggagttctcctggctgacggaggagatactgttgcgtggctttgatgtaggcttctctgggcagctgcggagcctgctgcagcactcactgagcctgctgcgggcgcacgtggccctgctgcgcatccgtcagggtgacttgctggtggtgccgcagcctggcccaggcctcacacacctggcacaactgagtgctgagctgctgcccgtcttcctgagcgaggctgtgggcgcctgtgcagtgcgggggctgctggcaggcagagtgccgccccaggggccctgggagctgcagggcatattgctgctgagccagaatgagctgtaccgccagatcctgctgctgatgcacctgctgccgcaagacctgctgctgctaaagccctgccagtcttcctactgctactgtcaggaggtgctggaccggctcatccaatgcgggctcctggttgctgaggagaccccaggctcccggccagcctgtgacacagggcgacagcgattgagcagaaagctgctgtggaaaccgagtggggactttactgatagtgacagtgatgacttcggagaggctgacggccggtacttcaggctcagccagcagtcacactgcccagatttctttcttctcctctgccgcctgctcagcccgctgctcaaggcctttgcacaggctgccgccttcctccgccagggccagctgcccgatactgagttgggctacacagagcagctgttccagttcctgcaggccaccgcccaggaagaagggatcttcgagtgtgcggacccaaagctcgccatcagtgctgtctggaccttcagagacctaggggttctgcagcagacgccgagccctgcaggccccaggctccacctgtcccctacttttgccagcctggacaatcaggaaaaactagaacagttcatccggcagttcatttgtagctagaactgtgaggaggagcctgtgctgagacttctcagccccagaacacagctgtgtcctagagccagaagatggagaggaggctgcaaacccttagctgctctataaatataatcattgaggcttgattgtcccttgccatctcttgctttttcccttctttgatgtgataaacaaggggacgagacgagttgtcttttccccagcccagcagc

SEQ ID NO: 868 - DNA, 2295 bp, Homo sapiens
aagacagatgcagccaatagatacactgcagtggctgacaaaccaagtaaaaggagtaatgatggaaaaagtaaaaaggttaaaaatagttctcctgagaagcacattctggagaataagatagatgcaacaaaaatacatgttcccatggaaaccacaggggaccagggaattgaaggaatggcctatatggacgaaaatagaaatattacatttacctgtcccagaacaccatcagagctgataaataaatcatctcctctagaggttctgggatcagcagcctgtgaaaaactgcccactcctactcctcaagtagtaaaggaaggtgattcctttccagataccttggcaaaaaatgggcaagagatagccccagcccagatttccaaatcattaatggtagataactacaccaaagatggagtcccaggtcaagaaagacccaagggtccctctgctgttgtgccctctacaagcacaggaggagttgctctacctattacaacagccatagaaacagtcaacattcatggagatcactctcttaagaataaagctgagcttgctgattccatgaaaaatgaagcagggatcgatgaagggcatgtgataggagaatctgagtcagtgcacagtggtgcgtctaagcattcagtagagaaagtcacagagctagcaaaaggtcacctccttcctggagtgccagtagaagaccagagcctaccaggagaggccagagccctagaaggatatgcagatagaggtaatttcccagcacatccagtgaatgaagagaaagagactaaagaagggtctgttgcagttcagattcctgacttactggaagacaaagcacaaaagctcagtttttgtgaggaccaaaatgctcaagatagaaattccaaaggttcagatagtttgaataagaaggtagatctgactcttttgtctccaaaaagtgaaaatgataaattgaaagaaattagtctggcttgtaaaatcacggaattggaaagcgtttccttgccaacaccagaaatccagtcagatttcttacatagcaaagtcgaagctcctccttcagaggtggcggatacgttagtaataatgactgcttccaagggtgttcgactcccagaacccaaagataagattttggagacacctcagaaaatgacagaaaaatctgaatcaaagacaccaggagaagggaaaaaggaagataaaagcagaatggcagaaccaatgaaaggctacatgagacccaccaagtcccgaggacttactccacttttgccaaagtctacaatccaggaacaagagagacataagcaactgaagtccgctggaatagccaggccagaagaaggaaggcctgtggtgagtgggacaggaaatgacatcaccaccccaccgaacaaggagctcccaccaagcccagagaagaaaacaaagcctttggccaccactcaacctgcaaagacttcaacatcgaaagccaaaacacagcccacttctctccctaagcagccagctcccaccaccattggtgggttgaataaaaaacccatgagccttgcttcaggcttagtgccagctgccccacccaaacgccctgccgtcgcctctgccaggccttccatcttaccttcaaaagacgtgaagccaaagcccattgcagatgcaaaggctcctgagaagcgggcctcaccatccaagccagcttctgccccagcctccagatctgggtccaagagcactcagactgttgcaaaaaccacaacagctgctgctgttgcctcaactggcccaagcagtaggagcccctccacgctcctgcccaagaagcccactgccattaagactgagggaaaacctgcagaagtcaagaagatgactgcaaagtctgtaccagctgacttgagtcgcccaaagagcacctccaccagttccatgaagaaaaccaccactctcagtgggacagcccccgctgcaggggtggttcccagccgagtcaaggccacacccatgccctcccggccctccacaactcctttcatagacaagaagcccacctcggccaaacccagctccaccaccccccggctcagccgcctggccaccaatacttctgctcctgatctgaagaatgtccgctccaaggccaaagtagagaaaaaaacagaggcagctgctacaacccgaaagcctgaatctaatgcagtcactaaaacagccggcccaattgcaagtgcacagaaacaacctgcggggaaagtccagatagtctcc

SEQ ID NO: 869 - DNA, 2557 bp, Homo sapiens
agagtccactgcgcgggggcgggaccggggagctagctgcagactccacgttttgcaaagatcggttttgcctcagagtcaacaaactcttcagattggttccggtgtgtcctatgtttacaagtcagtggaaattaagcacaacacatataaattgaaaagtcaaataaggaaatgaattacctcccttgacggctctaattttacttggctaaagccaatttttaggttggcttgggcagaaaagtgaaaagagaatgctccactttaaccgatgtcatcatctgaaaaagataacacagaaatgtttttctagtatacatgttaaaacggataaacatgcacagcgatttctttcaagaacctttgcacttgcggaattgaggaagtcatggtattcaacccactctcttgttggagacaaaaatattatcctgatgggacctcctggtgctgggaaaacaacagtaggcagaataataggtcagaaactaggttgttgtgtcatagatgtggatgatgatatccttgaaaaaacctggaatatgagtgtgtctgaaaaattacaggatgttggtaatgagcaatttttagaagaggaaggaaaagctgtgttaaacttctctgcatctggaagtgtgatttcccttactgggtccaatccaatgcatgatgctagcatgtggcatctgaagaaaaatggaataattgtatacctggatgtacctctactagatctaatttgtcgtctaaaattaatgaagacagataggattgtaggtcagaattctggaacatctatgaaagacttacttaaatttagaagacagtattataagaagtggtatgatgctcgtgttttctgtgaaagtggggcttccccagaggaggtagctgacaaagtgctgaatgcaattaaaagataccaagatgtggactcggaaacattcatttcaacaagacacgtttggcctgaagactgtgaacagaaggtttcagcaaaattctttagtgaagctgtaattgaggggttggcttctgatggtggcctctttgttcctgcaaaggagtttccaaaattaagctgcggggagtggaaaagcctagtaggagcaacctacgtagaaagagcacagatactgttggaaagatgtatccatcctgcagacatacctgctgccaggttgggagaaatgattgaaactgcttatggggaaaactttgcctgctcaaaaattgctcctgtcaggcacctttcaggcaaccagttcatcctggagttgtttcatggaccaacaggatcatttaaagatttgtctttacagcttatgcctcatatttttgcacactgtatcccaccaagttgcaattatatgatacttgtagctacttcaggagacacagggagtgcagtcttaaatggttttagtcgtctaaataagaatgataagcaaaggatagctgtggttgcattttttcctgagaatggagtaagtgattttcaaaaagcacaaataattggcagtcagagagaaaatggatgggcagtgggtgttgagtcagattttgatttttgccagacagctataaaaagaatttttaatgattctgattttactggctttcttactgtggaatatggaacaatcttaagttcggctaactccataaactggggccgactacttccgcaggtagtttatcatgcttccgcatatcttgatcttgttagtcaaggatttatttcttttggaagcccagtcgatgtctgtattcccacaggaaactttggtaacattttagcagcagtgtatgccaaaatgatgggaatcccgattcgaaaatttatctgtgcctctaatcagaaccatgttttgactgattttataaaaacaggacattatgatctaagggaaagaaaactagcacaaaccttttcaccgtcaatagatattctcaaatcttcaaacctagaacgacatttacacttgatggctaataaagatggacagctaatgacagaattatttaatcgattagaaagtcagcatcatttccagatagaaaaggctctagttgagaaacttcagcaggattttgtagctgactggtgctctgagggagagtgcctagcagctattaactccacctataatacttcagggtatattttggatccacacactgctgttgcaaaagtggttgcagatagggtgcaagacaaaacttgccctgtgattatctcatctacagcccattactcaaagtttgcacctgctatcatgcaggctttaaagattaaagaaatcaatgagacttcatcaagtcagctctatttgctgggttcatacaatgcattacctccactgcatgaggctttattagagagaacaaaacagcaagagaagatggagtaccaggtctgtgcagctgatatgaatgtcttgaagagtcatgtggaacaacttgtccaaaatcaattcatatgaaagctttcagagtaaatttttttttctagctataagcatgcaataataaatctcaaacactgatttgg

SEQ ID NO: 870 - DNA, 2363 bp, Homo sapiens
atcagctcttctgtgcaaccaaaacagtggagctgtgacacagaccttatggcccacaaggtggaaaatagttactctctggctttttacagagaaaagtgtgccaagccctgttctctacccttcctacttacgcagtgggcaaagggccaggcgggatgtaggctcaggccaaacggaagtgggcattcacccgggtacatggctgcatgccaggagtgtttgccaagagaccagctagggtaggagatggcaagagggaaggaaagaaaagcagacgtaggtgtggtcagaaagggagacgggaacgggcccaacatccatttcaaggtttctttttagagctggctccaacctcaaaaagaggggaggcatctctggccccgctctggcagcacagtgacgccatcctcctacagcttcgggttcgcacaatcagtcctcatgcacggcacgtccaagactacacagagacttcatggcctggccatggacccaaccccaggtttttcattctctatgagggcagatcattccactccgagacaaccaatttacagaactgagaaagcgacactctgatagatggacaaaagcctttctacttcatgctatcaaaatcaacactattaaaacttacacactgacaacgtatttgggcaacagatggatgaagcagccaagtgagagggcctgaaatctcacctgatggatgttacattttcttatgcagaacacagaactgcttcacttacccttcctgtaattacataaaatttccaattttacagagaatgtgatacggaatgggatataaccttcctctctcctgtgttaagcctagaatgaatactaagcataaaaatggaggaggggcgttgagacaaccacccacccagcacccgcaacggctttgttcacctgttcatgcgtcccccctacacaccgtgagctcctcctggcacccgcgcagcaccgagtggctgccttctctgaacgccctccctccctggcagggcggtggaggaggcggaggccccctgcctttgagtgtgaagacgggaggacaatgagacacagggcccactacacctgtgtggccggaagactactttctcattcccctttgggctctgctcccctggctggagctggggtccttgttgtggaaattttacatatttaattactacataaactgatggccaggggtgagacaagggcagctcccttggcaatgcaagtgaaatgtttcagaaagactcgctaaaggtgaatcacttaaaaacgtggctggcgggccgggtgtggtggctcacgcctgtaatcccagcactttgggaggccaaggtgggcagatcatgaggtcaggagatcaagactatcctggctaacacggtgaaaccctgtctctactaaaaatacaaaaaattagccaggcgtggtggtgggcgcccatagtcccagctacttgggaggctgaggcaggagaattgcttgaacccgggaggcgaaggatgcagtgaggcgggattacaccaccgcactccagcctgggcgacagagtgagactctgactcaaagaaaaaaaaatgtggctggcaagctaaatgacattaaacacctgaggaaaatgcagtcaactctaggagaactctgggcatggatggcttcaccagtgtccctgtgtcatggcgccatcttggactggaaatcaatgatgtcatcatgcatgtgggttacacaggagacaccatggccaaacccacactcagaaaagacctgcacccaacagaaagactggaagacccatgcacactcggcttttccttgtatttttaatgattcttctagactttgactttttcaactcactgcccaatcacttctggagcctcacaagatctagttcatcattctggactctactgtggctgtggggggtgaaggttttaatccaaggtttcgaaaatcaccacctaaaagcaagccaaggagagtgtctcaaggaaggcgtcctaggctttgattctgacctcggaactctctcgcatgaataagtggggggacaccatgagccgcccatgttggggggaggcggcctggggaatgaagggtctggagattgtcataagtcaaacatgtgggttcacgtttctcacaccagctccacgacctttgctaaatgactcatctttcctgggcctcgttttcctcaactgtaacatggggctctaacgtacatcaagttcatgtgggtttctcttgctttaatttttcttccagcctgtagaccatgttgagggcagggaccctgtcttttttttttttctttgaaatataccagacactgagtgccaaat

SEQ ID NO: 871 - DNA, 1733 bp, Homo sapiens
agtaatgtaaagctcctgccatgaaggagacccaaaggcagagcccctcagcactgcctcacaagaatctgtgaaccgccgggccctccgacaggagagaaggaagatgatatagacggacatcctccagaaagtcacccgggatgcctgcggcccgaccagcagtgacaaaggtggggtgaaggaggcgccctgccacgctgcggagtcagctcccagatccaaaatgcccctcgtggagcctccggagggaccaccagtgctctcgctccagcaacttgaagcgtgggacttggatgacatccttcagagtctggcgggacaagaagacaaccagggaaatcgtgcacctggaactgtgtggtgggcagctgaccaccgccaagttcaagactgcatggtgccgagcgcccacaacaggctcatggaacagctggccctcctgtgcaccacgcagtccaaggcctctgcttgtgcccggaaggtgcctgccgacactccccaggacaccaaagaggcagattcaggaagcagatgtgcctcaaggaagcggggctcccaggctgggccaggcccgcagctggcccagggcatgaggcttaacgcagagtcccccaccatctttattgacctgcggcagatggagctaccagaccacctgtccccagaaagctccagccacagctcctctgacagtgaggaggaggaggaggaagagatggcagctctgggagacgcagagggggcatctccttcctccctggggctacggacctgtaccgggaaaagccagcttctccagcagctcagggcctttcagaaggggacagcccagcccgagctgcctgccagcaaggggcccgcgggtgggagggctcaggcccttgaagacacagctggatcacgaactgggaggaagcaacacatgaagctctgtgccaaggggcagagcgcccaggctcgactcccaagaggcaggcccagagccctgggggatgttcctgagccaggggcagccagggaggccctgatgcctcctctggagcaactatagctgcctcaggatgtgtcctgctgtctgccccgtggtaagagcagagaaatcatcaccaccttgggccccacggtgccacgggctcaggcagcacagtagggcgccgggcctttgggacagtgtcccagcttcccctggggttcacccctggctgccaggccactgaggatgggcatgggtctcttctcatcaagccttgtaccaggcaaaagacaggccctgcttggccgtggtcactggccgccaagatcagggctacagatgtctgctctctggaccccacgtgatctggccactggggacccccacccgaccccactcccagtgatgaggggcattttcattgcaagtcaaaggcaagacaggcttccataaagtcccaggaggtccctcctgtagggcacaaggccaggctgcctcccagcccccaggccctctcccacctacagagaccctcccctgccccctccactccggggcctgtgccgccagaaccgggctctgcccccatacgctgccctcgcagcctggcggcctccgctgtggctgcctagctgtcaagagcaaaggctttttttttcttcaaccccattttcttccatttctcccacctttttaatgccagtaacctcactgagaatgttttacagtgatggaaaataaactctgttccaagttc

SEQ ID NO: 872 - DNA, 2417 bp, Homo sapiens
actgcagagtctcctaagtcacatctcttcctttgcaagagtaggcgaagaaggatctaagggcttggcttgtttgaaagaaccacaccccgaaagtaacatctttggagaaagtgatacaagagcttctgcacccacctgatagaggaagtccaaagggtgtgcgcacacacaatggtgcctgaagaagagcctcaagaccgagagaaaggactctggtggttccagttgaaggtctggtccatggcagtcgtatccatcttgctcctcagtgtctgtttcactgtgagttctgtggtgcctcacaattttatgtatggcaaaactgtcaagaggctgtccaagttacgagagtatcaacagtatcatccaagcctgacctgcgtcatggaaggaaaggacatagaagattggagctgctgcccaaccccttggacttcatttcagtctagttgctactttatttctactgggatgcaatcttggactaagagtcaaaagaactgttctgtgatgggggctgatctggtggtgatcaacaccagggaagaacaggatttcatcattcagaatctgaaaagaaattcttcttattttctggggctgtcagatccagggggtcggcgacattggcaatgggttgaccagacaccatacaatgaaaatgtcacattctggcactcaggtgaacccaataaccttgatgagcgttgtgcgataacaaatttccgttcttcagaagaatggggctggaatgacattcactgtcatgtacctcagaagtcaatttgcaagatgaagaagatctacatataaatgaaatattctccctggaaatgtgtttgggttggcatccaccgttgtagaaagctaaattgattttttaatttatgtgtaagttttgtacaaggaatgcccctaaaatgtttcagcaggctgtcacctattacacttatgatataatccattcacacattcatttattcatttattcatttattcatttattcattcataaaatgagtgtttagtgaacatttttctatgtgccagagactgctggagaatgcttttgcagaaaaacagagggagcatgagcatctgctcttcttttcttttcttttttttttgaggcggagtcttgctctgtcgcccaggctggagtgcagtggcgcggtctcggctcactgccagctccgcctcccgggttcacgccattctcctgcctcggcctccccagtagctgggactgcaggtgcctgccaccacgcctggctgattttttgtattttttggtggagacggggtttcactgcgcccggccacatctgctcttattttccgacagctgacgggtgaagtgcctgttatgggctgaattgtgtcccctcaaattcgtatgttgaagccgtaacctacagtacttcagaatgggagtctatttggagatagaaccttatgagaggaaattaagttgaaacgaggacattaggagccttaattcaatctgactgatgtcctatgaggaaattcaggcaggtaatgtggctcacgcctgtggtcccggcactttgggaggccgaggtgggtggatcgcgaggtcgggggttcgagaccagcctggccaacgtggtgaagcgccgtctctgctggagaactcaaaaattagccgggcgtggtggtggatgcctgtggtcccagctactcgggaggctgaggcaggagagtcacttgaacctgggaggcggaggttgcagtgagccgaggtcacgccattgcattccagcctgggcagcaaaagcgaaactctgtctcaaaaaaggaagaaaaaaaaatagccgggtatggtggcatacgtttgtagtcccggctactcggggggctgaggtggaaggatcgcttgagtttgaggttgcggtgagctacaatcacgccactgcactccagcctgagtgacggagtgagaccttgtctcaagaaagaaattaaagaaataagtaaaaggatatttgaacacacacaaagacaccaagggtgtacgtacacagagggccgaccatgtgaagacagcaagagtgtggccatctgcaagccaaggagagagtcctcagaagacaccaaccctgctggcaccttggtattggacttccagcctccacaattgagaggaaataagtatttgctgtttaagtaacgcagtctgtgccattttattataacagccctagcaaaccaatcatgcagtactgatgtcagtatttgatgtactttctgtgtttggtcaaaaggttttccatttcgttctgatttattacttttagctgaaagcagactatgcagcaagatacacaagaacacaagatatccaaagaaggcagtgttcttgcttaggtccaataaattacttgggcttcttg

SEQ ID NO: 873 - DNA, 1646 bp, Homo sapiens
ctatataagtattatactactattttcagaaatgtagcattttaactgtgtttctgaaattggctagaatgagagataatgtgtttggtttaaaacatggtcaaccaactgtgcatgagagttttggatgagttttttggtttgtttcttttgactcttgaaacaatgtaaaaacctttcaaattaaattctgtacgtagaagttaggcatgtcagactgtgaagcagctctaaagcaacaaggatgacaaaaacgactccacatttgtgactctgatgtctacctagtaacttgttttatatggaccacgataactcattgcaatggaatactagagagcaaattcaagatagaaaacatttagtgatgtgaataccataacgaggaagaagccaacgttgggtaactgttagcaattgctagaatgggtcgactgaaagaatttcaaaatctcatctggaaaaataacaatcaagatgctttaagcaccagcacttctcaaatttcattaagtgaagagaaaggtaaacagttcatttatcattcagtcaaatttattaagaactacctgcagagactccctcagccatttaagaaaccctactggtggctgggtgctgtggctcacgcctataatcctaacactttgggaagccaaggcgggtggatcacaaggtcaggcgctggagaccagtttggccaacatgatgaaactgtgtctctactaaaaatacgaaaattagccggacatggtggcatacacctgtaatcccagctactcaagaggctgagggaggagaattgtttgaacttgggaggcagaggttgcagtgagccgagatcgcgccactgcactccagcctgggtgacagagcaagactccgtcttaaaaaaaaaaaatctcactggtatcacttctaggctccctttgagagcgaccgactcctggctgtgtcccactgagacagtgtgaaaggtgactgagaacatgatttcattttcaggcctggaacgaatgcttaaaacgtactccagcacctcctccttctctgatgcaaagagccagaaagacacagcagcgttaatggatgagaacaatttgaaactagaccttttggaagcgaactcctacaaactgtcatcaatgttagcagaacttgagcaaagacctcaacccagccatccttgtagtaattccatcttcaggtggagggaaaaggagcatactcatagctatgtgaaaatatctcggccttttttaatgaagagattagagaatattgtgagcaaggcatcttctggtgggcagagcaatccaggttcttcaactccagcccctggtgcagcccagctcagcagcagactttgcaaggccttgtattcttttcaagccaggcaagatggtgagttgaatttggaaaagggtgacattgtgattatacacgagaaaaaagaagaaggatggtggtttggatctttgaatgggaaaaaaggccatttttctgccgcttatgtggaggagttaccttcaaatgctggcaacacagctacaaaggcataaaacaagactctgaacatactaccttcacactcggtaatcaacaatacagtgtggttcaaataagaataaagtgctcttaccttt

SEQ ID NO: 874 - DNA, 2927 bp, Homo sapiens
gatgcttggggaccggctcctcggtcacaccccagtcctgctctgaaggttgccgttttccaaacagaaggatggtagctagaggggagatagcaagattctggagtctggaaagccttcacttggtttcttcagatggaggtactgagccctctgccttagtggatgacaacggtagtgaggaggacttcagctatgaagacctctgccaggccagccctcggtacctgcagcccggcggggagcagctggccatcaatgagctgatcagtgatggcaacgtggtctgcgcagaagccctgtgggaccatgtgaccatggatgaccaggaactgggcttcaaagccggggatgtcatccaggttctggaagcctccaacaaggactggtggtggggccgcagtgaagataaggaagcctggttccccgcgagcttcgtcagattgcgagtgaatcaggaagagctgtcggaaaactccagcagcacccccagtgaggagcaggacgaggaggccagccagagccgccacagacactgtgagaacaagcagcagatgcggaccaacgtcatccgggagatcatggacaccgagcgggtgtacatcaaacacctcagggacatctgtgagggctatatccgacagtgccgcaagcacacaggaatgttcaccgttgcgcagctagccactatttttggaaacattgaagatatttacaaattccaaagaaagtttctgaaagaccttgagaaacagtacaacaaagaggaacctcacttaagtgaaataggatcttgctttcttcaaaatcaagagggctttgccatctattccgagtactgcaacaaccacccgggcgcctgcctggagctcgccaacctcatgaagcagggcaagtacagacatttctttgaagcctgccgcctgctgcagcagatgattgacatcgccatcgacgggttcctgctcacaccagtgcagaagatctgcaaatacccgctgcagctggccgagctgctcaagtataccacacaggaacacggtgattacagcaacataaaggcagcatatgaggccatgaagaatgtggcctgtctgatcaacgagcgcaagcgcaagctggagagcatcgacaagatagctcgctggcaggtgtctatcgtgggctgggagggactggatatcttagaccgaagctcagaattgattcattctggggagctgaccaaaatcactaagcaaggcaaaagccagcagcggacgttcttcctgtttgaccaccagctggtgtcctgcaagaaggacctgctgcgcagggacatgctgtactacaagggccggctggacatggatgagatggagcttgtggacctgggggatgggcgcgacaaggactgcaacctcagcgtgaaaaatgccttcaagctcgtcagtaggaccacagacgaggtttatttgttttgtgccaaaaaacaagaagacaaggcgaggtggctgcaggcctgtgcagatgaaaggaggcgggtgcaagaggacaaggagatgggaatggaaatttcagaaaaccagaagaaacttgccatgttaaatgctcaaaaggcaggacatggaaagtcaaaaggctacaacaggtgccctgtggccccaccgcaccagggcctgcaccccatccaccagcgccacatcactatgcccacaagcgtcccccagcagcaggtctttggcctggcggaacccaagaggaagtcctcgctcttctggcacaccttcaacaggctcacccccttccggaaatgaaaacaggaggctgtgcttccatggagctgggtgtcaagagaagaactgtctttgtttcttgtgtgcttcaatccagggaaagtttcttggacccagtgataaaaacttccttttagggatcaatgaaggagagaaggtcttggaatcaccttcagtctttggagacccagctgcctttgtggaagggaggagacggtcatgacacaaagctttatcctacacagaaacacccgtgacccactatgagatggcccagatgtgggacccggtaccatgctctaaagcgagtgattaggcagcagctgaagccacccctgctgatgatgagcaagtgcctgctgcaggtccaaacacagcatccagggctttgcagttcctaaggagtgatgaggttagaggatcacttctgcatttgattttcaaggatgccgtcaagacggggttgacacaatgctgcacgtgtctggtcacacttagaaattgagctcttactctcttctgtaatactgggggacctacagctgccgtggggctgaccacggtgttccctggcatcgtctgtgtccacacagatgctaactggtagtgcaaatgtcatcctgcaaggttcctcttcctgcaagcaaagtggagagaaagaagatgcatctgtcaccttcatcagggtcctcagtgcagagcaacttacgcatcctcaagaatccactgcttttcaggcaaggagggagaaatcctgctgcacactggctttgtcccggagtcggattccctcctgcctgcacgccttcagtaactccgagcagaaatcacatcttgcccacatgctgtaacctaagaaactgctatgcaaggctgggtgctgtggctcatgcctgtaatcccagcactttgggaggccaaggcaggtggatcacctgaggtcaggagttcgagacaagcgtggccaatatggcaaagcccagtctctactaataatacaaaaattagctgggcatggtggcgcatgcctgtaatcccagctactgggaaggctgaggtaggagaatcttttgaatctgggaagcggaggttgcagtgagctgagatcgcaccactgcactccagcctgggagatacagcgagactgtctcc

SEQ ID NO: 875 - DNA, 2389 bp, Homo sapiens
gttcgcggggcggggcgaggcaggatatcacgtgaccctgcgagtggctcagatccgaactggcggcctttctccccttcccccaccccagtctgtcgcccaggctggcatgcaatggtgcaatgatggctcactgccgcatagacctcctgggctcaagtgatcctcccacttcagcctctcagatagctgagactacagatgtgagccaccacgctgggctaattgaattcttggcgttaagcaattcttctgccttggcttcccgaagtgttgagattacagagattaagcttcctgtggaggtggacattggactaacccaagccgaggggccagatgagactaagaatacagagccccaaatgggcttggtgatagaacctccccaatgccagtttgcccaacaacatgaacagagaaaggaggctggaaacattgaatcaggagtggaacctccagatcgcatcagacccatatactctgggaagttttttgatcggaccccttgctggccaagtgcaggaaaagttattccagttggttacagagttgcatcctgcttgactgaaaaacttcccaggctaattactccacctgaagcaaaaaagtatttcaacttcagatatccacctgctggagtagaaagagtattttacggaagagcaaatgatccccagattgcaccttatttgacacatggaattagatctaaaatttcagtactggcaaacacattgataaacccacagcctattaccacatttcaacagaaaattaaagataaaaaagaatctatatatcttagcaatcgacgagcaccattaggaaaatctcacgatcaagcaccaggattaccaaaaggcatggacacaaccaatacgacatttgggacagcagtcatcaaagaatactctgctaaagatgtggtgaatccaccaaaatcctatgaagaagtatttaaagaaggaaatgaaggacatgatttgtatgttgtttctcacaatgattattatgcaggagaggcaaagaaccgaaagtataacccatcaagtttccataggtgtagtgtgtatggagtaccaacaccacattttaatgatggacgagccatggcaaaatctctatattggctccatgaactacaaatgaaaagaggagctaagtttgtatccaaaagagcagatgatttcaaagaaaagtttcaacataaacttggaagagttttagatcccattgcagaaacaatgaatgttcccccagactgcacatttggagcttgtctccgtcctgaggaatatggagttggtgatctcatccataatagacttccggatgaatatcttcgaggcaaggatagacagcgagccctgattgcagcagttcggcatcacctgaagaaagttaattaccaaaagtttgacactttgctggcagccttcaggcactatgacaagaagggagatgggatgatagataaagacgagctgcaggaagcttgtgaccaggccaacttgagtttagatgacaagctcctggaccagctatttgactactgtgatgtggataatgatggcttcattaactatctggaattcgcaaattttcttaactgtaaagacaaaatgcttcttaaagagtatgaagagagggtcattattaaaggtagaaaaccagattgtgtaaaccctactgaggctaatgttgaagaacctgaacaaactctcctcataaagccagaagatattgtcttaaaagaagcaggaagcacagaaaagactctctggacacttctgagaccaagtgataaagtttccaactactataagacaacttcttctgagatcaatgcaattgtaggagccattccttctacttgttaccccatttgtggtgttccaaccattcgatctgacattcctgctccccgaattcgtcgcaccagtgacagaactaattatggtgaagaaggtagtgcatattcactactatatcctaccatttttgcccggaaaggagtgtttgaaagagacttcttcaagaccagatcaaaagaagagattgcagagatattgtgtaacattggtgtcaaactgtctgatgaagaatttgaaaatgtatggaatcttgcatcaaaaaagcatcacagaggagaagtttgtgttgagaacatcagaaatgttctagatgagctacggcatgcagaccggatcaagtgtaaaacactcatgtgatatttttggacttcattcattcaagcaaaagaattattaactctgtgtttatctaaaatgttgaatccattctggttttagatattatgttagagttcacagtggtaagactcatatgcctgtatgtgttgctaataaattagattttggatttt

SEQ ID NO: 876 - DNA, 2762 bp, Homo sapiens
tgtttggaggaaaggagggagaagaaaggagggatactgtttctcccatgaaatagtctaattggttgggttgatggcagaaggaaacataggggagccttccagctcacagccaagggttgggctcttaaacactatgcctagtgttttctgaatgctgtcttcatggagcccagctcttactctctttgtactttacatctcacccccactcattacagatgctcataacattcttaaaatattttagtacttggcatttttctgttttcagtcagctagaacacactagagtcctttcctcagatggcataatcctttataggctctgagcctgcctagccatctcctatcggtgttattactcctcatctcaggctctgagatgatactcagaccctaaactgattggactttttggaggagggtgccagtagagaggtcaggaagatgtggagatgatgatggagagagatgtttttattttattttattttttcagacagagtcttgctctgtcgcccagcctggagtgcaatggcacgatctcggctcactgcaacctccgcctcccaggttcaagcaattctcctgcctcagcctcccatgtagctgggattacaggcacccaccaccatgcccggctaatttttttatttttagtagagatggggtttcaccatgttggccaggctggtctcgaactcctgacctcaggtgatctgcccgccttagcctcccaaagtgctgggattacaggcgtgagccaccgcgcccggcctttattttattttttagagatggtcttgctgtgtcacccaggctggagtgcagtgatgcagtcgtagtctactacagtcttgaattcctgggcccaagggttcttcccacctaagcctcccaagtagctggaagtacaggcacatactaccaagcccagttcgttattttaagtttttgtagagacaggggtcttactatgttgcccagactggtcttgaactcctgtcaagtgagcctcccacctcagcctcccaaagtgctatgattacaggtgtgagcctccatgcttggatgagatgttgtttttaatgtttttggttttttggttttgttgttttgtttttttgagacagggtctcactctgtggcccaggctggagtgcagtggcaccataatggctcactgcagcctcgacctcccaaggctcaggtgatcctcttgcctcagccaccccttccccggccaccaagtacctgggactatgggcttgtgccaccatgcctggctaatttttttatttttagtagagatggggttttaccacgttggccaggctagtgtccaactcctgacctccaaacagctaatttttgtatttttaatagagacaggttttcgccatgttgcccagcctcgtctcgaactcctgggctcaaatgatccacccacctcggcctcccaaagtgctgggattataggcatgagccaccacacctggccttttcagtttttttatttttattttttctttgagacggagtctcgctctgtcgcccaggctggagtgtagtggcgtgatcttggctcactgaaacctccatctcctgggttcaagcagttctcctgcctcagcctcctgagtagctgggattacaggtgcctgccaccatgcctggctaatttttgtatttttagtagagacagggttttgccacattgcccaggctggtgttgaactcctgggctcaaatgatccacctgccttggcctcccaaagtgctgggattacaggcgtgagccactgcacccggccctttgtagtgtttttaactaaagaatttgtagagttgcccaggccaggaagcctggtggctctaaagggtaatagaccttgtcagtaacagataaggagtggtaagaggacattactcatattgaagatgaagaccagactttgctgcttcacaggccatgcgctgggttgggccacttcagctccactccattcgttttcctttcctaacttgacaatcagctcactcaccctcccttagtgcctccagtgcctactcctgtcactccaatgtcaacccattgggagttgaggcctgtcactccaatgtcaacccgtgggctgttactttgcgtcatatgatgctgtgagaggccttgctggaatgtcctaggaatccctagtagcagtggctattagtcttctagaaaagaactattgctgctgccttgtgcacatgccccaccttctgggcaagtggcagcattgcgctcatgaggggctttgcattcttagccaagggcaataaactgggtgggtgatctggcccaaacttgcccctaggctctgctagccctgaatcagcaggcttcagagacgagggtgggtgttataaaagccagtctgtaaagggtaaattccaaatcttgtgccttgttataccaatccttcctgattcccgtttaaaccaactactctatttctgtgctgcctacattttcaatcctcccacgcattagcaaattcctgaaatttcctcatttggtaggccttccataggagtcagctatggacttccataggagttggcagctaaaaccagactgtgagcttctgtctccgttctgatttttgctgcacctcccaggggacagtccccacatgattacaaaagccaggtgccctcatcacccgttacccctgacctgtccacttgttttgaataaaccttcattctccaagcag

SEQ ID NO: 877 - DNA, 2323 bp, Homo sapiens
aagcaagaagggacttgccccattgcacaggaggggaaaccgggactgatgatgaagcagttaggctgcagctgctggatgtgtctcctgatccctgagacccactcctcccatgcatcctcagagtccctcaaaccccacatccagagccagacaggatgaagcgactaagacacagagcactgaagcaatctgcccctcagaagtcccccagaggcgcgtgaaccctgagctgccccccagactctgggcttccccttcttttccccaaacagccctagctccccccaggcactcgcgttgctcagacctttgtgatggactctgagtgttgtgtgtgcatttctctgtgtttgttcatgtacaagcgtgctcgtgtgtgtgtgtgtatagatgtacacatgtgcatgggtgtgtctgggtgtgtgatttgtttgcatatttgtgtgtggggcacgcgcatgtatccttggctgcatttgtgggtgcgtgcataggtgtgcttgtgtgtgcatttgtatgtgtgcacacatgtgcgtgcatgtgcatggggggattacatgcaggcatgtgtgtatccttgtgtgtttgtgtatgtgcatgtgtgtgtgtgcatgtgggaatttgcatgcatgcttgtgtgtgtttgtgtatgtgcatgtgtgtgtgtgcatgtgggaatttgcatgcattcttgtgtgtgtttgtgagtgtgtacacgtgcatgggcgtgtttgagtgtgtacatttgtgtgtgcacttatttgtgtgcatctgtgtgggggcatctgcatggatccttgtgtgcatttgtgtgtgtgcacacgtgtgcacgtgtgtgcattcatttgtgtatgtgtgtgggtgtgtgcatgtgggcatgcgtgtgtatctttgtgagcatgtacgtatgtgtgtgtccttgtgtgcatgtctgtgcgtgtgcatacatgtgcgtgtgtgcatttatgcgtgtatacttgtgtgtgcacttgtatgtatgcacatatgtctggaggacatggccttgccccagggtctggggacccttccctgcctgccctgccctgccctgccctgccctgaagtctggggaacttggccctgctccggggtctggggaaccctgccatgggcccctgcctgccctgggcccctgcctgccctggcggctcaccttgctctcgggcctgctgaatggaatctgcagccgctccatggcctcgatcatggcccgcatggacacgaagatgttctggtagaccaggggccggaagcccttgcgctcctcctccgagtagccggcgccgtggatgatccgcatctgcttgatgaagatgagacacggaggaccagagaggtttagtgacttgccttgggtcacacagcaagtggaaccccaggggagtaaacttggggtcgtgtgagtccttcaccaacaaaatgggacacggccagtagagctggggaaataaatgataatcctgttgccacccgcgacacagatttgatgactcagggatgggtcatcacccgaagcctgaagagctgcgtgagaaccccctctttgcaatccattgctgtcctgaagccacaaaggattctgggacctctccattgccccccgacccccagacatcccccagctcctggatagaaatggggggagtgatctgttttaggatacccccaaaggccatgcggcccagacgggaagttcctgcttcctcctgggcacggaggaggacaggaggaagtggaaccggcagatgccaggaaggaactgggttaaccgtgccaagccccagtcatcacaaggcaactggagccagctatgtgcacagagtccagcaccaggccctcacaggaaacgcagctgctggggaagtggtgagccaggccaggcagccgcaggggcaggaggctcggcctctcagtcccgctctggctcaaactagctgctgacccccaatcaatcctgctgcctccttgggcctcattttccccatctggcactggggttctgtggtgtttctgtcccccaaggcaggcgaacagggcagtcaggagcatggactttggaaccagaattctaggtgcgagtctcagctgtgtgaccttgggcaagtcgctctgcctctctgagcctcagtttatcctttgggggaaactaggagtgcctgcctcaaagtgctaagaacaggccgggcacaatggctcacatctctaatctcgtcactttggggaggccaaggcagatggatcacctgaggtcaggagttcgagaccagcctggctaacatggtgaaaccccgtctctact

SEQ ID NO: 878 - DNA, 2458 bp, Homo sapiens
ctttttcttcttccttttattctttcctgtcttgttctttccttcctctctgtttctccctttctccctgttttccttttttttttttgagatggagacttgttctgtcaccgaggctggagtgcagtggcgtgatctcagctcactgcaacctctgcctctcaggttctagagattcttgtgcctcaacttcccaagtagctgggattacaggtgccagccaccccacccggctatttttttttttaaggacagatggcgtttcaccatgttggccaggctggtcttgaactcctgacctcaggtgatccgcccacctcggcctcccaaagtgctggattacagtcgtgcgccactgcgtcccgcctccttttcttttttcttctctcctccgtctttttctatcctacctccctgcctctttcctctctcctccctccttttcctttttcttctctcctccctccctcctgtttttctccatcattccctctcccttcctttctttttctcccgttccccgtttgcctccctcccctttttctttcctgtctccctgtctcctttgctcttttcctccctttctcccgtccctccctccccgccttccttttcacttctttcccttcccattgcttccttgcgtttcctgcctttccctgtctctccctttctttcctgcctttccctgcctctctctttcctgcctttccccatctctccctttcctgcctttccctgtctctccctttctttccctctcctcccactctccctccttcctcccttcttttctttcctcttctttccctgtgtctttcttttttctttccttctctcttccttttctctccctgtgtctttctcgctcttgtttttcctttctctcctttgtgtactgagaaaatgacagtccccggctgtgggtgggcaggagtgacccgccccagagagcggggtcaccctgggtgactcctgggtgcagctgtgagccctgcctgaggcttttcctgacctctggggagggcggctcagcctggggctggaggttggggccagctctggaggctggagtggctgctgggcggcgggacgggtgtctcagaagtcactgaggcatgggtaggtctaaccttgggacattgctgtggggagggctgtggagaccaagcacattcctgaggctctgccagggcagcgggggtggacagtgtcccctgaggacccaggaccaagccaggctcgctacaggggtcctggaatagaggacagaggccaggagcgctgtgggtgctgggcaggggtggggagtttgctggggagctgcgccttacagacctgtgtttgtttcccagcctcagcgaggccgggctggacggggccctggtgctggttttcagtgcctcagcgaggccgggaccagagctgctatttccagatgaggctggctcgcatctgctctggccggggctccaggcctgagccctgcaacacggcgttccctctccaagtctgcaaagcctgtcttaggggagagaagaagtttccttccatgcgggtggggacggctaaccatgtccagacactgagaccggtgctctgtgtgctcagccttcagcctgcactggcttggtggcttggtgacccgccagcagggtggtgctgtctgtgggctctgctcaagctcctctcagagccaggaggatgcccgcctgcttgggcctggctcccaggatgtgcttggcaaatgcttctgggatggatggatggatgggtgagtattcctgtgcccgttgttaagctcagtggcttctttctcccctcataaccagacttcttaaatagtctatctttgttgtttattatctcatttctctacttactattatttggttttagcactgttgacccaaattgctcttcctcagcgtcaccagcgattagtagagtagctaaatgctagtgatatgatttagtccttgtcttacttaatacctagataatatttggcactgtgcaccattgtcttaaaattctctttcttcctggtctctgatacttctcacctggatttatcctacctctctatttcttccttgtcttgtaactccccttctacctgggaggcctcacctgctgtcacagctccattaaacctctatgattcagacagagttcacatcacatttcctagctcagacctctcctaagagacccacactaagaacctggcggtggcggtggtggaggtggcggcggacgggagcgtgacaggaggcggtcgagagatcgtgaaagatctgggcgattctgagccatgccatttttaccttatgtctgctagaaagtgttgtagttgattgaccaaaccagttcataaggggaattttttttaaaaaacaacaaaaaaaaaacatacaaagatgggtttctgaataaaatttgtagtgataacagt

SEQ ID NO: 879 - DNA, 3449 bp, Homo sapiens
atatgcacatgtacacacagacacacagacacatgtgcacacatacccacacacataaatttatacacaaacgcatagacatccacacccatgcacatgtgcacaaatgtacacacatgcaggcactcatgcacacgcacacacacacaagggcagtgcccagggcaaggcgtccacctagaggaaacctgggcagagatcttcccactgggcctgggaaatgatcacatcttttgggggtgattttggggttttgttcatgtatctatttgttcactcaaaaacatggactgagaacatactaagcactgcacacctggcgaggcatgtgggctccaacactgagcagggcagagccagggctgacccgctggaagcctctggcctggcagggaagacaagtgggaaagccagtaactccatccgggggtgagggtgagagggagacaggtgggaaagccagcaactccatccggggctgagggtgagagggagacaggtgggaaagccagcaactccatctgggggtgagggtgagaggcaggacgtcctggaaccacagaggcttgacatccagcccagatcagaggaggacaaagcaggaaggacttcctggaggaagtgacttataaggtgagacttgaaaaattaggaagaatcagaaaggagaagcaaagggggaaagagcattctagacagaaggaatggcacgcacaggccatgaacgaaggcaccgttggtggaaagcccagggagaactttggctacagtgacgagggaagtggggagtgtggcgagaggcaggcgagggccagatgttcccgtctcttccctgtaccagccagtcgtctggcccatgccagcctccctcctgaaattgtccaaagaagacgtgatccgggcggggccctcaggatgcccttcaggaagcttctcttacccagggcctggggcctttggtgctcaggaatgggatgtgatgctgggcttcaacagggacttaggcctctccatgtctgtcataaacacttcctagtcctcaggtcacgcccaggctgcagtcttcccagggctgtgctctcccagcaccctcaggagggcagacctcaggcggagaagcctgccggtgcctactgcccagaatgggcttcaaatccacctctgctgggtttctgggggcagggaccggttcacaagcccctccaggttcccccgtctggccttccctccccacagggctggcccagagagcgcctctctgaagactgcctcctccatcctggcggcagtgctcccagagccgggcctcctcagggccagggtgtgccccaggcaggtccccaggggctctcaaggggtactgcagggggctctcccctaggcagagaggagaatttggccccacagctagctgccagctgagccttggtctcctctgtagggcctggaagaacagaaagccttccagggaccaccatgtgggaccctagaccctagaagacttcaccccaggaggctctgcccatcccaagcatccgtgggtgactgggtctccacctcttggcaagcgctgactcactccctacctctgagagtccatgacccagggctccagagagactatcctcctgcccacctaaccaggtggcgaaatctctggggtcaggtggggccttatcaccctccttggtcaaggagccaggtacctgcacaggcatgcagacctgtgtagaccagatgcctgtggggtgggttgtggaccccagccccattcacccatccctgccctgctgagagagtttgttcatcggctttacagacctgtctctgtgggcaccaggggcagccctgtctctctctccctgaccctcctgctccatccctgggcagcagcgctgtactcctgctatgtgctcagcctgcttcccatgcctgtggaagtcccatggaaacagcatggggcaggggaaagagcgtgggaggccctcacccactgtgagtcaggaaagttgcttcacttctccgggtccagctttcccgtctataaaatgggccagtgattcctctgttcctgtggcctcctgagcagtggtgagggctgcatgagggacccagagtctgggccacagatggccctgggtcagcatcgtgtgtgccctgagggcacctgatccagccttggcaggggccagaggagctcccagaggagatggcatctgagctgagggcatgcagagatattttcctttttccttctaaaatgtttttcttctttacaaaggtcaatcttccaagcgaggaaaatttatgaaagggaataaagcagaccattcaatcagcccttctcagagcccaccaccacctgcttctgcacctcactccatccacacacacatgttgccacaccagtggcattgtgtgtctgttgaactggggcttagaaaaatgagaaaagagtagaaagggcaggggagaacctggctttcctggctaagagaccggtagcaagaggctggcaggagcacagctcactgacacccttgaggggctctgggcagctgggcttcaggtgcagggcccagaactcaaagggccctcgaggcctttggatttgatctgccacctgtggggaaccattgaagggttttgagcacagggctgtcacttccggtcagcggcttagaaaagaccactctgaaaagaccaaagtgctgggattacaggcctgagccaccatgcccagctgaatttgagctttttaataatctcattccacatagccttatagatcctgtaaatagggggggtcacaaaagtaatatattgtgttatggaagataattttgtactgtgctgtttcctaaatcataccaatatcctaaagtcatgcacttcccagatgatcgtgatcctccaaatgctttgtaagatggggcagggcgtggaaatatatatatatacacacacacacagagacacacacacacacaagtatagtatatattttcctaacctttcttctgggtccttcctcagatctttgagtcacgatagaaaaggagctcgagttctttgtgtaggaaagttaagcttcctgcctgcggtgttcttgcaattgccttaggaattcacaagctctaggagttctgaacggaaggcagacgagaggcactttatccagtcccagaaagaatctctaaccgtgtgactgagaagtcatctagaaaaacttatatttttaatgtaaaaacaaatggggcttaccagacctcacagagtattggacgtctacaagtgcttttatattttgtaactgtaaagaagtttcatatgcacagaagagcagttggaaatctggtcgactgcaataaaacaagatgacctttgcatgtacaaagatgttgcattcagactatgaaaatagcaaataaagctttggtgcaagttgc

SEQ ID NO: 880 - DNA, 3033 bp, Homo sapiens
ttacactggaaaaggtaatgacctgtcttctccttgagcctgtctcccactttatcagttcccatagtcctcttggcacagtatggctgtgtgtacacatgtgtatgcacgtaagggccagggccgcccttccttctaaacatagcgctgatacaatagaaaggcatgtttctcagccccatttgccacaggaagcagttcctcctccacttgaattccctagccatggcagctgtggagattactaaagcaaacatgtgcccctcttccccaccttcaaaaatttgcccccctgggtgagctgtggagtgagccagagatagctttcagcccttcccatgggaacagctgggtgcattagcaagtccctggagctgctgtgtgccacttgggaaaatagattcacacctggctctgtgcctgtctccttcaccagggagtgacactttgccagaagcagctgatacattgtgtggcgctgaactgactcacagatagccctggccccattgtccctcaagtatattattgtcagggctggctcaactcaagcttccacccaagctccaggatcagatgtcatagcagctgctcaactggcctcaggcatattttcaactctgcatttgttttctaagttcgctgtattgactttattcttccactgctctcttcacctgacctctcagggcattttaacattcagcccaacaagaaatctccaccagaaccccgagtggcgaagaaactgggaatgattgccggcgggacaggtgcattacactgagggcctttctctcccaccattgttgactgttgccatgcaaattcctaggtgaccctctgaagactggttaccatagccaagctgttgttcatcaggggatttccagcaatgcttagaactccctagtatctgaaaaacaaaatcataagcaggtagaaaccaaaaaaaattttaactgatggaattagagaaacaaattaaatgagctttcctcattttgaatggatctaatagttttaggtgagagaagagagaagcagctaggaatgactagctaggaagaaagaaaattagcattggacactactgtgcattagacactgtgtagtctaatacactactatatattagacacaaaaattagacacatatataggtatctatgaagtaggtactagccttttccttttacagagagacaatggggttccagagaggctaaatgatttccacagggttatttcactggtaatggcctggagcaaaattagtatttggctctgcctagtgcctaagtacatgcacttaacccctgcaaatacagtgttctagaaccctcatcattgaatccggaggtacttgtagtcatttgtgacactggagtcctagcctccaaaggactttcagaagagtcttagattagttcctaagaaagatttctacaatatgaacttagatgaatttgaagggtgcccggaaatacagatgttggagaatatgcaggaagagtttagaggatgagaatgctaaaggaaaatggagtggagtggtgaatgagcagaatgaagatgaaagggctggtcagctaaggagccaggacagggcagagagtgtggccactacatttcactgtggggtatcttcatgcaggaatcaccccaatgctacagctgatccgggccatcctgaaagtccctgaagatccaacccagtgctttctgctttttgccaaccagacagaaaaggatatcatcttgcgggaggacttagaggaactgcaggcccgctatcccaatcgctttaagctctggttcactctggatcatcccccaaaaggtatccttcccatttctggacatcccactatcccctcatcgtcaaaatcaaagccttgcccctttgtgaattctggcttcattgaaatcaaccttgcctcacactgccaactcggaagtctgagtgcacagacacagtgatctcctggtccctttcctttgggttcctgtttaccaggtgggtgacagggatggctgtgctgctaaggctcagcttgaggcaggctgagtatacctattcccagctgctgctaccacttgacactttctccagagcctttcagggccctccccagtctcatggcaccacacccccttgccagcatgtatctggagtattaagtactttcttctctccatacttcagattgggcctacagcaagggctttgtgactgccgacatgatccgggaacacctgcccgctccaggggatgatgtgctggtactgctttgtgggccacccccaatggtgcagctggcctgccatcccaacttggacaaactgggctactcacaaaagatgcgattcacctactgagcatcctccagcttccctggtgctgttcgctgcagttgttccccatcagtactcaagcactataagccttagattcctttcctcagagtttcaggttttttcagttacatctagagctgaaatctggatagtacctgcaggaacaatattcctgtagccatggaagagggccaaggctcagtcactccttggatggcctcctaaatctccccgtggcaacaggtccaggagaggcccatggagcagtctcttccatggagtaagaaggaagggagcatgtacgcttggtccaagattggctagttccttgatagcatcttactctcaccttctttgtgtctgtgatgaaaggaacagtctgtgcaatgggttttacttaaacttcactgttcaacctatgagcaaatctgtatgtgtgagtataagttgagcatagcatacttccagaggtggtcttatggagatggcaagaaaggaggaaatgatttcttcagatctcaaaggagtctgaaatatcatatttctgtgtgtgtctctctcagcccctgcccaggctagagggaaacagctactgataatcgaaaactgctgtttgtggcaggaacccctggctgtgcaaataaatggggctgaggcccctgtgtgatattg

SEQ ID NO: 881 - DNA, 2731 bp, Homo sapiens
catagcaggactcatgctctcaaattccatctcgtaccatctgcctgtgccatagcaggacccgtggtctcaaatcccgtctcgtaccatctgcctgtgcgatagcgggacctgagccctcaaattccgtctcgtaccatctacctgtgccatagcgggacccgtactctcaaattccatcccgtaccatctgcctgtgcgatagcgggacccgtactctcaaattccgtctcgtaccatctgcctgtgccatagcacgacccatggtctcaaattccatctcttaccatctgcctgtgtcattgcaggatccatgctctcaaattccgtctcgtagcatctgcctgtgccatagcaggacccatggtctcaaattctgtttcttaccatctgcctgtgccatagcaggacccatggtcacaaattccatctcttaccatctgcctgtgtcattgcaggatccatgctctcaaattccgtctcgtagcatctgcctgtgccatagcaggacccatggtcacaaattccatctcttaccatctgcctgtgccatagcaggacccatggtcacaaattccatctcttaccatctgcctgtgtcattgcaggatccatgctctcaaattccgtctcgtaccatctgcctgtgccatagcaggacccatggtcacaaattccatctcttaccatctgcctgtgtcattgcaggatccatggtcacaaattccatctcttaccatctgcctgtgccatagcaggacccatggtctcaaattccatctcgtaccatctgcctgtgccatagcaggacccgtactctcaaattccatcttgtaccatctgcctgtgccatagcaggacccatggtctcaaattccgtctcgtaccatctgcctgtgccatagcaggacccgtactctcaaattccgtcttgtaccatctgcctgtgccatagcaggacccatggtctcaaattccgtctcgtaccatctgcctgtgccatagcaggacccgtactctcaaattccatcttgtaccatctgcctgtgccatagcaggacccatggtctcaaattccgtcttgtaccatctgcctgtgccatagcaggacccatgctctcaaattccgtctcgtaccgtcttccccttagacccctcagctccagcgatgctggcctctttgctgttcctccaaaatttcaggctcagggtcttcacactcattctcatgtattgcttctgctggaatgttcttcccctagacagccatgtgggttgcttcttcatatcttcctgtttgtgctcaaacgttaccttcttagagatgcatttcttgaccattttgaacaccttatgtaaaacggtatgctcttatgtacgacctctttcctggccttgtctttctcaggagcacttactagcatctgataggttatatggctcacttgtttctttcctgtctcttctcacttgaatgtgagttccatgatgacagggagtcttgtccattcctgtattgtctaccccaagatgaggcctggcacacagttggtattcaataaatatttgttggatgaatttgtgactggtaagtgggaaaaaatgtattttattttgtattcctttgattatcagtgaaggtaagtatcatttcatatattttttggcagtatgttatacaatatggcaatatgtgttacttctcttgtgacctttttactcatgtgcactaaccattttgtgtagggctttgggttgagtttggcttcagtaggtagagttcagggtgattgtgggacagccacatagatgtaaactattagttccggagactgttggtttgtaaatcattctagagacagccgtcagtcattaggattcctgcatgctgctttaggggtctttgggccttgcagaatacagctttgtcctccctgaggtgcatctcaaatggatctgtttctcagcattctgccagcactttttcaatgtaatatattttttggtttctcaggcttatggtgaaggctctggtgctgattgtagacgccatgtccaaaagttaaatctactacagggacaagtttcagagctgccactcaggtacagttgtttgagaagagcgtggttgtcttgccctgttttcgtcttgactggataatagaagtacacagtggaaatcctgagctgggcactctgctgtggctggacctgccccaggtccctgctgtcactttgccatctgaggtcagcagctgccctcagaaccgaccccggggatgtttagaatactggggctgagcttcacccgaggagattctcacctgattacctgtgatgaggtccagacctgtggtttttaaagctggcaggccattgctctgtgcctccagagctgaaggctcttgacacagctgttcttgtttgtggctggctcaccagagaggccctggtaggacagaccccactgggcctgggtcagtggagaagtcccttagacttccacgtcttacaatatggcagtcaaacaccctgagcaattctcccactgaaaataactaaaaatgctagctattttaaatgcactgatgagctgacaagaaagtaactctcggccaggcgcagtggctcatgcttgtagtcccagcactttaggaggccaaggcgggcagatcacgaggtcaggagttcgagaccagcctggccagcatggtgaaaccccgtgtatatt

SEQ ID NO: 882 - DNA, 3099 bp, Homo sapiens
gaatagttttcctttctgtgggtttgggtgtatttgggaaacattagcttaggggggtaaagtaggttacccaactctgaaaagcagcatcaaaatctttataataaacacatattaggggcccaacttaaatttcaagcagatgtcatgagctgctcagagtagcgtgttacaactctgcgttataaggtaaaatgacttagagtgtagcagtagtccccaatgtcaaatagacagtggtaagtatagattgctcttctccttgcatcacaaatgttaattcaccctgcccccacacgcattaaaactcagcatatttcacaaattgagtgtttcatttctatttgagatagacttatggtaagtcagctttgctccccaaataagttagccatatagtacttctatatgcaaaatttgaatctcaattttactactcaagctggaagtaaaagtcatttttgtatatcttctttgctcccagactgggttacagtttacagatctgaatattgtcacttgtacaccatacatacacagaggtctaaaactctctacaagtaaataaagaaaaaaagcccagcaacccaataggaaaataggccaagcctgttataggctttttgatcatctccagactggcaggaagagaatgcatactcacactgtaagtgcctgatttgatttgcagaggatatagaaccttatcagaaaacagccttccaaggcaagagcaaatgcaccctatctaagcacagcttttctccaattcttatttacctaaggagatgaatagctgccaggaacattgtttgcacaagggcaggagcctgccagatctgagaacacagcaaaatttttattttgtcaaaaatcttatattcagcttacaccattcatttcaggtgaacatacaacagtctgcatttcagtttagggaaatgtttacagtcgtctggttctctttattcttgggaacaaggttacctcacttggaacacataaccagtgccaagttgtccatccctaagcaatatcgcttcctcctactttctagaagttcttcaggttgtggaagacagacttttcagaattgtttgccctcattccctcctccagaaatgcatgcctttgtataatctcttccccttgagagccagtaggctaacctaatgagttatgtttaaccagtagaatacagcaagaatgatagattacaagagattgtggcttctatcttgctagcggcctctctctgtcttctctgcttgcacactttgttgaagcaagctaccatcccagaggcaaggaacacaggccatcagtttagcagccttgaggaactaaattcttccaactaccacataagtttggaagtagattcttctccagtccagccttcagatgagaccccagccatgccaacatcttgattgcagccctgtgagagaccttgaaatagaaccatttctgatctcctgacccacagaaactgtgaaataaatatgtgttaaggtactaagtttgtagtaatttgttacgcagcagattgtaaataacacgcagataaaaccagacagaacagaaaaataaaatgactttaactctagaaagtttccccatgtaaaattttgaaaatgctactctgcctaaggtcaaactgtcatacatatatacgtatgaaaacacagaaaggtgtctggaagggtaataccaaattaaatctttatccaagaggaatgaaaaccagtattcacacaaaaacctatgcacaaaccttgtgaatatattaaaaaccagtgaattatgcactttaaaaaggtgaattatgtgatatatgaattatatctccaaaacatttaattaaaaacctgtacacaattattcatagaaactttctttaaaattgctaaaaacgaggaagatctcagttatccttcaactggcaaatgaataaacaaactggtacagccgtgcaattgaatactgctcagcaataaaaaagaatgcactgccagttcagcaacatgggtaattctcaaatgcattatgccagttgacagaggtcagactcaaaatactatgtacagtgtgattctacttatatgacactgaaaaaagcagaactataaggacagaaaacaggttagcggttgccaaggagtgggagaagcagccagggagaactttgaggagatgaaaatgtgccaggccttggtcggtggtggtacgtaactgtgcatttgtcaagactcagtgctatatgctgaaaagggcaggttttactataagtaagttgtacctcaataaacatgatttttaaatgattaaaactttggtttttgtttgttgtggttcagttttaaggtttcccataaatctattggttttagattctaagttgtatataagcttctgttttaaaagaatttttttttaaatcctcttatcgtcaacaatatttagttgtgctggaaattttattttggaattgtttaatagagaaagacaataaataatgttcaagaacagacattgattcataacatcaaagtatattgtgagaagatggtatttcagaatagaggaagaatttcttatgtgctggtaagattgtagataatcatttctgcataattttcatagctggattgctttaataaagccatttaaaggttaagttctagattgcttcatgttgcttatcaatgttttaaagctaaaatagaaaattagctgttaagttggctcaaccggaaattcagtatatcctttaaaaagagaaatttagtaagcaatgtgtctaaagaatgacatatggttgggtacagtggctcgtgactgcaatcccaacactgtgaggctgaagtgggaggatcacttgagcccaggaatttgagaccagcctggaaaacagtgagacctgcatctctacaaaaaaacaaaaaattacccaggcatggtggtacacaccttgtggtcccagttgcttgggaggctgaggtgggagaatcacttgagcctggtagatcaaggctgcattgaagtctcatcacgccactgcactcgagcctgggtgacagagcaagaccctatctc

SEQ ID NO: 883 - DNA, 2135 bp, Homo sapiens
cccatacgtgtgtaacctatccagagagaaatcacatccttttgcatccacattggaaccaagacacagagcaggagacctcagaattggagtctctgtatcaggccagtcttcaggcttctcaagctggctgttctggatgggggcagcaggataccgcctggcacccacttagccaaacaggctctgcagatggcatggggaggaggttgcactcagcccatgatcctggtctctcaaagacttcaacagcagaaatggagcatggtctccatgaagccagaacagtgcgtacttctcaggattcatcaaacgtgaggaagcctttggaaaccgggcaccgttgttccagctcctcttccctccctgtcatccatgacccttctgtgtttctcctcggtccccaactctaccttccccaaccacagttcctgtccccagatgtcctgatgcccaccatggcaggggagcccaatagactcccaggaacttcaaggagtgtccagcagtttctggctatgtgtgacaggggtgaaacttcccaaggggccaagtacacaggaaggactttgaactaccagagcctcccccatcgctccagaacagacaactcctgggcaccctggtcagagaccaaccagcatattgggaccagattcctgactactccagggtgcaatcctcaactaacctacactgccacactaccagaaagaagcaagggccttcaggttcctcacactcagtcctggagtgatcttttccattcaccctcccaccctcccattgttcatcctgtgtacccaccatctagcagtcttcatgtacccctgaggtcagcttggaattcagatcctgttccagggtcccgaacccctggtcctcgaagagtagatatgcccccagatgatgactggaggcaaagcagttatgcctcccactctggacacaggagaacagtgggagaggggtttctgtttgttctatcagatgctcccagaagagagcagatcagggctagagtcctgcagcacagtcaatggtaaaggttattcctttcctttcctggagctacacctttctttgtaaaactgtactgtgggccgggcgcggtggctcacacctgtaatcccagcactttgggaggctgaggcgggtggatcacgaggtcaggagattgagaccatcctggccaacatggtgaaaccccgtctctaccaaaatacaaaaaattagccaggcgtgacggtgcgtgcctgtagtcccaactactcggaaggctgaggcaggagaattgcttgaacccgggaggcagaggttgcagtgagccgagatcgcaccactgcactccagcttggcaatagagtgagactccatctcaaaaaacaaaacaaaacaacaacaaaataaactactgtggcagcgttggtaccctgcatcactgccatggttgtgctattctcatctcaacatagaattggtgggttctcctaagggtgtcaggaacctctaaaaagatgtgattctttgggaggggatatttgaaattccaacttccattccccctagcaaaaggaagcagctgctgtttaagggttttatctgagccactttaaagatgaatccatggtattactctggatactagccattccttaggattttaaggtcacattttattcctggatgctttatgtccccacctccacctgagccctcatcctctgttccctactatactcccaacttctactctttgttttatccacctatccctattacctgaccctttgtcttccctgtctcccatccttggggggacatgtagccctgtggtcatggttctgatgacatcatcagggcagcccccctgcccaggtattatggcctgtcagcattccctgtgccctccaaaccttaggcctagaatgcggagctgccaacataacattcacccttttgaacagatggagtcaggcacactaacacagccttctgtcctcaataacacagccattattgccacttgctcagtcgtcaatgtaaaccctcagagtcagctgaactattttaggccaaacatactgtttttgtaaagtatttttcattaataaatctataagacagttctattt

SEQ ID NO: 884 - DNA, 2021 bp, Homo sapiens
taattaatcaattaacaaagagccacaaaacttctgggcatacaacaagaaatactggcacccagaactggagacttcagttgatcttggtggatttcagctgcttaaggcttgctcatgcgtctgcagttggctgtgggtcagcttgccggctgctgatcttggcgggactccttcatgtgcctgggagctggctggtggtggctggtccaggaccgtttctgctgggatgaccgggtgggggactcggctatgctccatgtgtctgtcctcctccagcacggtagtccaggcatgttctcaaggtctggcaaagggcaaaagcaggcaagctcaagcatgcatgcaagcatcacatggtttgatctctttgcatcctgtttgctagcattggccagaccaagtctcatggccaagcctagagtcagagtgtgagagcactgcaaggttacacggaagtgggtgtgcaaacagggaggggtgagctttgggggcagtttttgcaattgacttaccctgtgcccaaaagatatgataacatgtatacgcacatgaagctcccagccattcttgggggcaattcttaggggcaaagcactactttttctgagtgattccattactaaaattcaacaaacgtcagtaaaaagaaacttgttaaggcaattctgagatcgtcgaggcttccaagagcttacagaccagtagtgaaaagaggcctgcaaaccactgacccctttgcaagcagggagaggtgcggactatttcacagtcagaactgctggccaagcgcggaggaggaagtggttagagctgagtgggaggggatctaggaaggcttcacaggggaggtggttttggctgagctttgaaggatgaagaggatttccggagggagcgactgagggatcttcctgagcaaagaaagaaggcagcttccttggggccttggacatctgaggcctttcatggagccttctccttccaggagtggcttcctgaggagttcctggagagaatctctcagctggacacccggtcgcctgtcatcaagatcaatgtggccgtagacaggctgcccagcttcctggcggcccccaatgctcccaggggccagccgctgccccatcaccaatgctccatccacctgaactgtgaagacaccctcctccttcatcaggcctttgaagatgccatggatggcctgccttcccacaggcctgtgattgagctctgcatcccttcctcgctggaccccaccctggctccccctggctgccatgtagtctccctcttcactcagtacacgccctatacgctggctggaggcaaggcctgggacgagcaggagagagacgcttatgcagacagagtgttcgattgcatcgaggtctatgcccctggcttcaaggactctgtggttggcagagacatcctcacaccaccagatttggagagaatcttcgggcttcctggagggaaaatatcctggaaggagaagaacatttgctgaagaacaggggaggggaagaaacccagccagagcaggaaaggctgtaactctcctgtgctgatgactgtggccctgcctctgcagaacatattccactgcgccatgtccctggaccagctctacttcacccgccccgtgcccctgcattctggctaccgctgccctctccagggcctgtatctctgtggaagtggggctcatcctggaggaggtgtgatgggagctgctgggcgaaatgcagcacatgtggcctttagggacctcaagagcatgtgaccctgaaccagctctgacccaggaagaagactccacccctgaattccaagtgctccattggatcagcttcccaggaagttcagcttcgggttagtacataaggccaccacaatgctcaagaaattattttagaaaaaacgtacgagttacatttagtgcaagttgaccttatgcccatgcctccatacatggactggttctgttttattaaaactaatatttcatacagatt

SEQ ID NO: 885 - DNA, 2046 bp, Homo sapiens
agcgcgtttaagatcattcttggctgaaatatgtgcgggtacctagggagtggggtaagagagggactcgtggtggggggcgggtaagtgcctttttcacaacctgccccagagaaatacacgaaattacatcgggagtggaatcgagcgtccctctcagctaaaaatattactcacaggtagcaacgacgcctgattggctgcgctggtcccttcgcaacgaggcgattggctgcctggtatccaggagaccgacgtcaaactcggactgggagaaggggaaagtctggggggagcgaaggaggggacggggagaaagaagcaatgaatgaaacgcccatcgcctggccttcccctttcccctttcccctctcctctccattcttggagcacttcctggaaaaacaccagttggggcgccgccttcccctccaaacgttggggcctgcactctcaacctgctataaggaagttaaaccgcagctcaccgaggagtagggtgtctacggggcgggcccgtgtagaccagctgtgctcctcgggcacaaacccgccgtacatgccaggcctagaagcttttggctttgtggacgcaaaatctggttggagccgccttctccaccctgactctcccgcctctcctttttagaaggaaccgcactgagaaagggtatttctgaaggctcaatgcgtaggagaaggggtgggaagatgggtttgtggaatgggctgagggtggggagtggtcaggtgactgatttcatgtttattgtacagattcctaaaacatagttttactaagtgactccttaaattctgattaatgtgattttttttttttttgagtgtttgggttttttagttgcaaacaggagtggaattgaaatgtgaaagtatggcaaaactgtgaaagcatttaaattaaaatgtcccttcctctgcattgaaatgtcatcaaaacgtcaaatataaatgatttgttcagttttctttttttatttgtttgtttttggttttctgtaatgacaagtccatctgtaataaaagtgagttatttttagttttctaattaagcacagaaatttcaagaaactagacaggatatccttggaatgccttaccaaaagaaacacttcatttttcacgtgttctagaagcacaacttcttttaccattaggcaaataatggtactgtaccaaacatctagaactgcgggaccatgtgtcttgattagtaattttatattgggggggcatattaggcatggctgagactaaaatgtctaaagatagatgaattgtaattttgtcaaacttatctgtacttttcaataattctctaaagagaagggacaagttctcttttctgaatgtcttcaatttgtaattccagatttgaaatatgagagcagtcatctgataggtactgattaaatatcagtagcattaaaagcatttttaagtcagaaatgtagatgtcaaaaatttatgagttattgctgcttggcctaggagtgtaagaagatgtctgaccaaatataaacacacacacacacaccacacaaacaacacacacggaggccccatggcatactggaaaaagcaatgaagggtgggtactgggaggtctgagtttcacaccagtttcaataaacttttagttttctcacctataaaaagggttgaattagatcatatctaatgtctccttcaattaaaaaaaaattccacacttggctgggagcagtggcttacgcctgtaatcccagcactttgggaggctgaggcaggcagattacctgagctcaggaatttgagaccagcctggccaacacggtgaaaccccgtctctactgaaaatacaaaaattagccgggtgtagtggcacacgcctgtaatcccagctacttgggaggctgaggcaggagaattgcttgagcctgggagatggaggttgcagtgcgccgcgatcgtgccactgcactcctgctggccgacagagcgagactctctctcaaaaaaataaataaataaaaaaaaaaaaag

SEQ ID NO: 886 - DNA, 2146 bp, Homo sapiens
acagatgtgagagcagagggccgtgttcagacagaacgccaagcatccggcacgccaggaagcggcgggaaaaggccattggggaaggccgcgtggtgtacattcaaaatctctccagcgacatgagctcccgagagctgaagaggcgctttgaagtgtttggtgagattgaggagtgcgaggtgctgacaagaaataggagaggcgagaagtacggcttcatcacctaccggtgttctgagcacgcggccctctctttgacaaagggcgctgccctgaggaagcgcaacgagccctccttccagctgagctacggagggctccggcacttctgctggcccagatacactgactacggtaagcccctgaaacccagccacagtctagtaagactcaaagcttgggaagcagtgccttccttgaacaaaacccagagctaaagcgccttgtggacatagcttccatccccacaccccagtgtgctgcttggtataactttgcagccactttgcctgaagactaccatcctgtttctcttctggcctctggtccaccttatcctgtcctgtgactgctaccaaagagaatccagcctcccacggcctctaggaagattcagtcatgtgcacagccagctggcagaaccgtggctacggtctccttgacttcacagggccagctgctaccctgtccccttcaggggcattccgtggtgaccccagacaaggcagcagccacctggggacaagatgatgaagaaggacaaagaagtacaatgtacgaaagaattacttggccaggctcagtggctcatgcctgtaatcccatcaccttgggaggctgaggcaagaggatcacttgagcccaggagttcgagaccagcttgggcaacatagtgaaatcctgtctctacaaaaaatataaaaattagccaggcatggtggcttgcgcctatagtcccagctactcaggaggcagaggtgggaggatcacctgaacccaagaggttggagctgcagtgagccatgatggcactactgcattccagcctgggcaacagagcaagaccctgtctcaaaaggaaagaaaaaaaaaaaacacttactggagagaatccaatgcagccttgatggtacaggactgagtgtcagtgacccggctgggtgccaggccaggcggccctgcccttggctgcatgtccatttatgggaatcagtttcccaatctattaaaaaattctagtgttggctgggtgcagttgctcacgcctgtaatcccagcactttgggaggccgaggcaggaagatcatgaggtcaagagatcgagaccatcgtggccaacatggtgaaaccccctctctattaaaaatacaaaaattagctgggcgtggtggcgcacacctgtagtcccagcaacttgggaggctgaggcgggagaatcacttgaacccgagaggcagaggttgcagtgagctgagatcacatccctgcactccagccttggtgacagagcgagactgcatctcaaaaaaaaaaaaattctagtgttgttagccctcccttatgtggcactgcagcaggttactaatggacgagaagctgttgggggaagtagagttgtagggtgttggagctagaaaggctctggagtgctctagtttgggcctccaggtctctagataggacagccaaggccctgagacactgataccatggccaagatgtcccagcaggatggcaggcagtgcccacagtccagcgctcatcccagctccccaaggccttgggctgcagccactccacggtgcccactcatagtggcagattcttcaaccatccggtctttgtaagttgctcactgccttcccctcttccctgcctcttcacccccatgcccagattccaattcagaagaggcccttcctgcgtcagggaaaagcaagtatgaagccatggattttgacagcttactgaaagaggcccagcagagcctgcattgataacagccttaaccctcgaggaatacctcaatacctcagacaaggcccttccaatatgtttacgttttcaaagaaatcaagtatatgaggagagcgagcgagcgtgagagaacacccgtgagagagacttgaaactgctgtccttt

SEQ ID NO: 887 - DNA, 2679 bp, Homo sapiens
attccatgtttcccatcagctgtcccctgtgtttgaggagctgagccctgtcttggaagctgtattggcccagggccacccaggggtagtcattgccctggtgggggcctgtcgcagagttggggcctaccaagccaaggtcctacagctcttgttggaggcattccactgtgcagagccctcatcccggcaagtggcctgtgtgcctctctttgccactttgatggcttatgaggtgtactatggactgacggaggaggagggggcagtgcctgcagagcaccaggtggcaatggccgcagccagagccttgggggatgtgacagtccttgggtctctactgctccagcatctgctgcacttctccactcctggtcttgtacttcgaagtctgggtgccttgacgggaccacagcttctgtccctcgcccaaagtcccgctggctctcatgtgctcgatgccatcctgaccagcccctctgtgacgcgcaagctgcgccgccgtgtgctgcagaacctaaagggacaatatgtggctctggcctgtagtcgccatggcagccgtgtgctagatgccatctggagtggagcagccttgagggcccggaaggaaattgctgctgagcttggggagcagaaccaggagctgataagagaccctttcggccaccatgtggctcgaaatgtggccttgactaccttcctaaagcggcgagaggcttgggaacagcagcagggtgcggtggccaagcggaggcgggcattgaactccatacttgaagactgaggctttggatctgggactgggtgttgatgggggagggcaaaatggggtatccaccccatccctttcctggtttaaattggagtcagaagtcttagtggtaaatatttgatatttttattggaaatgtttttgttagtttgaggggaagggtatgaagacagatctcaaggtaaagtcagagagggctgtcatcagtatgctggggagtttagggacaggaggcattggtaggggattagatgtagcagcagtcaggctgggatcaagatgcctgggggacatcttgatcttggcctttcagggcaagtgggaggctagaaaggtggctaggaaagaacagcattcttcaggtaagggtatagacttgggatgtgaggcgttatgctgaaaggttctgtcacgaggggatcagaggacagtggggaaattgggtgggttatctagcctgtactgtctgcaggtcctgaaatttgatgctgtcatagtctttgcagtgggtcggttggaatgattctgggggcagaagctcagagccccttagtaggaatggaggcggcccttctgctgccactgctcagccccctccactgcatgacgaagggtggaggaaattcccagcaacatatggcccaggccttgcagcagtgtggaggtccaacgaaggagctccctgaatggcagagacaagaggaaatcagatgatttggaaaacttgggaggaagccatcaagctgggagatgaggactttccacaagcaagagctaactaggggtaggtgggtgcaagaggacgaattatggggactatccaactgtaggggatggggcagtatgacatgttgatttctgacctgagtactttctttgggccaagtccttgaaagtcacaactcatagagtagagcccgtagaatgtggctttgacattcaggctgccaaagaggtctcgagggttttgcttgtacacgtcaaaggtgaatcgggcgatgtccttgctgtgcttgggcctctcccgtcccaggccatatgacagcactccactctgtaggacacccttgtcagtgcagtagatcctcataccagacacccaccactaatctccatcagcactgggtcagaccctccctcgcttggactttctgtccactgtgtgacatccttgacaattccacaactcctcctgcacctggtccccaggatcagggttaagctagagaggaagcccgggaaagctctaaaggacaggcattggaagcagccccagtataggcctcttacccttgtagggctccagctctgaccagactgcaacaccatcaggcacgtgtcatcctccagcagctggaagaagtcctcactgtccactgcagttccatcctcctctagcaccagggttagcactccattcagcagtagggtctccaatgcctgcccaatggcaagaagcaagaagggcaggtcttatcccatgccccttccctctttagctgcctatatcccctaaaggtggagggtagagcggagggttagcagtcacctgagtaagtcactggggttcagagctgagaggtactccatggtggaccggagagttccttccctggaacttctgggctgggtggttctctcctgtgctggggctttagtggtgttttctgttacaaacctgggatctcagcccaggacaaggtgggaatgagtcaagcctggactctggcccccctgcctggccagtaagaagggcaaagtccaaggggagggatgagggaggggccagatggggtcctggaggaagaattgcctggcaaaagccattggagcttgtatgtgtgtctttggtgatgacatgtgttgtgagggtagatgggaaccatgtaaaaggatgaaatgtg

SEQ ID NO: 888 - DNA, 2690 bp, Homo sapiens
ttgcttttgatgagagagttttccttgaagcttttgggtttgacaacactggaacatttcaggtgattccagttcctccaaatggggaaaatcaaacattagaaagacttcggcgctgtgcactttgctatgataaatgttttccaaatgcttgcattcgagaggctttcttacctgaagattcatacatggatgtagtcttcctcatagacaattctcggaatatagcaaaggatgagtttaaggctgtgaaagccttggtgagctcagtgattgacaacttcaacattgcttcagaccctttaatctcagactctggtgataggattgctttgttgagctattctccttgggaaagttccaggagaaagatgggtacagtaaaaacagagtttgatttcatcacttatgacaaccaactcctaatgaagaatcacatccagacttccttccaacagctaaatggagaagcaacaattggtcgtgccctactgtggaccactgaaaatctttttccagaaacaccctatctaagaaaacacaaggtcatctttgtggtctcagctggagaaaattatgagagaaaagaatttgtaaaaatgatggctttgagggctaagtgtcaaggctacgtcatatttgtgatttctctgggctctacacgtaaggatgacatggaggagttagccagctacccacttgatcaacacctgatacagcttgggagaatacataaaccagatctgaattatattgcgaagttcttaaagccatttttatactcggtcaggcggggattcaatcagtacccaccaccgatgcttgaggatgcctgtagactcatcaatttaggaggagagaatattcgaaatgatggtttccaatttgttactgagctacaagaggattttttgggagataatggcttcattggccaagaattaaattctgggagagaatcaccttttgtaaagacggaagacaatggaagtgactatttggtttaccttccaagccaaatgtttgagccacaaaaattaatgatcaattatgaaaaagatcaaaaatctgcagaaattgcaagtctcacttctggacatgaaaattatggcagaaaagaagaaccagatcatacttatgaacctggagatgtctctcttcaagaatattacatggatgtggctttcctcatagatgcttcccaaagagtaggaagtgatgagtttaaggaagtaaaagcttttataacctcagtgcttgattactttcacatcgcccccactccactgacctccaccttaggagacagggttgctgtcctgagctactctcctccaggctatatgcctaacactgaagaatgccctgtctacctggaatttgatttggttacttataacagtatacaccaaatgaaacatcatctccaagactctcaacagctcaatggagatgtttttattggccatgccttgcagtggacaattgacaatgtctttgtaggaacccccaatctgaggaaaaacaaagttatctttgtaatatctgctggcgagaccaactctttagacaaagacgtcttaaggaatgtgtctctgagagccaagtgtcaaggctactccatatttgtgttttcctttggccctaaacacaatgacaaagaattagaagaattagccagccaccctctggatcatcacttggtccaacttggccgaacccacaagccagattggaactatatcatcaagtttgtcaagccatttgtccatttaatcagacgtgccatcaacaaatatcccaccgaagatatgaaagccacatgtgttaacatgacctctcccaacccagagaacggtggcacagaaaacactgtattatggtgaagatacaaggtcatcataggggaaaagaagatagctccactgacatgtataatcccatgtggttctaaccagaatgtataatcatctgttagaggtactgtggtaaatgacagggacttttcacaaaaacaattggctaatagcatgctaaatttgttctccatctcaaatcttgaggagaagaattttcggagtgaagacatcagtaagaagacctgacaaaccaggaatgatttcatttctcctgagaactggggaaaccgacctataagagttaacttttctttgaaagctctgcacagttcaggcatcaattttgatgatgtatctgcctgtaaaagattgtcattattttcaacacatctgtatctcagattggactcctctaaaagcatttggaattggaatttcctaggaatatcttctactaattcttaaaactggaaagccatgcccatgtcatcggttctggggtgaccctaacatttcatctagcagtgattgtcttctaaaacccacctgtcaggctgctatgacccatagttaatgctttctcttcaccaggacattgacaaaagaatggaattggtgaaaaagaaaaaagtgataagaggctaattttatgaaccatattttttgctgtaatcttttgtttaaattttagcatgctttgctttgtgtatactgaatttttgcagcaaaagaattacggaaaagcacagatactctatatgaccagagatgttcttgggaattacaatgtagcaagagataatttctaaaataaaaacaagtctgacttgg

SEQ ID NO: 889 - DNA, 2107 bp, Homo sapiens
agctgggctgagactgagggagagaagctggaggctgatcttggtccagcagaagctgagcagagctgctgtctttggtctttcaggttggctggctcctctggctgatggcatgttgaggtacatgggccagcggcagcgagggcatccaatccagaggggtccactctagaggccaggccaccagcaccatgggccagtgtgtcaccaagtgtaagaatccctcatcgaccctgggcagcaaaaatggagaccgtgagcccagcaacaagtcacatagcaggaggggtgcaggccaccgtgaggagcaggtaccaccctgtggcaagccaggtggagatatcctcgtcaacgggaccaagaaggccgaggctgccactgaggcctgccagctgccaacgtcctcgggagatgctgggagggagtccaagtccaatgccgaggagtcttccttgcaaagattggaagaactgttcaggcgctacaaggatgagcgggaagatgcaattttggaggaaggcatggagcgcttttgcaatgacctgtgtgttgaccccacagaatttcgagtgctgctcttggcttggaagttccaggctgcaaccatgtgcaaattcaccaggaaggagttttttgatggctgcaaagcaataagtgcagacagcattgacggaatctgtgcacggttccctagcctcttaacagaagccaaacaagaggataaattcaaggatctctaccggtttacatttcagtttggcctggactctgaagaagggcagcggtcactgcatcgggaaatagccattgccctgtggaaactagtctttacccagaacaatcctccggtattggaccaatggctaaacttcctaacagagaacccctcggggatcaagggcatctcccgggacacttggaatatgttccttaacttcactcaggtgattggccctgacctcagcaactacagtgaagatgaggcctggccaagtctctttgacacctttgtggagtgggaaatggagcgaaggaaaagagaaggggaagggagaggtgcactcagctcagggcctgagggcttgtgtcccgaggagcagacttagtggctctgtcccaggagcagcagcaaggatctgccagctgccctgcagccaactgaggaattggaccattttggaaattactgaagatccggatattttctactttacacctttctctgccttgtatctgaaagggctctaaaatgctgtatcatgttttaggcactttcttcatttttttggttattttggttatttcctttttggggggatctcccagaatatttgaacctggttacatgttgtgtatctttttttgaagccttcagatagaataagcctgccatttcttgcacaaatttaggtttttttttgtttttttttgtttttttttttttttttttggtaggggagggcatagagcagggcggggggatgggactgttaggttgaattaacattacaaaatgatacagtgccagatctcagtttcgcatattgtttttcagggcaggtctgtactgtgtgtagtgctgtttacatagatgaatttaggttgtaataattatttttaaagatttacacagatttgaatagcagtgttaactgttaaccacattgcattaattcccaggcgatttagagctcttggagagccaaggccagccaagagcatttgtagtctggtgacaacccccttttaagctaatttatccagaaccctgatttccctcacttcttgctcattccttctttgacctattgcatttcatgttgagtttttccatcaacatgctgcacctgtcagtcaagtgagcattttttaagaacacattgtactgagaaccacttaagcattgaatgcggagaaagcagtgctacctcagttttgctggaagtagacttctttgatagttttctttctttgatgaagtttctgtattttcatgtcctcagaaaactgtactggaaggatgggtggcaggaacttgtatagttcagcttccaacactttggaacagattaaaaagggaatcttttaaataaaaacgtataaaaat

SEQ ID NO: 890 - DNA, 2713 bp, Homo sapiens
cttatcggcttacccagaccttcccccattaaatgctttccctccctcccatggcccttccgttttcccgagcccagctctgtggcgttgatctgctcaaagttttggtacttgtggtgggtgtgcctgagtctctttgttctgactttactgagacattgatcgccgtaaaggtcccatctcttgcagcatcttctgaatttctcttctcgtttaaaaacttcctccaatatccacttggaaaaagataaaattagatccattcctcacatcacatacaagaaggaactccaaatagactggagatcttgacataaagaagaaaactgtacaaaaaccagaagaaacccgagggaacttccctgaaacccgggtgtagggagaagtactgactcccacgccagcacaattaaagaaatactgatacatttggcttcataaaaataaacttgtactgtggcaacaaaccacaagtgaagtctatagataaaagacagtctgggatatatactttcaaatggttaaggtggtacagtttatgttatgtgctttttaccacaatttaacaaaaaaggacagaatgggggaaaatgatctgcaacatacatcacgagcatggggcctctgctgtgtcccctccgcagcactccctctggagaacccagccagacccgacagggaggagacggcagccagtcagggagcactcttcagacacggggagcgggaggaacgtgatcatcacaaacgtccatgtcaaagacaaagcggggctgaggaaatgttccagattgaaggaaatgaaagagacaattgaatgtgtggcaggacattgctgaggcaagagctacagctggaatgcagttggttgacttaaatataaacatttaatgctcccttgagggacccagctgccacggtgagagaagctcaggccacatggaagccacacgcaggcgttccagtgccagcccagctaacagcccacagcaactgccgtcacgggagtgagcccccacggagtccagccgggcgagtcttcagatgcctccagccccaaatgcccccgaccacaaatgcctcagccctcaggtgcgccctgcacggccaagcccagccaatcacagaactgagggagacagcaaggcattcgttgttgaagctgagggggtggggggggggttagggtgtttgttatgcagctgtgcagcatggctgcagccctgacggaagaaaaggctggctcctgggaggtcaccggagagccctcggtgtgtcctacctcataggagcgtctctttatctggggccctgggccacagtggacagtctatgctaaggatgtgatttagggtgggggccgtgggtctctctggaggctacggtcagccacgcggggtgagcagtccccatgaccaacccctgaagaaaaccttggatgcagaggcccgggtgagcttccctaggtggccacactccagcacgctgtcgcatccatgcggggaaaataagcgctgtccacacagctccacgggagagggcagtgggacgcttgcgcctgcctcttccctcctctcattctcatccccatattcttgctataataggccctcactgtgaggataatgaccataccgagtcctgggagacctcctgaactgcagcggcagggaaccccgacacccagtgagtctgagagcctcacagctgcccgcctggctgactcccatcaggtctgaagcaccctcccgacagtcatggtggctgtttttgtctttcccaggagaaatgaatggcactggcaacctgggcctcgtgcctgttttcctgaagccatgtgtacttggcttctggaccgtggcgcacctgaccccagaaggcggtgcacttactgtaaggctgatgggccttagagaacacctccccagcgcctacgcgcaatcaggaccgcggacgcctcatgtctgcctgggaggtctccaaagggccaaacactcccggactcggccctgcaggagtcatttgctgtagaccatcccccagtgccacataccactggagaaagctgagtccagaggagctcaaacttgaaaacacaatctctctggagggtcaaggcctggcagggcagcctgaatggaatccaacgttacctgtgactaagagccaactgggagtgagacaagggtcctctggtctccctggatgacgggagatgcgcgcctcatcgtgtgatgtcaagaaccactgctgggcctaccctgagcagggagcagggagcggcactgtcatgcttgttgctggagccagcaaaggatgaggctatgcctcagcttccgctccgctccactcagtgctggcctcatcgccccacccagggggcagaactctccccaggagcccacggtgctgggcagaggcagaggccacttgggcggtcagcccagagctgggtgggcccggccagcgggactttgcggcctccccaccctccggatctcctgagcaggcgtaacccaacccgggcagctccttcggctccaccatccagagacaagctgacttccgataatgactttattttaacatatttaattacagctgctccacctccttcctctctgtccagggagcagaccctctggccagcccctgactctgcccctaccccctctgcaaacctaaaggggaataaatacaaactttacaaagt

SEQ ID NO: 891 - DNA, 2226 bp, Homo sapiens
gatgcacacgaggaagaggaagggatcctcgcaagctttgaaaggcgccgtcaagtcaaataaataaatgccctacaacaccaacccaggactgagatctgcatgctggaatgacggtggtggtggtggctttcagtattccccaggttttgtccggagcaccggcacgccctctcttgaagtccgctctccgcacagtggttagacgggaagatccggagctgtccagtgtcttgggtaatgcacggcatcgcctgatgtctgacgctagaacaccacgtaaagtcaagcagagggaagtgaatgcgccctaggcccctgcaggccaccaagaagagctagagggagttggtgcaatcctagagatgccggcaagtgcaccaatctgtggcacacgtacgctctccaatggaagacaactcaagaccacaccaagtttgtattaaaaaagtactgttgtgttactttttaccaacctccaatcattatacaaaatgttaaaagatacacaaacacacacacacactcacagccatagaggttatcgcaaaagatcaacccagaatctttcagaatatgacagatgcactgagaaggcagataaattgattcaatatacaaaaggcctctttcctatggaatttcattagattaaataaggtgttccctcctcacagcctcatccttatgagcagtcatataaataatctatttaaagtccttgaactataacttgtataatttttagttttccccctttgaaggggcctaagagaaaggtttgagaaaccagctcttgaggggggcaggggtgaggggtaagaggtcctgtgcctttcattcatcctgggagcttctcaggattgcagcatttccacctgagtgttcattcttgtacattttctcatctttctcctgggttcctaggatcttggagattacctagtccaatccttttacttcagaaacaaaaaacctgaggctcagaaaggctaagtcaaatgcctagggtcacacagggaaactgtgggagttggatccctgagtcccagtccttaaactggttgctacatgacattctagaacctctccccaccaactccctttttaaagacggggtctggttctgtcacccaggctgaagtgcagtgacgtgatcttggctcactgcaacctccgcttcctgggctcaagccattctcccacctcagcctcccaagtggctgggacagcaggcgcatgccactacgcccagttaatttttctaattttgttttgtagagacagatttgccatgttgcccaggctggtctcgaattactggcctcaagcgatacgcctgtttaggcatcccaaagtgctggggttaccggcaggagcaattgctccgggccagacttcccttcccccgcccacacccccccaacccggcctagatccacaggcactgtaatcacagctgacacactcgactcggaatcagcatagagagcactctgaaaattgtcaaatagggtccctgaaacttgtataccatacttctcctgaagatcttgaagcatctttgtgtttgctttttttttttaacttaaaatatggcattcaggttttatccctctccccgacgccatgtttcctttctgtattagtcacacacgtgatcctaaagtctgtcttccccactttaactggggagggctggacaaggtggaattccaattgcaggagacaggatgtgacatgggtgaggtgcccaaggctcaccgactgaaacttcgatggctcttccctgtttccttgtgcagggccccccttctctccactgctcacctggctctcctcctcccttcctgcctgctttgcagctcttgctactattttccttttctttccctgctcccaccctggcccaatttatttcacagaaatatcacagggccagccaggcacagcggctcacccctgtaatcccagcactttacgaggctgaggagggcagatcgcttgaggtcaggagtttgagaccagcctggccaacatggtaaaatcctgtctctactaaaaatacaaaaatttgctgggcgtggtggcaggcgcctgtaatcccagctacttgcgagggaggctgaggcgggagaatcacttgagcctggggggcggatgttgcagtgagccaagatcacgccattgcgctccagcttgggcgacagaacgagactctgtctc

SEQ ID NO: 892 - DNA, 2094 bp, Homo sapiens
aaatgaaagagggagcaggaggcgccggtcccagccacctcccaaggtccctggctcagctctgacaccccagtcccggccccagggtgagtggggttgggtggcggtttaggggcaccaggggcgtgtggggacctgtgtaagtgtggggtggggaggatctcaggagatgtggaggctggaggcacaggaggccagggaggagggagaagcctggtgccgcactcccaccacgctggggtaggagggcagggacacctccgacaaaggaccctgtgagagttatgaaagcggagttgcctctgtaccagccccccaccctgagaggagttcactgcagtaaaaatggtgagagaaatggtgggccaagaaaggagtggtctcgctgcctctgccactcccactcctcccatgggcaccaaattgggtctagcgtctcgggttcgaggctccactcttcccacagcatccttgacagctaagggcaccgctgggtttccgcttccgaaaccaggcaagtcaggggctggtccagctgatctccaaggtccttcctaagaatctgggatctggaggatcccagggtcgaacggagacggctcagggggtgcggctaaaatgcaaatgggggatcctccccagcacccatcggtcccaaagagaaggtaacccatagctgagcgtcgcctgctcccctcgggccctcccgtggccctccgtttcatactggtctcatcgctaaacccgggcctctcctacctcacgactcaccctgaagtcagagaaggtccaacggaccccaccccgataggcttggaaggggcaggggtccctgacttgccccatcccctgactccccgccccgcgtccccagcgccatgggggagtgggcgttcctgggctcgctgctggacgccgtgcagctgcagtcgccgctcgtgggccgcctctggctggtggtcatgctgatcttccgcatcctggtgctggccacggtgggcggcgccgtgttcgaggacgagcaagaggagttcgtgtgcaacacgctgcagccgggctgtcgccagacctgctacgaccgcgccttcccggtctcccactaccgcttctggctcttccacatcctgctgctctcggcgcccccggtgctgttcgtcgtctactccatgcaccgggcaggcaaggaggcgggcggcgctgaggcggcggcgcagtgcgcccccggactgcccgaggcccagtgcgcgccgtgcgccctgcgcgcccgccgcgcgcgccgctgctacctgctgagcgtggcgctgcgcctgctggccgagctgaccttcctgggcggccaggcgctgctctacggcttccgcgtggccccgcacttcgcgtgcgccggtccgccctgcccgcacacggtcgactgcttcgtgagccggcccaccgagaagaccgtcttcgtgctcttctatttcgcggtggggctgctgtcggcgctgctcagcgtagccgagctgggccacctgctctggaagggccgcccgcgcgccggggagcgtgacaaccgctgcaaccgtgcacacgaagaggcgcagaagctgctcccgccgccgccgccgccacctattgttgtcacttgggaagaaaacagacaccttcaaggagagggctcccctggtagcccccaccccaagacagagctggatgcccctcgcttccgtagggaaagcacttctcctgcaggatggcattgctctctccccttccatggcacgtagtatgtgctcagtaaatatgtgttggatgagaaactgaaggtgtccccaggcctacaccactgccatgcccgaacactatccatgctatggtgggcaccatctctctgatgacagttctgtgtccacaacccagacccctccacacaaacccagatggggctgtgccgctgttttccagatgtattcattcaacaaatatttgtagggtacctactgtgtgtcagaagatgttcaagatcagcatcatccgatggaaatagcatatgagccatgtatgtagtttcaagtttttcattagccgcattaaaaaagtaaaaggaaacaaatg

SEQ ID NO: 893 - DNA, 2198 bp, Homo sapiens
aaagaactaagagaccttaagttgatggtgccctttgttgaaataagggaaggcgggcagaacgctgccccaattttttgacaaatgagtttgaggctacctggaagcaagtcagataaaactgtccagaggacaggaagaagcagagatcaggagggggaggtcgagggctggaacttaagagatttgaaatccctttacgtatgacagtggcttgtgggatgaagggcactacaaactgatcagtgatagccagactctggggaaatgttttccccacaattcaatgaaaaatcttgaacaaacccaattagattagtattttcagtatttgagagcaaaagaaaaccacttaagtgctatcgtatgtgagctgagtaatggtattaacttacatctttatacaaatgctccaatctcaaactgaaattttgaagaaaatatgacaaaaatgtatttgtgtacctggtacttaaatagaccaataattaaaaattaatctcgtagccattctttttagctccacttaaacagacgatctggttcagggactgacgaactttttctgtaaaagaagggccagatatatttcagactttgcaggccacatggtctctgcctcaactattcaactctgccattgtgtgaaagcagccacagacaatatataaatgaacaagcatcaggctagattcagcctgcaggcagtttgctaacccccaacctaatccatgagatcataatcataaacaatggaatggtacatccccttgattaaattcagactgcttcccgatcatgtattttgccattacagcccaagagcacttattctagttgttggttgttcatagttcatcaaataacaggaatataatgcatctactggtgttaccgaatgtgccaaagggccccatccccttgtactcttgagcgtgcctttcagaggcgcaggatgcccctcgtgagctctgggagtaggcacaaatgcccattccgttgccggtgtcttcagtagggaagcagggaaaagggaaattgagaacatatttacacagccagaggactccgagtatatgactagaccactaagaacaatgcagactgaaaacatggttatagtttttcacactaaacgtagtaaccgtagtaaccatagtaacactaccagtaactgagtgaaggctgttggtcacttggcttgtgaaaccgagcattaacagttccagaaatgagcttactaataatttttatatattggtatccccttaactgttttatgtgatttatctaatattttgacattgttttcattttggttttcaggggagccctggaagcttatgttcaatcagtgagaagtagagaaggcaaagaatttgcaccagtttatcccataatggttcagctgcttcaaaaggctatgtctgctcttcagtaatgacatgaaatctttgttcatctccactttgtgctaacccattcatagttggcagttaaacacatactccaaaagactgctactatctactattttaagaatgtaattgattgttcggtatttcctatcgacgtttatttacctctttagcacttatactttagcataaaaaatgttgagttatcaccacctttcaattccatggacctgatttttccagaaagatgttttcctctttcagatttttgtacaaggctaaaatgtctttcccatccataaccaagtcctcctatgggtacataaacccaaagtccccacttcttttaaagggatatgatcaagttataacatgtaccctgcttcccccaaccctgccttcttcactaaataagcatgtagctcagtggtttccaaatttggctgcacattcataccaatcaccaggggatttttttaaaatcctgatgcccaacttgcactccacattaattaacatgtctaggagtgggagcctgacagacaccactattaaaaaaaaaaaaatccccaaaatgattccaatagacaacaaagttgaggaaccactggcacatcccaagctaagatacaaggttaaatggcctttttaagtatgtcatactggatctttaaataaagcaaggcttttgttacactttgtcatgttattaaaagcagacctttgggctgtttaaccgtgtaacaaaaatgccacgtgaaaaataaaaatttttattgt

SEQ ID NO: 894 - DNA, 2815 bp, Homo sapiens
atttccagtggatgcaatagtgccgaccatgtgcacatggggtcaggatctcaggcccaccagctggactgcagcgagtacccatggtctcagggaaaaggtcccctgctgcaggctgtgggggacctcggctctcacagtggctatgcctgagaaagcccctccagacttgccaacctggcccgcgtgtcctgtccggagggcagggtggggctggtgctggttacagatgatcctcaagggcacagcacgcaagccaccaggcgcccctcctgcagctgggtcagagagaggcacagggagcctggctccctccaggtcagtctccaccagggccaccccggtgacctgcaggagaggaaggcagacgaggagtggccctgcccctgagggcgcatcgtgcaggtggcacaagggggtcatctgcatcctggtcaagggggagcccacctgcctcctccaggtcgggaacactccctggaggccatggtgtggagcgtccacccgggcttcgtcctccagctcagctgctgggccctgggaagggacaggcccagcacccgttcagccgggctgagccgcaggcagagcgccttgcctgggagagacaaacccaccgctgaggacacaccctcaaggttcacccttccccacttctgtgttgcccttagctctaaggtgctaattccatctctagtttcaacaggctgattgctcttaagggaaaatggggttgcacaatccgactgtggtggccggggctcttggtctccccccagtaagaggatggactttccagccctgctgatggtcagcggggaccacgtggaggctttggcagatgaaatggggcacatgacatagccctgccccagtggaagcctcagagccatggctgggctccgccaggcttgctccagcggccatgaggaccatgccccacaggcaggggctgcacctccaccctggttccagaaggaagaggcacagccgacatgccgctcgagcaggaaaccctggggaaggtgggacatgagatcctgtgtctgatactacagtgtaaccggctagaaactgactcaaaggggcatttttacagcagaaagaggcgaagcacacgtgcatctgccatcctgtgattgtcaggccccgtttaggagtggacagctccatggttgtgtttgagccccacaccggccctggggggttatactgccctggaggacagctgacctcagttctccaagcttccattcccccttgtatgggcacagcaccccaaccttcttttggcagctcccacgccccccagtgctggtgggctctagggctctggtccctgatgctcagaggcacagagacagcattcctcaggggccctgatcctctggcccggttcagactgtggtggggcctcgggacctttccagaaccttggaagtgggtagcaccctttgctgggacagacatgcctggagctccgggcattgggccactgctgggataagcccacgacagaatgaagccgggcaggcagaaagagctgcgggctccctggccactcctgtttccgtaaagggcctggtgtctcatttcctacttaccttggactttaagggcctcctgcagcctttgtcacacactcttcttatttttttgtccattacaaccttttacagcggcacaagccattgttctcagggccaacgcgtgagtcctgtggtgagtttcctattagtgtggctcgagaaggtaccccgtgctgacgaagcctggagaggcagggccacactgcagagcctcaggccaagggtggcggtgctggggtctcatgagcccagggttcactgcccaccaggcggcattagcctgcggctttggcgcccagaagtccgacaggcagcaaagtctcctgctcctggctgctggccaggagagcccagctgggcctcacctgatcgagaggaaacgcctgtgtcctctaatcagcatctcactgacagagtcacccctggtacagcaagtgggctttcaaggacatcaggtggctgcattcaggctggtaacaacaccgccctcagctctcacagtctgaggaagccccctgaaaagtcactggagtggggctgcaggaaccccacaaaggcctttcctgctcctgaataattcccaagcacctaggactccccgggcctggcttctccgccagcccaacctccggacctgaagaccaagcagtgcccaagtgtgaggtccctggagaaggaggaggaagagtggaaggaggtggagggtaacgcatccagaggaagacgctgagggtcaggctggccctgggtctgacctgtccttgggatcaactgcttcattaaaaaacatccgcctaaactgtggagacagaggaaggatcagtgcttgccaagggctgggggaggaggaacaggcagagcgcagagggtttcagggcagtgccgctctgcgtgacgccatcacggagggtccaggtcatcacacgtctctccaaacccctagaatgcccaacactcactctgaagccttctgtcaatgtgggatcatctgtcgtaaagtctgcaccgctgtggtgggggcgtggatagtgggggaggctgtgcgtgtgtgggggcagggagtgtatgggaaatctctgtaccttccgctcaatttggctgcgaacctaaactgctctaaaaaaagtctatttttaaaaagcatatgcccgaaaagtccttgaaaatgcatctttccctaaatattcaaatttatgttcattaataaaatagcacatatttattct

SEQ ID NO: 895 - DNA, 2228 bp, Homo sapiens
cgagcaagagaagtatttcaaaaatccaaacactccagttgtctgtaagtgcctgttgcagtttttgaagtgggccagggattaagtggatggggcagatattgtagaatttccctctaattttggataatgaactgcaaagtaactatgttggtaaaagcaggtgagtctgttcaaattcataacttaaagacattgtgaaggatgcagcaacagacttttgtttgttgtgctttggatggaggaaggaaatcccttcattagattgcccaagacatcggttgatggcattctcatcatttactgtctaagtcaaatttctcaccatcgttgtcttcctactgtttcacatctcctaaagtttctttcccattctttttcaactgtctttttcccaaccacctttcttcctgatcatgtttctggcccactgatgagatccaaaagtacaaggggatcaaagagaatactgatcactaaaaggagtgagtggcccaaaactcttttactctcccatggttattgcgaccttacctttgtcttatatttgctaatacctgactgttgaaaaagattaaaattttccccagttttctttggggaaactctttggtgctcttggtatgtaattgagtttgcagattcttagtctaacccagagttgatctttcttgattatagtggccccatctttcatatccctaggttgaggatctcaataagaacctttctgcattttcttagctacttatatgattacttgggttggctgttttgaaagttctttacactgagaaaatgtgagtatgtcctaaactatgaataattcaaaaatctgactaaaagatccagtaataccctactgtcctgaacatttcctttatattatatatgaaaactgttttctgaacagtgtaggaatggagaggtttgtgttttgttacaggcttattcatttacttttacctatgtagtacccccatttttatttcataagttgtcttggggaatgcttctctttgtcctactcccccaaccccacaaagatctagcagaagaggaaagtcccagtacattggtactcctggatgcagaggtccttcccgccctcagcagaagtcctgagcaatgcatggatgcctgaatgtgggcccacgacctcccacctcatgcagctcttaccttccaggcagcctctatcttgcccacagtgcacgacagtgcaggaactctcctggagctgagccaccgctgggatggccgcagttgaactggttttttgtgccttttacctgttcccttgatcatgagttttagctcagataaccaggtattttgaagacgtgattgtccttggccctgccccatcccttccctttaaagttttaaatttttttcatgtcttttctttggccagaatttctctatcccctgcatgccttcctcggttaccataaatctgcattatcctaggaaagatgaagcccacagattgtacgatttcagagtacttcctgggcccctgtgtgatccgacagaggcctggtcatcaagttggacttccctatgtgaaaccataaactaacctgaggaagatactgaggggagaggggctgtgtaacggtgactgcctctaggccagccttctgccaggcagagaacaggaagctggcatgcagggtgtctggcactggtaaaatgacaccatgtttgtaagtgcattgtcctggcttttggtgggccgtgcaggagttcctgcctgaattatagtctttccatctcatatcttcatgtggagccctcaagctttagacaagtcttttatctccgttttcaggtggctcccattatcttgagacctcataatgctgctttccttaaatttgttttacactgacgctagtcagcacagagctactcacatttctggccaccactcggctccattatcttgacttctctcctgccctcttacgttgcatttcttcttttacaccactgttttacatgttgctcctccttagccattggttcctgttggcttttgttcttttacctgagttggaaatctgggaagacaattccaactcagtggtctgggcattctggtggtgctgccaaccccagggcaggaagaacagtgagtgagatactgtgccattacctgcttctccagccttgaagcccaaagcagccaaataactctcaaatgacgatcacttttactc

SEQ ID NO: 896 - DNA, 1986 bp, Homo sapiens
attgaaggagaagacagagatgaaggccctggcctggtactcggtagggaacaggacccagtggatgttagatgcctcctctgtcttgctgagactgggcatttctctgagtacagagcctgggagacagggcaagtgggagatggggtatgagaggccctcagtggggaatactggtcattttggaaacaggaatattccatagctgcgtgaaaatgcagctttttttttgcttaatcgtcagaacccacaatcctaagttaatcctgcattacagaattctgccagacttcatatccaaaaacccctggtgctctatctctttctcttcccttcaccccatacaatcctgcgggatcgggaaatgctcatgtcatggggtagagaaaccggaggtttgccaagcccttgaggctcctagatcaacgatgcctaaagtcactaacttccctgaggttgcagaatgaatgtcttttttcttccccactggaaaagccatagacaaccattaaagaaaacttgaaaaatacagggaagttgatggatgtgtggccagttggtgctgtctgtcttcttggtgaccaggagtaatttggaccatctgggaaaccagacctcttttcacccaggctgtttcgtgtgcatcacttctgaggctgtgtgctcagtcaagaccttgccagagagttgggggattagccttaggtcgagaatattctgagcagtagtaagaaatttaaaaatcatccataatttcatcactcttattttaagagattagtttatttccttctaaaccttcctctaagttagtgtatgtgtgtttatagctgcatacaattttgtatgatgctttttttcctataatattatatcctaaggagcacttgaagtcgaatgactttagtaaatcattgatgaggacattttgagtgtctttccattgcactcccaactagccttctccacctcttcactttaaaagcaacaactagttgaaacgtgacgctatccaagtctttccggagaaaatagtttctggagtgagatcattgttgtttgacaatttgggaaggacttaaactgagtccagctccaggcaggacttgataacatgttcatgcagtggcttctttcacagcgttatagcaccagcccttccttgtctctcaaaccttacagctcaggaggggctgtgaatggatgggtaaggaattccagtccctgggtccttggcacctgtggtcagcatggggctcccactccagaattgcgtgcggtggttttgagctcttgggtcacggctacatctggagttgttgtggcagagaagcctggttcccagccaccactctgctcttgaaggtgctgactcagagactcccaagcagctgacttcagcattctctcacagctttacaccccctcttccctgcagcctgtcttggaaggaaatcgtgtggttgtggtctgtcttcagagtggggttgaggggtgcacttgaagaagtggctgaggcagagccagggccagaataggtagggtcaccccagagaaactccttccacttcactggactctctatcagtaggaggcttacagtccttgtccctgccaagacagggctaggggcaaagcgcaagacattacaggtttgcaatatgttatccatcatcaaaatgagcagtgaacaaatccgactaaggtctggaagcaattgaacaactctgttattacttttgtgacacattgtcatgggaatgtgtgtgagcttggggctcttgtgtctctctgcggtttctagaggcagcttgacttagagaatggttctgtccacagactgtttctgtgtgtgcgaggggagcttcctggggccatcatgaggatttcttttcttttgagtcttgtaaagtattgacccatagaatatgagaagcaggacatgttctgttcagttgtttttcatgtaataaaagattcttgctc

SEQ ID NO: 897 - DNA, 2454 bp, Homo sapiens
ctgtttattttttatgatgcagtctctgagcctgttccatttgaaactgaagctccctcaatgaccatagttcccaccacagacattgagcctgtaactgtgagaactgaggctacagtgacaacattagctccaaaaacatcgcaacgaacaagaacacgtcgtccacgtcccaaacataaaactacgccacgcccagagacactgcagaccaaactagactttggacctattactcctgggacatcttcagctccaacaacaacaacaaaaagaacccgtcgtccacatcccaaacctaaaaccacgccccatccagaagtacctcaaactaaactggctcccaaagtgcctcaacgaactcatcgtccacatcccaaacctaaaaccacactgagtcccgaagagcttcagactgaactggttcctgttacagacctcgggcctgttacttttagaactgagatccctgcaacaaccttagctaccaaaacatcaaaaagaacccgccctccacgtcccagacctaaaactacaccgagccctcaggcacctgagaccaaacctgttcctgctacagtcctagaacctgtcactcttagacctgaggcctcaacaacattagcttccaaaacatcacaacggacacgtcgtccacgtctcagaacaaaaaccacaccacgtcctgaagcacctgaatccaaaccagctcccaagcagacaccacgtgctcctcctaagccaaaaacatcaccacgcccaagaatcccacaaacacaaccagttcctaaggtgccccagcgtgttactgcaaaaccaaaaacgtcaccaagtccagaagtgtcatacaccacacctgctccaaaagatgtgctccttcctcataaaccataccctgaggtctctcagagcgaacctgctcctctagagacacgaggcatcccttttatacccatgatttccccaagtcctagtcaagaggaactacagaccactctggaagaaacagaccaatccacccaagaacctttcacaactaagattccacgaacaactgaactagcaaagacaactcaggcgccacacagattttatactactgtgaggcccagaacatctgacaagccacacatcagacctgttctgaataggacaactacaagacctactaggcccaaacccagtgggatgcccagtgggaatggagtgggaacaggggtcaagcaggcacccaggccatcaggtgctgatagaaatgtatcagtggactctacccaccccactaaaaagccagggactcgccgcccacccttgccacccagacctacacacccacgaagaaaacctttaccaccaaataatgtcactggaaagccaggaagtgcaggaatcatttcatcaggcccaataactacaccacccctgaggtcaacacccaggcctactggaactcccttggagagaatagagacagatataaagcaaccaacagttcctgcctctggagaagaactggaaaatataactgactttagctcaagcccaacaagagaaactgatcctcttgggaagccaagattcaaaggacctcatgtgcgatacatccaaaagcctgacaacagtccctgctccattactgactctgtcaaacggttccccaaagaggaggccacagaggggaatgccaccagcccaccacagaacccacccaccaacctcactgtggtcaccgtggaagggtgcccctcatttgtcatcttggactgggaaaagccactaaatgacactgtcactgaatatgaagttatatccagagaaaatgggtcattcagtgggaagaacaagtccattcaaatgacaaatcagacattttccacagtagaaaatctgaaaccaaacacgagttatgaattccaggtgaaacccaaaaacccgcttggtgaaggcccggtcagcaacacagtggcattcagtactgaatcagcggacccaagagtgagtgagccagtttctgcaggaagagatgccatctggactgaaagaccctttaattcagactcttactcagagtgtaagggcaaacaatatgtcaaaaggacatggtataaaaaatttgtaggagtgcagctgtgcaactctctcagatacaagatttacttgagcgactccctcacaggaaaattttataacataggtgatcagaggggccatggagaagatcactgccagtttgtggattcatttttagatggacgcactgggcagcaactcacttctgaccagttaccaatcaaagaaggttatttcagagcagttcgccaggaacctgtccaatttggagaaataggtggtcacacccaaatcaattatgttcagtggtatgaatgtgggactacaattcctggaaaatggtagatgctgcacaaagttaccttctgtttcatcattgcaaac

SEQ ID NO: 898 - DNA, 1872 bp, Homo sapiens
gcaaatgtgcgcaggcgcttaggggctgaggcgcgatggcaggtgtcggggctgggcctctgcgggcgatggggcggcaggccctgctgcttctcgcgctgtgcgccacaggcgcccaggggctctacttccacatcggcgagaccgagaagcgctgtttcatcgaggaaatccccgacgagaccatgatgtgggataagcagaaggaggtcttcctgccctcgacccctggcctgggcatgcacgtggaagtgaaggaccccgacggcaaggtggtgctgtcccggcagtacggctcggagggccgcttcacgttcacctcccacacgcccggtgaccatcaaatctgtctgcactccaattctaccaggatggctctcttcgctggtggcaaactgcgggtgcatctcgacatccaggttggggagcatgccaacaactaccctgagattgctgcaaaagataagctgacggagctacagctccgcgcccgccagttgcttgatcaggtggaacagattcagaaggagcaggattaccaaaggaaaaaggtgcactgcctcaacatggacagcctctctttccagctgggcctctacctcagcccacacttcctccaggcctccaacaccatcgagccggggcagcagagctttgtgcaggtcagagtgtccccatccgtctccgagttcctgctccagttagacagctgccacctggacttggggcctgagggaggcaccgtggaactcatccagggccgggcggccaagggcaactgtgtgagcctgctgtccccaagccccgagggtgacccgcgcttcagcttcctcctccacttctacacagtacccatacccaaaaccggcaccctcagttgcacggtagccctgcgtcccaagaccgggtctcaagaccaggaagtccataggactgtcttcatgcgcttgaacatcatcagccctgacctgtctggttgcacaagcaaaggcctcgtcctgcccgccgtgctgggcatcacctttggtgccttcctcatcggggccctgctcactgctgcactctggtacatctactcgcacacgcgttcccccagcaagcgggagcccgtggtggcggtggctgccccggcctcctcggagagcagcagcaccaaccacagcatcgggagcacccagagcaccccctgctccaccagcagcatggcatagccccggccccccgcgctcgcccagcaggagagactgagcagccgccagctgggagcactggtgtgaactcaccctgggagccagtcctccactcgacccagaatggagcctgctctccgcgcctacccttcccgcctccctctcagaggcctgctgccagtgcagccactggcttggaacaccttggggtccctccaccccacagaaccttcaacccagtgggtctgggatatggctgcccaggagacagaccacttgccacgctgttgtaaaaacccaagtccctgtcatttgaacctggatccagcactggtgaactgagctgggcaggaagggagaacttgaaacagattcaggccagcccagccaggccaacagcacctccccgctgggaagagaagagggcccagcccagagccacctggatctatccctgcggcctccacacctgaacttgcctaactggcaggggagacaggagcctagcggagcccagcctgggagcccagagggtggcaagaacagtgggcgttgggagcctagctcctgccacatggagccccctctgccggtcgggcagccagcagagggggagtagccaagctgcttgtcctgggcctgcccctgtgtattcaccaccaataaatcagaccatgaaacc

SEQ ID NO: 899 - DNA, 2169 bp, Homo sapiens
acccctgctcctggcggctcccacccgggacttagaccctcaggtccctaatatcccggaggtgctctcaatcagaaaggtcctgctccgcttcgcagtggaatggaacggatttagaagcctgcagtaggggagtggggagtggagagagggagcccagagttacagacggcggcgagaggaaggaggggcgtctttatttttttaaggccccaaagagtctgatgtttacaagaccagaaatgccacggccgcgtcctggcagagaaaaggctgaaatggaggaccggcgccttccttataagtatgcacattggcgagagaagtgctgcaacctaaaccagcaattacacccaagctcgttggggcctaagccagtaccgacctggtagaaaaagcaaccacgaagctagagagagagccagaggagggaagagagcgccagacgaaggtgaaagcgaaccacgcagagaaatgcaggcaagggagcaaggcggcagttcccggaaaaacgtggcagagggcaagacgggcactcacagacagaggtttatgtatttttattttttaaaatctgatttggtgttccatgaggaaaagggaaaatctagggaacgggagtacagagagaataatccgggtcctagctcgccacatgaacgcccagagaacgctggaaaaacctgagcgggtgccggggcagcacccggctccggtcagccactgccccacaccgggcccaccaagccccgcccctcgcggccaccggggcttccttgctcttcttatcatctccatctttatgatgaggcttgttaacaagaccagagagctggccaagcacctctatctcagccgcgcccgctcagccgagcagcggtcggtggggggactgggaggcgctaattaattgattcctttggactgtaaaatatggcggcgtctacacggaacccatggactcataaacaatatatctgttgggcgtgagtgcactgtctctcaaataatttttccataggcaaatgtcagagggttctggatttttagttgctaaggaaagatccaaatgggaccaattttaggaggcccaaacagagtccgttcagtgtcagaaaatgcttccccaaaggggttgggagtgtgttttgttggaaaaaagcttgggttataggaaagcctttccctgctacttgtgtagacccagcccaatttaagaattacaaggaagcgaaggggttgtgtaggccggaagcctctctgtcccggctggatgcaggggacttgagctgctccggaatttgagaggaacatagaagcaaaggtccagcctttgcttcgtgctgattcctagacttaagattcaaaaacaaatttttaaaagtgaaaccagccctagcctttggaagctcttgaaggttcagcacccacccaggaatccacctgcctgttacacgcctctccaagacacagtggcaccgcttttctaactggcagcacagagcaactctataatatgcttatattaggtctagaagaatgcatcttgagacacatgggtaacctaattatataatgcttgttccatacaggagtgattatgcagtgggaccctgctgcaaacgggactttgcactctaaatatagaccccagcttgggacaaaagttgcagtagaaaaatagacataggagaacacttaaataagtgatgcatgtagacacagaaggggtatttaaaagacagaaataatagaagtacagaagaacagaaaaaaaactcagcagatggagattaccattcccaatgcctgaacttcctcctgctattaagattgctagagaattgtgtcttaaacagttcatgaacccagaagaatgcaatttcaatgtatttagtacacacacagtatgtatataaacacaactcacagaatatattttccatacattgggtaggtatgcactttgtgtatatataataatgtattttccatgcagttttaaaatgtagatatattaatatctggatgcattttctgtgcactggttttatatgccttatggagtatatactcacatgtagctaaatagactcaggactgcacattccttgtgtaggttgtgtgtgtgtggtggttttatgcataaataaagttttacatgtggtg

SEQ ID NO: 900 - DNA, 2010 bp, Homo sapiens
aagagaagtgagaggacatctgaagagaaggaagcctgaggaatgtagctgcagtaaacaaagctattacaataaagagaaaggtgtaaaaaagcaagagaaattaaagagccatcttcacccattcaaggaggctgctcaggaagtagatagcaaactgcaacttttcaaggagaacaaccgtaggaggaagaaggagaggaaggagaagagacggcagaggaagggggaagagtgcagcctgcctggcctcacttgcttcacgcatgacaacaaccactggcagacagccccgttctggaaccctcacaaatacagtgcacacggtggaacgaggcattttgaatcagctacacgtacaactaatggagctcagaagctgtcaaggatataagcagtgcaacccaagacctaagaatcttgatgttggaaataaagatggaggaagctatgacctacacagaggacagttatgggatggatgggaaggttaatcagccccgtctcactgcagacatcaactggcaaggcctagaggagctacacagtgtgaatgaaaacatctatgagtacagacaaaactacagacttagtctggtggactggactaattacttgaaggatttagatagagtatttgcactgctgaagagtcactatgagcaaaataaaacaaataagactcaaactgctcaaagtgacgggttcttggttgtctctgctgagcacgctgtgtcaatggagatggcctctgctgactcagatgaagacccaaggcataaggttgggaaaacacctcatttgaccttgccagctgaccttcaaaccctgcatttgaaccgaccaacattaagtccagagagtaaacttgaatggaataacgacattccagaagttaatcatttgaattctgaacactggagaaaaaccgaaaaatggacggggcatgaagagactaatcatctggaaaccgatttcagtggcgatggcatgacagagctagagctcgggcccagccccaggctgcagcccattcacaggcacccgaaagaacttccccagtatggtggtcctggaaaggacatttttgaagatcaactatatcttcctgtgcattccgatggaatttcagttcatcagatgttcaccatggccaccgcagaacaccgaagtaattccagcatagcggggaagatgttgaccaaggtggagaagaatcacgaaaaggagaagtcacagcacctagaaggcagcacctcctcttcactctcctctgattagatgaaactgttaccttaccctaaacacagtatttctttttaacttttttatttgtaaactaataaaggtaatcacagccaccaacattccaagctaccctgggtacctttgtgcagtagaagctagtgagcatgtgagcaagcggtgtgcacacggagactcatcgttataatttactatctgccaagagtagaaagaaaggctggggatatttgggttggcttggttttgattttttgcttgtttgtttgttttgtactaaaacagtattatcttttgaatatcgtagggacataagtatatacatgttatccaatcaagatggctagaatggtgcctttctgagtgtctaaaacttgacacccctggtaaatctttcaacacacttccactgcctgcgtaatgaagttttgattcatttttaaccactggaatttttcaatgccgtcattttcagttagatgattttgcactttgagattaaaatgccatgtctatttgattagtcttatttttttatttttacaggcttatcagtctcactgttggctgtcattgtgacaaagtcaaataaacccccaaggacgacacacagtatggatcacatattgtttgacattaagcttttgccagaaaatgttgcatgtgttttacctcgacttgctaaaatcgattagcagaaaggcatggctaataatgttggtggtgaaaataaataaataagtaaac

SEQ ID NO: 901 - DNA, 3087 bp, Homo sapiens
tgtctaccgcaaccctctgtgctatgggctctcaacttgtctgggggaaggagcagtgaagaggccactggatgttgactggactctggcgactgggcccctgttgccctcagctgacccaccctgctctctggccccagctcctagcaagggccagactctggatggcaccttcttgcggggggtgccagctgaggggtccagtaaagactcctcagggagcttctccccatgccagcccttcctggagaaatatcagaccatccacagcacgggcttcctggcctccaggtacacaggtccttaccctaggaactccaagcaagcaatgtctgaggggccctcaagtccttggacccagctggcccagcccctggggccaccctgtcaggacaccgggcccacccactacccaccaccccaccacccaccaccccaccctccacaggccctgccttgccctccagcctgtcgccacccagagaagcagggcagctacagcccagcactcccactgcagcctctggggggccacaaggggaccgggtaccaggctggtgggctgggcagcccctacctgaggcagcaggcagcccaggcaccttacattcccccactggggctggacgcttacccctacccctctgcccctctcccagcaccctctccaggcctcaagctggagccgcctctcactccacggtgcccattggactttgccccccagacactgagttttccttatgcccgggatgacctctctctctatggagcatcccctgggcttggagggacaccaccttcccagaacaatgtgagggctgtgccacagcccggtgccttccagagggcatgccagcctttgccagcgagccagccctgctcagagcctgtgaggcctgcacaggaagccgaagagaagacctggctgcccagctgcaggaaagagaagctccagccccggctcagtgagcactctgggccgcccatcgtcatccgagacagtccagttccctgtacccccccagcactgcccccctgtgcccgggagtgccagtctcttccacagaaggaggacgcaaggccacccagctctccaccaatgcctgtcattgacaatgtcttcagcctggccccctaccgtgactatctggatgtgccggcacccgaggccacaactgagcctgactctgccacagctgagcctgactcagccccagccaccagtgaaggtcaggacaaaggctgcagggggaccctgcctgcccaggagggcccctcagggagtaaacccctaaggggctcacttaaggaggaggtagccctggatttgagtgtgaggaagcccacagcagaggcctcccctgtcaaggcttcccgttctgtggagcatgccaagcctactgcagccatggatgtgccagatgtgggcaacatggtgtcagatctgccaggcctgaaaaagatagacacagaagcaccaggcttgcctggggtgccagtgaccacagatgccatgccaaggaccaacttccacagctctgtggccttcatgttccgaaagttcaagatcctccgtccggcacctttgcctgcagccgtggtcccgtccacgcccacctcagctcctgctcccacacagcctgcacccacccccacatctgggcccattggactgcggattctcgctcaacagcccttgtctgtgacctgcttcagcctggcactgcccagccctccagccgtagctgtggcctcccctgcccctgctccagctccatcccctgctccggctcgagctcaggctccagcttcagcccgggatccagctccagctccagctccagttgcaggccctgctccagcatctacttcagccccaggggactccctggagcagcattttacaggactacatgcgtccctgtgtgatgctatttctggctccgtcgcccactctcctccagagaagcttcgcgagtggctagagacggctgggccctggggccaggctgcgtggcaggactgccagggtgtgcaggggctgctggccaagctgctgtctcagctgcagcgcttcgatcgcacccaccggtgccccttcccccatgtggtgcgagctggcgccatcttcgtgcccattcacctggtgaaggagcggctcttccctcggctgccacccgcttctgtggaccatgtgctgcaggagcatcgtgtggagctgcggcccaccacgctgtcggaggagcgggcactgcgggagctcgccctgccaggctgcacctcacgcatgctgaagttactggcgctgcgccagctgccggacatttaccccgaccttctcggcctgcagtggcgcgactgtgtacgccgccagctgggtgagcatggggcagccccagtggccaccggagctgtgtgagcaagtgacaggtgtgtgtgctgtgtgagtgcgtcacagctggggctgagtgattccaaggactcctgcccgggtagggggctttaggatgagctctaggtacccccaccccttgaccctccagacaatcagtgagcaccttcatagcctcttttgtaggcttctgaacatgccagctgctctgtccccatggaaactcctcggcctcccctggtgctgcaccttcttggattccctcctcctctgcctgtgccttctccatctttggtgcagtgtttccggcactctggttaggccctgttttctagctgagataatttccctgatctccagcctagcatcccctttgtgagctctagccctaaataacccactgcatgctgggcctcagcccctgggtctctctcccacactgaactcatcccaaatcacactcccgagccttcccctcagctcacttcccacaaccagttcttttccatgtcagtgaagggcaccccctttcacaaagctcctcatgctctagacctggtgagggccacagctgcctttttgaacgtgtagttttgcagtcctccccggcccttgcatacacagaagtgtgcgcataagtcgcattgttttgtggtttgcttttcctctactaaatgatgtgcctgctgttc

SEQ ID NO: 902 - DNA, 2681 bp, Homo sapiens
attactgttttccctgttggacatatgaggaagtcgaagtatatagagggaaagcaaaacaaaatttgtttggacaaaacagaaatttttccaatggccatgtagtttgtgaaaaaaagcagcagctggagttggattctattgtagaagaaaccataacaggagattatgccttaatcataaatggccacagtttggctcatgccctagaaagtgatgtcaagaatgatctcctagaacttgcttgcatgtgtaagactgtaatttgctgcagggtcactccactccagaaagcccaagtggtagagctggtgaagaagtacagaaatgctgttactttggccattggtgatggagccaatgatgtcagcatgattaaaagtgctcacattggtgttggcatcagcggccaggaaggattgcaagcagtcttagccagcgactattcatttgcacagtttagatatctccaaaggcttctccttgttcatggaaggtggtcttatttccgaatttgcaaattcttatgctatttcttctataagaattttgcatttacacttgtgcatttctggtttggtttcttctgtggtttctcagcccagactgtttatgaccattggttcatcaccctttttaacattgtttacacatcactgcctgttttagccatggggatttttgaccaggatgtgagtgaccagaacagcgtggactgtccccagctctacaaaccaggacagctgaatctgctttttaacaagcgtaaatttttcatttgcgtgttgcatggaatctacacctcattagtccttttcttcatcccctatggggccttttacaacgtggctggagaagatgggcaacatattgctgactaccagtcctttgcagttaccatggccacatctttggtcattgtggtcagtgtgcagatagccttggataccagttactggactttcattaatcacgtcttcatctgggggagcattgccatttatttctccattttatttacaatgcacagtaatggcatctttggcatcttcccaaaccagtttccatttgttggtaatgcacgacattccctgacccagaagtgcatctggcttgtaattctcttaacaacagtggcttcagttatgccagtggtggcattcagatttttgaaggtggatttatacccaaccctgagtgatcagatccgccggtggcagaaggctcaaaagaaggcaaggcctccaagtagccgaaggcctcggacccgcaggtcaagctcaagaaggtctggatatgcttttgctcaccaagaaggctatggagagcttatcacatctggaaaaaatatgcgagctaaaaatccacccccaacatcagggctggaaaagacacattataatagcactagctggattgaaaatttatgtaagaaaaccacagacaccgtgagcagctttagccaggataaaacagtgaaactgtgagtcaatatgaatttaaaccacgtagttatcttttcacttcaggtggagctgaaattctgctggctccagagtttgagatttgaggcaagaggtggggcaggcagattgcctcacttaacttaaatctgcggcagacaactgccagtgcccatcaaacaggagtgtgcgctatggaaaaccaggccagagggtcactgtctggtttgtgatttggtggacaaaacactcgctgttacaagtacagattttttttttttttaaatcaacctagataccaattgacctgaactttagaatcttatttatggagaaaaacttgtaaagctgcatattcactgaatggatcctcaggcggataaaagggtgcattttaaaggtatatatccaagctgaaaagcatgcctattgacagataaacatgtatctgtaagatcagcctttcccaaggtatacttttaaaatttaaagcgtgtactgtgttgctttcagactgagttgcatgtcactctttagtcttgatatctacctgtctgttcagccaggacaacaaatggcttccaagcctgaagaatacaaaagtgtgcttgtgtttctcatttttataccagtctagggacaaaggagactgaacatctttgcagcaggataggctggtaatttgatcaaatttattcaaaaagctctcagtctgtgtcatgtaaggacatgcttatgaaatgtgagagaggctcgccactaagtattctaaatacttttcaatggcttttctaacaacctcagtagtaatttgccgagcatcatccagaccattaatagaatcagcaaagcactggaattccacactttaatgataatattccacatagtctatgggcaaatattttcaacatttccaatttttaaagcttcagaattgaagccaaacaaattaataaataattgttttaattactatttaaaaactcaggtttagattgtttaaaattagttgcttttgatactcagctgtcatgtttataattcaaacatgtagtaaacatatgtaggtaaggttgtttttttggagatgttgcagctcaaatttcagtccacatatgaatcatcagtgtattttccataaagtgattcgggcatatttgtgtgaaaacctcagttctgtcacttcttacctctataaacttggacgataatgtg

SEQ ID NO: 903 - DNA, 2243 bp, Homo sapiens
ctgacacttttagaaccaagtttccagaaacaacgttagctcctaaaacacaacggacacgtcgtccccgtcccagacccaaaactacatcaagtcctgaagtacctcagaacaaatcggtttctgttacaggctttgaacctgttgttcatagtactgatgctccaggaacaacatttgctctgactgaactgcaaactcttattttgaaaccagtgacatcaccaagcctagaaatgacagaaagtctacctgtttctgatgttctggaatcggttacacttagtactgagtcaccaaaggagaccatagcaccagccaaaacagactatgtatatcccactgccaaagcaccactctggccagaggagccaaagactgaagttgtggaatctattacatatgtatctgaaccacctgagaccacactagaaacgtcgcctctgccttctcaatctataaccctacccagcccagatgagcctcagactgaacctgctcccaagcagacaccacgtgctcctcctaagccaaaaacatcaccacgcccaagaatcccacaaacacaaccagttcctaaggtgccccagcgtgttactgcaaaaccaaaaacgtcaccaagtccagaagtgtcatacaccacacctgctccaaaagatgtgctccttcctcataaaccataccctgaggtctctcagagcgaacctgctcctctagagacacgaggcatcccttttatacccatgatttccccaagtcctagtcaagaggaactacagaccactctggaagaaacagaccaatccacccaagaacctttcacaactaagattccacgaacaactgaactagcaaagacaactcaggcgccacacagattttatactactgtgaggcccagaacatctgacaagccacacatcagacctgttctgaataggacaactacaagacctactaggcccaaacccagtgggatgcccagtgggaatggagtgggaacaggggtcaagcaagcacccaggccatcaggtgctgatagaaatgtatcagtggactctacccaccccactaaaaagccagggactcgccgcccacccttgccacccagacctacacacccacgaagaaaacctttaccaccaaataatgtcactggaaagccaggaagtgcaggaatcatttcatcaggcccaataactacaccacccctgaggtcaacacccaggcctactggaactcccttggagagaatagagacagatataaagcaaccaacagttcctgcctctggagaagaactggaaaatataactgactttagctcaagcccaacaagagaaactgatcctcttgggaagccaagattcaaaggacctcatgtgcgatacatccaaaagcctgacaacagtccctgctccattactgactctgtcaaacggttccccaaagaggaggccacagaggggaatgccaccagcccaccacagaacccacccaccaacctcactgtggtcaccgtggaagggtgcccctcatttgtcatcttggactgggaaaagccactaaatgacactgtcactgaatatgaagttatatccagagaaaatgggtcattcagtgggaagaacaagtccattcaaatgacaaatcagacattttccacagtagaaaatctgaaaccaaacacgagttatgaattccaggtgaaacccaaaaacccacttggtgaaggcccggtcagcaacacagtggcattcagtactgaatcagcggacccaagagtgagtgagccagtttctgcaggaagagatgccatctggactgaaagaccctttaattcagactcttactcagagtgtaagggcaaacaatatgtcaaaaggacatggtataaaaaatttgtaggagtgcagctgtgcaactctctcagatacaagatttacttgagcgactccctcacaggaaaattttataacataggtgatcagaggggccatggagaagatcactgccagtttgtggattcatttttagatggacgcactgggcagcaactcacttctgaccagttaccaatcaaagaaggttatttcagagcagttcgccaggaacctgtccaatttggagaaataggtggtcacacccaaatcaattatgttcagtggtatgaatgtgggactacaattcctggaaaatggtagatgctgcacaaagttaccttctgtttcatcattgcaaac

SEQ ID NO: 904 - DNA, 1963 bp, Homo sapiens
acttccgctggccgctggctcgctggccgctcctggaggcggcggcgggagcgcagggggcgcgcggcccggggactcgcattccccggttccccctccaccccacgcggcctggaccatggacgccagatggtgggcagtggtggtgctggctgcgttcccctccctaggggcaggtggggagactcccgaagcccctccggagtcatggacccagctatggttcttccgatttgtggtgaatgctgctggctatgccagctttatggtacctggctacctcctggtgaaagcttgtgtgtttggcaatgagcccaaggcctctgatgaggttcccctggcgccccgaacagaggcggcagagaccaccccgatgtggcaggccctgaagctgctcttctgtgccacagggctccaggtgtcttatctgacttggggtgtgctgcaggaaagagtgatgacccgcagctatggggccacagccacatcaccgggtgagcgctttacggactcgcagttcctggtgctaatgaaccgagtgctggcactgattgtggctggcctctcctgtgttctctgcaagcagccccggcatggggcacccatgtaccggtactcctttgccagcctgtccaatgtgcttagcagctggtgccaatacgaagctcttaagttcgtcagcttccccacccaggtgctggccaaggcctctaaggtgatccctgtcatgctgatgggaaagcttgtgtctcggcgcagctacgaacactgggagtacctgacagccacactcatctccattggggtcagcatgtttctgctatccagcggaccagagccccgcagctccccagccaccacactctcaggcctcatcttactggcaggttatattgcttttgacagcttcacctcaaactggcaggatgccctgtttgcctataagatgtcatcggtgcagatgatgtttggggtcaatttcttctcctgcctcttcacagtgggctcactgctagaacagggggccctactggagggaacccgcttcatggggcgacacagtgagtttgctgcccatgccctgctactctccatctgctccgcatgtggccagctcttcatcttttacaccattgggcagtttggggctgccgtcttcaccatcatcatgaccctccgccaggcctttgccatccttctttcctgccttctctatggccacactgtcactgtggtgggagggctgggggtggctgtggtctttgctgccctcctgctcagagtctacgcgcggggccgtctaaagcaacggggaaagaaggctgtgcctgttgagtctcctgtgcagaaggtttgagggtggaaagggcctgaggggtgaagtgaaataggaccctcccaccatccccttctgctgtaacctctgagggagctggctgaaagggcaaaatgcaggtgttttctcagtatcacagaccagctctgcagcaggggattggggagcccaggaggcagccttcccttttgccttaagtcacccatcttccagtaagcagtttattctgagccccgggggtagacagtcctcagtgaggggttttggggagtttggggtcaagagagcataggtaggttccacagttactcttcccacaagttcccttaagtcttgccctagctgtgctctgccaccttccagactcactcccctctgcaaatacctgcatttcttaccctggtgagaaaagcacaagcggtgtaggctccaatgctgctttcccaggagggtgaagatggtgctgtgctgaggaaaggggatgcagagccctgcccagcaccgccacctcctatgctcctggatccctaggctctgttccatgagcctgttgcaggttttggtactttagaaatgtaactttttgctcttataattttattttattaaattaaattactgcagtgg

SEQ ID NO: 905 - DNA, 2392 bp, Homo sapiens
agatcgggtccggcgctccagaacagaacgatccctgaggctcccttgctcgaactgtgggacttaccctactatggtccgagcctaccctatttcattatactcaagtaacgccccagaaattccagagaatctcacacaaagaggttgagtcttgccgtggtgccttcaggggaatgtcatcccgggctagaagagctgcaaaaggctgtcaggcttctcagaactttgcttctccagcagaataatcctgcggaagactgagcagttcttgtgagtgtaaaaccatggcccatgcattggtgacgttcagggatgtggctatagacttctctcagaaggaatgggagtgcctggacactacccagaggaaattgtacagagatgtgatgttggagaattataataacttggtctcactgggatattctggctcaaagccagatgtgattaccttactggagcaagggaaagagccctgcgtggtggcgagggatgtgacaggaagacagtgccccggtttgttatccaggcataagaccaagaaattatcttcagaaaaggacattcatgaaatcagtttatccaaagagagtataatagaaaaaagtaaaactcttcgtctgaaaggatccatttttagaaatgagtggcagaacaaaagtgagtttgagggtcaacagggacttaaagaaagatctatcagtcaaaagaaaatcgtctctaaaaaaatgtcaactgatagaaaacgtccctcttttactctgaatcagagaattcacaatagtgagaaaagctgtgactcacacttggttcaacatgggaaaatagattctgatgtgaaacatgattgtaaagaatgtgggagtacttttaataatgtctatcagcttactctccatcagaaaattcatactggtgaaaaatcctgtaaatgtgagaaatgtgggaaagtttttagtcatagctatcaacttactctgcatcagagatttcatactggtgagaaaccctatgaatgtcaagaatgtgggaagacctttactctttacccacaacttaatcgacatcagaaaattcacactggtaaaaaaccctatatgtgtaagaaatgtgataagggttttttttagtagattagaacttactcaacataaaagaattcatactggtaagaaatcttatgaatgtaaagaatgtggaaaagtttttcaacttattttctactttaaagaacatgagagaattcatacaggtaagaaaccctatgaatgtaaggagtgtgggaaagcttttagtgtatgcggacaacttacccgtcatcagaaaattcatactggtgtaaaaccctacgaatgtaaggaatgtggaaagacctttagacttagtttttaccttactgaacacagaagaactcatgcaggtaagaaaccttatgaatgtaaggagtgtggggaatcatttaatgtgcgtggacagcttaatcggcataaaacaatccatactggtataaaaccttttgcatgtaaggtgtgtgagaaggcttttagttatagtggtgacctcagagtacattctagaattcatactggagagaaaccatatgaatgtaaggaatgcgggaaagcctttatgcttcgttcagtccttactgaacatcagagacttcatactggtgtgaagccctacgaatgtaaggaatgtgggaagacctttcgagttcgttctcaaattagtctacataagaaaattcatactgatgtgaagccctacaaatgtgtacgatgtgggaagacctttagatttggtttctaccttactgaacaccagagaattcacactggtgaaaagccctataaatgtaaagaatgtggaaaggcctttattcgtagagggaatcttaaagaacatctgaaaattcattctggtttaaaaccctatgactgtaaagaatgtgggaagtcctttagtcggcgtgggcagttcactgaacatcagaaaattcatacgggtgtaaaaccatacaaatgtaaagaatgtgggaaggcctttagtcgtagtgtagaccttagaatacatcaaagaattcatactggtgagaaaccctatgagtgtaaacaatgtgggaaggcctttagacttaattcacaccttactgaacatcagagaattcacactggtgagaaaccctatgagtgtaaggtatgtagaaaggcctttagacaatattcacatctttatcaacatcagaaaactcataatgtaatttaatataagaaaaggtttccatgtcatgctctatttatagaatatcaaaatatttatggccagaagttctgtcaatgtgttgatgtttttttacacatattaacttaataaatgtatgagtctt

SEQ ID NO: 906 - DNA, 1867 bp, Homo sapiens
cagctgcagcctcctgagtcaccagcgtagtcacttggggcccaagccctttggctgtgatgtgtgtggaaaggagtttgcccggggatccgacctggtgaagcacctgcgggtgcacacgggtgagaagccctacctctgcccagagtgcggcaaaggtttcgcggacagctccgcccgagtcaaacacctccgcacccacagtggcgagaggccccatgcctgcccggaatgcgaccgtaccttcagcctcagctccacccttcttcgccaccgcctcactcacatggagccccaggacttcagcttcccaggctatcccctacccgctctgatccccagcccacccccacctcctctgggcaccagccccccgctgacacctcgaagtccctcacactcgggtgagccttttggcctgcctggcttggagccagagcctgggggcccacaggctggggagccacccccaccactggcgggcgacaagccccacaagtgccctgagtgtggcaagggcttccgccgaagctctgacctggtgaaacaccatcgtgtgcacacaggggagaaaccctacctctgtcctgaatgcggcaagggttttgctgacagctcagcccgagtcaagcacctccgcacccaccgtggtgaacgggcccggccaccaccaccatccactctgctgcggccacataacccacctggcccagtacccatggcccctcgaccccgagttcgggcccagccttctggacccagccagccccacgtgtgtggcttctgtgggaaggagttcccccggagctcagatctggtcaaacacaggcgtacacacacgggggagaagccatacaagtgtgcagagtgtggcaagggttttggtgacagttctgcccgcatcaagcaccagcgtgggcacctggtcctgacgccctttgggataggggatggtagggcaaggcccctcaagcaggaggcagcaacaggactggaatgacgcggtccagggagggtggaggcccaggagaccaaagggaggggctctgccgcttagcagagaagaaagggcctgggaggtggtgggagggagaaggaagggaagaaaggggaggaagaatagatagaaatagggattggagacagtaaccttgaagctcaggaaactgtcctggctgggctgagtcaggaccttgccaggacgggctgtacccctggcttctagaagactgcctagcacacagtaggcattcaatacttgttgaataaataaactggctttcacctaaggactcaaccctaaattcctgctgcctcatctgttaagaactgacactttccccttgctgggcaggtagtacacacctgtaatcccagcagtttgggaggctgaggtgggagaatcacttgagcccaaaagtttgaggctgcagtgagctgattgcaccactgatgcctcccaaccttgctctgggagaccaatgcctgaaccagggtttgtttaccttctgagctgcagagatggggcttctggaatttaaggtaacaggatgaggcaggggtatcttgatcatccggatggggcaaatactgctgtgtggcatggtggtacccacccctatggaggggcactcttggacagagcccagacctttgtgccctggagggagccaacccaccctgacacggagacactggcagaatagaccagagacagaaggtgctctcatggtatccagcctggatgccaagcccaagtcctggtggatagcagaggccagctgtttgggaaaagggcaggatgctctgaggcctggcagccacatttccatgtgtctttttaccaataaacggcttctcttctgag

SEQ ID NO: 907 - DNA, 1946 bp, Homo sapiens
agacgctgcagcgatgcctcgcccacggcgggtcagtcagctcctggatctatgcctttggtgcttcatgaagaatatttccagatatctcacagacattaagcctttgcctcccaacataaaagacagactgattaaaataatgagtatgcagggacagataacagattcaaatataagtgagattttacatcctgaagtccaaactctagatctacggagctgcgatatatcagatgctgctctcctgcacctgtctaactgtagaaaactgaagaaattaaatttaaatgcttcaaaagggaaccgagtttctgtaacttcagaaggaataaaagctgtggcttcatcttgttcatacctacacgaagcttctttgaaaagatgctgcaatctcactgacgaaggagtcgttgctcttgcactcaattgccagctgctaaagatcatcgatttaggtggctgcttaagtattactgatgtgtccttacatgcattaggaaaaaactgcccatttttgcagtgtgtcgacttttcagctactcaggtatctgacagtggtgtgattgcacttgttagtggaccttgtgcgaagaaattagaggagattcatatgggacattgtgtaaatctgactgatggggctgtcgaagctgtccttacttactgtcctcaaatacgtatattactcttccatggatgccccttgataacagatcattcccgagaagtgttggagcaattagtaggcccaaacaaactaaagcaagtgacatggactgtttattgatgcttttttgaagatgatcaatgctaggaaagcttatcaaaactactttcccaggaaaccatctatagagatttgcattctacttaatgttaacactatttttaattattttattgtcttaagttataactctcagagaattagctaagtcttggtatatacatggtttgtgctttactcttaaacatctttaaagtgctattattctatatctgttggatgagtcattatttttgaaatgataatcctagcatgaactctgatctatggtgttggattctgtttcttaaataactttaaaattaactgttttcccttgagatttccttctcctatgtaggtatttgagctattgttctaagtttacctgtaagtataaaccttgggagaatctaagtaaacatatttctaaaagcatagttaccttcctattttctggctcttaccttcttggagtatttaagtgcccatttgccaaaagcagacctgaacatcaagcctgttaattcttcaaagaatttaggtatttgtttcaccgaaatgaagtgacttattagccattcagcgtattagtattacagaggctcttgcccagccacatccattcattgatttttatggctactcttcccagttacattttatgcatctgtaagctttccttccttagcaaaattgcattcaaaaatgtgtaaaaatgagtaaatacagaatatcactacagagacttgtatcctcaggtttattgatttcacattgtgaaataaacagcaaaggtcttagttttcaagtgaaaactttttggtaatcacaaaattacctgacacataccacgcttaaaccaacccccaaatttagcatattcattttgccatgagccagtcttgagattttcttaaaagatttcttattttgcctctgatgtagtgaaaaacggggtaagtatgctaactttcttgtatatgttggggggtacttattcaactccatttcttgtccttacaagatttataaatgtggtatgtttatagtgtggatatatatgttgccactgcaaaggtggtgcatatgtatatatgtgcaaaatgggtaaggcctgttctaactatgaaatttttctaaagacaaattcaataaaatttaatactgaatattt

SEQ ID NO: 908 - DNA, 3232 bp, Homo sapiens
tttcttttgatttccattgtcttggtaagttattgttagggttatttttaatgtgccttccagccagaaaaatcagctgtctaaagaagcattgcaattgtaatggggactcttacctcttagaatgcaagattttccctcctccctccctcttctccatctctttccctcatgatttgagaactgtaataatcctccactggtggcattacctacctagaaaacctgctgattcttagcatggaactttgcttcagtttgcaggacaaagtctgcttccttccggtcttcatttactttttatacaagggatgcagtcagctctccatgtataagatacctagatgatggatacatatttcataaatgaaatttatgtcattaatgaatatccccttgcccacaaccagctcaggctttcaaaattcgagaatggtcatgccacacagcattctaatctagatggattaattctgttgttcaaaacattctcatacctgcctttatattgaaaacaaattctagatacaactggggttattctggaaaagcacattctcaccttttttttttttttgagacggagtctcgcactgtcgcagggctggagtgcattgtcgtgatctctgctcactgcaacctctgcctcctgggttcaagcgattctcctgcctcagtctcctgagtagctgggattacaggtgcccaccaccacgcccagctaatttttgtatttttagtagagatgaggtttcaccatgttggccaggctggtctctaactcctgacctcgtgattcacccgccttggtctcccaaagtagtgggattacaggcgtgagccgctgcgcctggcccattctcatcttattcaaattactggcacatgggcaagagagacaatgacatggacagaagcttttctgcctttctctgcacacacatacagtgaaggaaccacaggcagattttttgatcagtttggtgaatacattgctcgttgtcactgttccaaccacattggtaaaaaaaatagttaccttttgtcctttggatgtcatgtctaaactttggaaaatataagtcattgcccttttagagaatgtttgtgtagtccaaagattgtgagctccatatagtatgaaaatcaagtacttttgcatgagcaatagcagtttcaaagtgaaatattataacttaatctttttcaagtagatcaaaaattcttaactgattaataaaatattttatcaatatatcatccccctttcagagagaagtccccagaagagacagcacacttagcaattgccctcattattaaaggcctaggtgagtggcataaagggccatatgcgattatgtttcaaggtaaacattacctaaccttgtgtgggttaaaaacagtgaagtgtccttgtatcctgataaaatttttttttaaataacatggtgggttgacatttttgcatctgctataagttttctcacatgtcgttcttcctggtgagagcgggctgcatcattctggcacttaatttgggtgttcgattttgctatagagttctttgcagtacagcatagcctcttcttggccttgggaacagtgaactcttcttttgatggtgtggattgcatgcatatctggagagaggagggctcaggactgtgttcactttatttggtcagatgtattttatttgaaaaccatttgagcccaaaatacaagtgtacccttcccacttctggctcaagcacccgtgagccgactagacgtaatattaaaacttactgatgctgggcgcggtggctcatgcctataatcccagcactttgggaggccaaggcaggcagatcacctgaggtcaggagttggagaccagactggccaacatgacgaaatgctctcgctactaaaaatagaaaaattagccaggcgtggtggcacacccctgtaatcctagctactcgggaggctgagacaggaaaattgcatgaacctgggaggcagaggttgcagtgagcagagattacaccactgcaacgagactcgggcccagacgagatctgcctgggcgacacagtgagactctgtctcaaaataaataaataagtaaatagaacctcctgagctaccctggcttataaggattcagattactttaggaaattaggcattagcactaggaggggggaagatggctggcaaaacttctagctagcaacctatgtctagcacatgggtaactaaccatagcgagatcctgaacacatatcctctaggtgcaggtggagggaacgatgtccaatacctgaagcagaatctcacatggacggaacgtctgtatttccctctcctgcacgaatcactcatcattcttggagggcttctctgtattcctccttttcttctctcccctcccctgccttttgtcttttctaaagagtctgaactccgatttccatgctctcctgctacattaataagcaaaacctgcttgtgtgtacggttctttactggaaacatgactttttgtttctgtattggttttactgtcatccagttttctagtttaatatctagcaaaactaaatctgaatgtactcgctttttccgttaagtatgccaagcacctcggttgaaaggcttgactcaaaccagaagtcttgctggaattcgtctctgaacacttgaaaaacagaaaccctgagccgcaacaaacatgcctctgtgtgtcgggattgcctttgtctctgcttccatgtggcttttccttttgtagctatgcttagtgacataatcttccctcttctagccttctcctttcaagcctgtctgttaattaaccatgtcagtattggcaagcatttatcttcccccaccctaacatgcaatcttctaagaattttgcaaaattctaaacaaatatagagatggtatatagaattcatatctagaaaactttgattttaatgtgagcttatcaaatttgttctggcttttttggcactaaggcaaaaacatgttaaccagaaataatttattcttcatgtatgtaaaatatttgagaatgtttagccttttattagaattttacttggaaaatatttatctttctacacattttacacttatgttcctttgcttataacccaatttcttaacttttttgttacttaagcaaatatcaattatgttttattatctaataaagtgtaagattcttactatc

SEQ ID NO: 909 - DNA, 1526 bp, Homo sapiens
aaagacacaaatcgcctcccggagtggcgcctccagtcgcggcggagcgcggcgttggcggcggatggagggcgcgagcgggcggccgcggaggctgcacccggcggggcgctgatgcggcgcctggaccttcgctgcgcgacttcgggggcgtcggccgagttgggactccgcgatgcagctcctgaaggcgctctgggcactggcaggggccgcgctctgctgcttcctcgtcctagtgatccacgcgcagttcctcaaagaaggtcagctggccgccggcacctgtgagattgtgaccttggaccgggacagcagccagcctcggaggacgatcgcccggcagaccgcccgctgtgcgtgtagaaaggggcagatcgccggcaccacgagagcccggcccgcctgtgtggacgcaagaatcatcaagaccaagcagtggtgtgacatgcttccgtgtctggagggggaaggctgcgacttgttaatcaaccggtcaggctggacgtgcacgcagcccggcgggaggataaagaccaccacggtctcctgacaaacacagcccctgaggggccccgggagtggccttggctccctggagagcccacgtctcagccacagttctccactcgcctcggacttcacccgttctctgccgcccgcccactccgtttccctgtggtccgtgaaggacggcctcaggccttggcatcctgagcttcggtctgtccagccgacccgaggaggccggactcagacacataggcggggggcggcacctggcatcagcaatacgcagtctgtgggagcccggccgcgccaagcccccgccgaccgtggcgttggccctgctgtcctcagaggaggaggaggaggaggcagctccggcagccacagaaggctgcagcccagcccgcctgagacacgacgcctgccccaggggactgtcaggcacagaagcggcctcctcccgtgccccagactgtccgaattgcttttattttcttatactttcagtatactccatagaccaaagagcaaaatctatctgaacctggacgcaccctcactgtcagggtccctggggtcgcttgtgcgggcgggagggcaatggtggcagagacatgctggtggccccggcggagcggagagggcggccgtggtggaggcctccaccccaggagcaccccgcgcaccctcggaggacgggcttcggctgcgcggaggccgtggcacacctgcgggaggcagcgacggcccccacgcagacgccgggaacgcaggccgctttattcctctgtacttagatcaacttgaccgtactaaaatccctttctgttttaaccagttaaacatgcctcttctacagctccatttttgatagttggataatccagtatctgccaagagcatgttgggtctcccgtgactgctgcctcatcgataccccatttagctccagaaagcaaagaaaactcgagtaacacttgtttgaaagagatcattaaatgtattttgcaaagcct

SEQ ID NO: 910 - DNA, 1615 bp, Homo sapiens
tttagggacctgattttctctctagtcctctcattcctttccccttcctcacctcctccgatcacagctccggtgggctccgcagatgggaaagggtttccagcgcgcgcctagcggccacaaatcacttcccggggccgccccgccaggcctcaaacctcccagagccgtcggtcggcttttactttaacgaggattcagatgggtcacaccctgtcctccaaatgcgggcctgctccccggaccccgcccagggggctcgccccagtgccgaggctcctgggcaaccctagcactctgcgagtcggggaagtgaccccaaagttgcttctgagtggagacttccgcacgcagaggcgtccccgcagctgccaggcttttcaggggcagcatcccccgcccgtcaggagcctgtcctcggggccaccacgcgccccgcgcctcagccccgcaggggcctcaccggggcctcagtctgcaagcagccggggacagcgggcttcctcccctgcccggagcggccgagcgtctcggccaacctcccccgcggagagcacagcgcccccgcgcagtccccgaacttcttcccgcgtcggctcgggctctcgggtggggacgcggggacccctcgctcaccgatatccccatcgtcgtcgtcctcctcctcctccatttgtagcaaaacattcctgctcatctttttcatgtctccctcagaaggcggctccgaacttggcgcgaagttgggggctcccgggttccagaacggcgcggctctcccaggggccggatcggggaccgcggggcgtgtgtcgcttgggctcaggggccgctgagcccagccagcgccggggaaagccgagccgaggcacccaccgaccggagcccagagccggaggacgcctctcgcctgccgagcggagcccggagactgagcatgcccagtgcggccgccgcggctcgctgcggaatgattgaacttccccggttttacgaggcgcgcagaaggaagtcggcaggcgagactgcagagggagtagtgcgatcctgcgcgcgggggaactagctggagggcaaggcgggaacacgtgagtgcgggagtggactgggttccctgagcattgatcccaaacagggcagcttttcgttccaaggtcgtctgtggacacacactgtggcttgctttgttttaacgtctgatactggagaggagggagatgctgctgcagcacaactgcagaaccctggaaggcgaactcgtttgaatggcttttaaaggcgacgtggagctaataatggggggatcttaaattactctagctccgaagtgggaaagtggaatctgtacgggtaggttaagattacggtggagtcggggtgggaggagaggcaaaactcagagaagcgccccctactccccccgcgcgagcacacagggagtggtcggaagataatcgctgaagcgtccagcctatttgtacaattgaaactagtcctctgtgtcaaagagggagaagaagccgaagaccactagagttagatgtaaactcttctaaagcaatgtggaaagctataataagagaaaagaaagtcgtgaaataaaattaaggcagag

SEQ ID NO: 911 - DNA, 1662 bp, Homo sapiens
gagaattggggtggggcgcgccaagaggagcaagcattatagaacgtggggagcatgagaaatacacggaggtggaaacgccggagtggctggcgggtaaaggcagcgggcgcagatgaagcgggctgggcgtcccacgcgcagaaccgtcccggacagaagccgcaggggctgcgctggctggaaaaaggaacgcgagtacagcgcgcgtggcgcggggtctgctccaggacggaatcttttgggtggcccgcatgaggggtttgcaggaccccgggcctttgggaagttgtctgctaaactccagtagaccctgaggagcagcggctcatgaatcttcttaaacttctgtcaccagcggctgggccagctgaaggtgaccatggcacacgagggagagagaagcccgcgagaggcggagaaatgtggggtcgtccaggagggtcgacaaggcaaagaacctgaagacgacccaaaagggtacctagagttgaacttcctctctttttagaagaatggatttctcggagtctgaaaaatttatggttcttctctggaagaattttattttaaagaggcggcgatgtattgctttagttgtggaaatggtcctcacatttctgtttagtgctgcgcttttggcaacacgctctgttattactataaataagaacggacctttcgattttgctgctcagcctgtcgatgaagtgcctttctacatcacagcttccttaatttctccttctcctttggaattggcttacgtgccttccagaagtactgtggttcagggtattattgaaagagtgaaaatggatttaaaccctcaaatgaaaggttagaaattaacattttctgaaaaaacatacagaattactaaatcgatttagtgaagacatacttacaaccttattaactggttcttaacctcccaagtaaaacatcgttggaatcctcatactaagtataaatattatggactttgttaaacttgaaagttaaatttatataaaatattttgttcatagagcccagaacaaatagtaatatttcaaaatgagatgaccaattattattattattctaagttgttatccagttttgtgatactgttttttctatctggttgtgcttcttgaacctgggtaagtatacctccaggggtgtgtgattttgtgccacaggtcagtggtcagttatttaaaataatgttttatattaaaatgtggtgtgagtaatataggaaggctttagaaaacacttaagctatgtagaattattttaaaagccctcagtctctcacttaccttcatattcccggatcagtttcttacctctttctcttagaggtaaatactgtgagaagtttaggtcggccgggcccagtggctcacgcctgtaatcccagcattttgggaggctgaggtgggcagatcacctgaggtcaggagttcaagaccagcctggccaacatggcaaaaccccatctctactaaaaatataagaattagccagacatggtggtatgcacctatagtcccagctacttgggaggctgaggcatgcgaattgcttgaacccaggaggaggaggaggttgcagtgaggtgaaattgcaccactgcactccagcctgggtgacagaccaagactctgtctc

SEQ ID NO: 912 - DNA, 1306 bp, Homo sapiens
aaaaagcgaccttttctgagcgcgtttgcctgttgagtggtagcctttcccctcaaccagcaatggaggagcagccccagatgcaagacgccgacgagcccgcggactccggaggggaaggccgggcaggcgggccaccgcaggtcgccggcgcccaggcggcgtgcagcgaggaccgcatgaccctgctcctcaggctgagagcacagacaaaacaacaactcttagaatataaatcaatggttgatgcaagtgaagaaaaaactccagaacaaattatgcaagaaaagcaaatcgaagctaaaattgaagacctggaaaatgaaattgaagaggtaaaagttgcttttgagataaaaaagcttgcattagacagtgtgctcatggataacatgaaacacctattagagctaaataaattaataatgaaatcacagcaggaatcttgggatttagaggaaaaactgcttgatattagaaagaagagattgcaattaaaacaagcttcagaaagtaagcttttagaaatacagactgaaaagaacaaacagaagattgatttggacagtatggaaaactcagagaggataaagatcatacgacaaaacctacagatggagataaaaattactactgttattcaacatgtgttccagaaccttattttggggagtaaagtcaattgggcagaggatcctgcccttaaggaaattgttctgcagcttgagaagaatgttgacatgatgtaataagaattcatttctgacatattttacatttctggcaatctcaactcttatttggaatacttctgtgcatttgtctgtccaccgtaattttagaaaagcatatccataacgtttacagttgtagtacagttgtggttagttatttgtagtgggattgaaagtaatttttttctttttatatttctatatttagtttgtttttttgttgttgttgttttttgagatggagtcccgctttgttgcccagactggagggcagtggcgcgatctcggctcactgcaacctctgcctcccgggttcaagcagttctgcctcagcctcccaagtagctgtgactaaaggtgcacgccgccatgcccagctaattttttgtattttagtagagacggggtttcaccgtgttgcccaggctgctctcagaactcctgagctcaggcagtccaccgcctcggcctaccgaagtgctaggattacagacgtaagccaccgagcctggtctagtttgcattttttttctatcagttttataagttaagaaataaaaggaattaatgtt

SEQ ID NO: 913 - DNA, 2637 bp, Homo sapiens
attgtgtctattgtatcccttggctggtgtatttgtacatctctcgggacgtgaaattgacagtgaaaagtatggcagatgagcaagaaatcatgtgcaaattggaaagcattaaagagatcaggatatcactccgccacccaagctggagttcagcagtgccatcgtggctcactgaagccttgaattcctgggctccagaagttatcccacttcagcttccccaataactggactacaggcttgtgccaccatgcctggctaatttttcttaaatattttgtagagacagggtctcactatgttacccagggtggtcttgaactcctgggctcaagcgatcctcccgccatggcttcccaaagtgttctgattataggtgtgagacaccgcactgagccagaaacttttaatgttgatgaagaaatccaatttatcagtattttttatggattgtgaattcttgtgccatttaggagaaatgtttgcctaagtcgtattcacaaagattttctcctatattttcttccagaaattttatttttaggtttcacgtttaggtctatgatccattttcacttaatttttttgtatgttgcaaggaacaagaccctgcagatggagaaggtcaaggctcgtttgaaggctgagtttgaggcacttgagtcagaggaaaggcacctgaaggaatacaagcaggagacggaccttctgctacaggagaagatggcccatgtggaggaactccgactgatccacgctgacatcaatgtgatggaaaacactatcaaacaatctgagaatgacctaaacaagctgctagagtctacaaggaggctgcatgatgagtataagccactgaaagaacatgtggatgccctgcgcatgactctgggcctgcagaggctccctgacttgtgtgaagaagaggagaagctttccttggattactttgagaagcagaaagcagaatggcagacagaacctcaggagccccccatccctgagtccctggccgctgcagccgctgccgcccaacagctccaagtggctaggaagcaggatactcggcagacggccaccttcaggcagcagcccccacctatgaaggcctgcttgtcatgtcaccagcaaattcaccggaatgcacctatatgccctctttgcaaggccaagagtcggtcccggaaccccaaaaagccgaaacggaagcaggatgaataaagaaagggagagcacatgaagctttgctaattataacccctcaccttgaccagagtcattgatgtcctgatgtgaaacaacccttgcccaaccccacgaagtctcctatttaatgtgatggaagcacaacccctctctcactttgctcctatttctttctgctcttgggatttctggtttaggaagagatgtggttcaggtgctaaacagtgtgtctgatgatcccttctctcccactcacatttcaacccctgcccttgtttggagctaagggaagggcaaaaggctcagatatgattctctatctcttgtgcctgaggcctggagcctaaggagctgtagggtctgaggggcaggggaggcccatatcttgtttcaggtaaaggacccagtatttcccctccttgtacttttgccttaggttctcaagggactatagtcttcatgttggattctccaacaggctgggtgcatgtatccccctactcctaccctcatctcatccttaaggcccagaggtagcttggacaagccctccttttcataatcatttgggaggcatggctgtaattctttagctttctccacttctgtctcccacatatactaaaattcttaggtactaggctgtgtgtcttgggatcttaagatcaatgaacctttccccaatatctagtctttgcaaattctagtagaagatttccacagtgaaatcagtgagccagaccaactctacatctcctgcctaacctactgcctaagtcattagggctgagggctcggctgtaggggcttccttaggctgagagtgcccccaggctgacatctgtgttggcttttgttcagaaccattactctggcacatgctcaatggtatattgcagggaggagaggagtagatttagatttgagtaaatgccaatcactttacacatgaaggtgggtgggactttccttccattcatcccttgctctcttggatctgaactcttctggagcctcagctcaggatagctgctggccactcctgtcctgtggattgtgcaggtggcctttcctcccaaaagaaaaggcatcaggctccccaagccccacagctctcctttccaccaaagccaggtttcctggtaaggtcactcgaagataagggatggggatgggggctgactgacaaaaaattttagccccaggtctcagtacctggctggggagggggatatttttccttccttaagtagttttacattgccacagtgtgtatgtgttcactatataaaatgttcctctgctctttgaaagtaagagtgttgtgtctgtacaaatccttttaacatgcattcattggagtaaattctgagtatctactgtgtattggataatacaaaagatgtaatgtcatttacctttctgggt

SEQ ID NO: 914 - DNA, 1440 bp, Homo sapiens
gcggaagggtgcggcgaggcgaaatggcggcggctgcggactcgttctcaggcggccccgcgggggtgcggcttccgaggtcgccgccactcaaggtgctggcggagcagctgcggcgcgacgcggagggcggcccgggcgcgtggcggctgtcacgggcggcggcgggccgcgggccgctggacctggcggccgtgtggatgcagggcagggtagtgatggcggaccgcggcgaggctcggctgagggacccgagcggggacttctcggtccgcggcctggagcgggtgccgcgcgggcggccctgtctagtcccaggaaagtatgtgatggtgatgggagtggttcaggcctgcagccctgagccctgcctgcaggctgtgaagatgacagacctttctgataatcccatccatgaaagtatgtgggaactggaggtagaagatttacacaggaatattccttagagtatgttggaactgtcgttaaaaacaaccaaaatcccgaaactatttagaagcttataatgatgtgggtttcatggacacttttcaatgcgtatttttcaaatgcttctcagagagccttgctttggttgaccaaggagtccggatgtaggaatgtttaaatcctcggatacttcagtgacacagcctctgctgccccttgctttgcctgtgtttgctgatgaaaagcagatgcttgtgtttcattttccttcctggtttgtgtgtgttaattctctctctctctctcagacacagaagtctcatgttgcattttccaaattttatgagtgatgatactttttccattactgctgcgtccctgttttacaatgcaaaatttaagtacggtcattgcccatggtgattaaagtgtggttatgggcaggaagacagactgtgtaaaaaaggaatgacatcctggctcctcatcttcttcatcagcaactaccataaccagtttgcgagtcaaatggcatttcctaacggcaggcatggcggcccctgaaagacaacagctccctttctgcttcggacaccactcaaacatttagacgcagctctatcccttttcctagctagagaaggtgatgccttcttccattactcagagatgttgagacgttttcagaatttcttgttgaaatgaaaaacatcaagataaaggacgcctttcaggcattagctaaacttccacttcataactttcggcgagacgtggtgagcctcctggtgtagagttcttttgtctttgtatggaatgactttttgctgtgatggttttgaatgttgggtttctgctgtctgcttagtacccatgcctgaattttttgagattgtaaatatcaaaggagttagattgtgtcctgacatggttgtagactttcacctggattattgatattctacctctaataaatttttaataggctgt

SEQ ID NO: 915 - DNA, 1780 bp, Homo sapiens
acttccggtgtgtgagcctgccgttgctacataaccgcgtagtttgagccatttctgcgtctggcgggtccttctgaacttgtcaccttcgcttggggtcgcaacgacccgatgatcgatgatccaagcaagggaaaagaagccttggcggagagcggaggtttggtgggggcggggaatggggtttttttcccgtccacggaagctttctgggatgggggtgctgtgctcgcatcccgggggttggaattggcggggtcctctgtgccctgctgtgagcgtttccaggactttgacctcgctcagcctgcctctctccaccctacctgtgcgaccgctttctcgcagtgtgacgtggagtgttactcaatgtccttatactttccattgctgtttttggtaatggggacattagaaccatcctagtagaatcgtttttgggaactgaaagagataacgcaaatgagaaccttaaagcagtccctgtcacttggtgactggtggtctcttgttaacttcccgaagaggtcaggtccccgggtggagtcatagcttcagctgcaggggccctggtccttctccctaatccctgcaggacgctggatgatcccgggaggccttctgacctctttttaggaaagcgagttgcgtccgcttccacgaagggcggggagcatttaacttttatgggggaccgcgatgcagtcagggtatttcacaactttcgccttccccagcctgacctttctaaaagagctgcagggaggggacttcttggctactgagggcaaatctctatgtgattggtccttggcttttttcctttatagagatgttcacccaaccgagagtgtgtcctcgggaatgggtgttgataatcattaagccgtaattggtaacttcattctaagtgctttatacaaataaatttaggccacactgtggctctgtgaagtattgcttttctttgttttaaaaatgagagtgagacacagggtgcatagcagccaactagtgagaggtagagctggggttggcacctaggcagtccaggtcagagcctgagttgatcacctcttggatacattctcattgaggcagaggaactagctggactcgtagggaaagcaagttaggacctgattgaaaggacgttgagagcaaggctcgtgggcttggacgtctaggaatttttaaaaatttctcaactattttgtttcatgttttccaagtatttcgtactgttgtggaactgtatcattgtggaaaagtctgaaataggagaaatgagagtagaaaaagttttttaattacccatgtatccaagatgtaaaggtagtaactgttaagcttctaattgatttcttttgtctttctttgtgtctacttctatatttgttgataaacatttttttttaaaaattgttatattttaatgtgttttcccatatgtcttttaactatagaaaattttaaatattgctaatagagactaaactagtgaggctggttgtggtggctcatgcctataatcccagcactttgggaggccaaggcaggtggatcacttgaggtcagtagtttgagaccagcctggccaacatggtgaaaccccatctctaccaaaaatacaaatattagccgggcgtgatggcacgtgcctgtagtcccagctactctagaggctgaggcaggagaattgcttaaacccgggaggtggaggttgcagtgagccaagatcacgccactgcactccagcctgggcaacagagtgagactc

SEQ ID NO: 916 - DNA, 1680 bp, Homo sapiens
acgtgcgcaggggtgtggaaacttaccggctgagccatggatacaccgttaaggcgcagccgacggctgggaggcctaaggcccgaatcccccgagagcctcacctcagtttcgcggacgagacgggcccttgtggagttcgagtcgaacccagaagaaacgagggagcccgggcctcctccgagtgtgcagcgggctggcctggggtcccccgaaaggccgccgaagacaagcccaggatcaccccgtctgcagcagggtgcaggcttggagtcaccccaagggcagccagagccaggcgcagcgtccccccagcgtcagcaagctcccggtccggagccctctcagccactactggagctgaccccgggggccccccagcatcagctaccgccggtcccaggatcaccagagccttaccccggtcagcaagccacctccagctggggagacggtgacaggcggcttcggggcaaagaagcgaaaaggttcttcatcccaggccccagcgtccaagaagttgaataaagaggagcttcctgtaatcccgaaggggaagcccaaatcggggcgagtgtggaaggaccgctccaagaaaagattctcccagatgcttcaggacaagcccctgcgcacatcgtggcagcggaagatgaaggaacgacaggagaggaagctggccaaggactttgcccgtcacctggaggaggagaaggagaggcgccgccaggagaagaaacagcgccgggctgagaacctgaaacgccgcctggagaatgagcggaaggcagaggtcgtccaagtgatccgaaaccccgccaagctcaagcgggcaaagaagaagcagctgcgctccattgagaagcgggacaccctggccctgctgcagaagcagccgccccagcagccggcagccaagatctgagctcaggacggcccgaggccttccatggccaacaaacatgtcagacacagcacctcaggccgctgctcagatgcctctgctggagctggcactccaaacccatggctccagaacagggacccccaccccgaccggggctcctcagcctttgaaggcttccaggcaggtctgtgtgggacagaagcccagagggggcctgggacctggcagagatgggggcgggaagagattcagctcccatccctccttcctctccttctccaagtgccttcaaaccaagaactgtacattcttctggttcctcagtgagctggtgactggcaggtgactccctcagcagtgtatgccctttctcagcatcctaggtccatcccaggcctggaggctgacagttgggaatccagcttcccccacaccttcccaaaggctgctctgagcacctccacaccccactgcctctgtccccagcaaactgaatccggttcctctccacttttcaatactgaaagattaaaatggggaggttgcagggagcagagcttttccctagcacccactttcccaaaccagtctctgcagaagccccagagaatctaactcatgcctgtccagtctacagcaaaaatatttattgagtgcctgttgcatacaggcacaatcctaggcaccggcaaatacagacaatagaccaaagtccctgccctcgaggagctttcattctgatggagagaaaacataataaacaagcaaaatgc

SEQ ID NO: 917 - DNA, 2754 bp, Homo sapiens
actttccaaattcagctttcccgggaggtctggagcagctgcctctctggggagatgctggaggtctcggaatcacctcacacggcctcagggcccagttggagccaccccaagtgacaccagcaggcagatgaccagagagcctgagcctccggccccgagtctgtgaagcctagccgctgggctggagaagccactgtgggcaccaccgtgggggaaacaggcccgttgccctggcctctttgccctgggccagcctttgtgaagtgggcccctcttctgggccccttgagtaggttccatggcattttctgaactcctggacctcgtgggtggcctgggcaggttccaggttctccagacgatggctctgatggtctccatcatgtggctgtgtacccagagcatgctggagaacttctcggccgccgtgcccagccaccgctgctgggcacccctcctggacaacagcacggctcaggccagcatcctagggagcttgagtcctgaggccctcctggctatttccatcccgccgggccccaaccagaggccccatcagtgccgccgcttccgccagccacagtggcagctcttggaccccaatgccacggccaccagctggagcgaggccgacacggagccgtgtgtggatggctgggtctatgaccgcagcatcttcacctccacaatcgtggccaagtggaacctcgtgtgtgactctcacgctctaaagcccatggcccagtccatctacctggctgggattctggtgggagctgctgcgtgcggccctgcctcagacaggtttgggcgcaggctggtgctaacctggagctaccttcagatggctgtgatgggtacggcagctgccttcgcccctgccttccccgtgtactgcctgttccgcttcctgttggcctttgccgtggcaggcgtcatgatgaacacgggcactctcctgatggagtggacggcggcacgggcccgacccttggtgatgaccttgaactctctgggcttcagcttcggccatggcctgacagctgcagtggcctacggtgtgcgggactggacactgctgcagctggtggtctcggtccccttcttcctctgctttttgtactcctggtggctggcagagtcggcacgatggctcctcaccacaggcaggctggattggggcctgcaggagctgtggagggtggctgccatcaacggaaagggggcagtgcaggacaccctgacccctgaggtcttgctttcagccatgcgggaggagctgagcatgggccagcctcctgccagcctgggcaccctgctccgcatgcccggactgcgcttccggacctgtatctccacgttgtgctggttcgcctttggcttcaccttcttcggcctggccctggacctgcaggccctgggcagcaacatcttcctgctccaaatgttcattggtgtcgtggacatcccagccaagatgggcgccctgctgctgctgagccacctgggccgccgccccacgctggccgcatccctgttgctggcggggctctgcattctggccaacacgctggtgccccacgaaatgggggctctgcgctcagccttggccgtgctggggctgggcggggtgggggctgccttcacctgcatcaccatctacagcagcgagctcttccccactgtgctcaggatgacggcagtgggcttgggccagatggcagcccgtggaggagccatcctggggcctctggtccggctgctgggtgtccatggcccctggctgcccttgctggtgtatgggacggtgccagtgctgagtggcctggccgcactgcttctgcccgagacccagagcttgccgctgcccgacaccatccaaaatgtgcagaaccaggcagtaaagaaggcaacacatggcacgctggggaactctgtcctaaaatccacacagttttagcctcctggggaacctgcgatgggacggtcagaggaagagacttcttctgttctctggagaaggcaggaggaaagcaaagacctccatttccagaggcccagaggctgccctctgaggtccccactctcccccagggctgcccccccaggtgagccctgcccctctcacagtccaaggggcccccttcaatactgaaggggaaaaggacagtttgattggcaggaggtgacccagtgcaccatcaccctgccctgccctcgtggcttcggagagcagaggggtcaggcccaggggaacgagctggccttgccaaccctctgcttgactccgcactgccacttgtccccccacacccgtccacctgcccagagctcagagctaaccaccatccatggtcaagacctctcctagctccacacaagcagtagagtctcagctccacagctttacccagaagccctgtaagcctggcccctggcccctccccatgtccctccaggcctcagccacctgcccgccacatcctctgcctgctgtccccttcccaccctcatccctgaccgactccacttaacccccaaacccagccccccttccaggggtccagggccagcctgagatgcccgtgaaactcctacccacagttacagccacaagcctgcctcctcccaccctgccagcctatgagttcccagagggttggggcagtcccatgaccccatgtcccagctccccacacagcgctgggccagagaggcattggtgcgagggattgaataaagaaacaaatg

SEQ ID NO: 918 - DNA, 2322 bp, Homo sapiens
agaaatggcggttggggcggagcagggggctggcgcgggaagcggggctgtctggctcggttacgcccccacctcgccaggaatctaggagtcggtttgttttccgaacccatctccttccgctctcccgcccctgcaggctgtgtgccgagcttggaagaaagtgtgacccgttcgacggaacaaaggacatgacagcccggccccgtgcggccactgcggagcgttaggaacattccctaaaatggcggccggcgcgtcggaacagggcgggaggcggcggcgcgtgggggcgggacggggaggggcgcggccagccgggcttctgcttccgcgaccccggcggtgcagggcgggtggagtcgcggagtagtcctcatggccgccccgccggagcccggtgagcccgaggagaggaagtcccttaagctcctagggtttttagatgttgaaaatactccctgcgcccggcattcaatattgtatggttcattaggatctgttgtggctggctttggacattttttgttcactagtagaattagaagatcatgtgatgttggagtaggagggtttatcttggtgactttgggatgctggtttcattgtaggtataattatgcaaagcaaagaatccaggaaagaattgccagagaagaaattaaaaagaagatattatatgaaggtacccacctcgatcctgaaagaaaacacaacggcagcagcagcaattgaacaatcttgagcatagaagtcaatgtaaacgaagttaagatcaaccacataaaacatttcatgtgcaataagctctcaatcaagtaaataaagtttaagttgtagtcatttttttcccacacttgtgtggaatgaaaacttgccagtttattctggccctgtgtctactgccaggatagcattcttacgtgttacatatagtggacttgtcatccttaaaatgtgaacagaatttattggcagtgtggcaaagaattataaaacatagtgtttaatgtacttggagtttccttgtagtagtaagtatagagtttgatgataagtaaacgtcccttaacaaaaacctcaaccttattactatcccattaaaaaacagcaaatacttactgagttcttgtaagagctaatgtcattgtaagatttaaaactaagggcttttatcactttgcaaattattttttaaatgcattcatcatttgacagtgttctctcatttcttaaaatgcgagtcatcttccaaaagagttgtttttaactgccctaaaatttttggggaagtatgcagggtttaaatttttaagtataattagttctgaattaaaatatgcacatggaacttgtctggcagactgatgcaatagtaaaacaactgcagaattactattaatgtaaacaatccatttgaaagtcaatcagctgctcccattaaaatattatttaaaatacaatacccacagcatctaactaaatcctcaggatttattctccgggagaaattatccctttctaggaaaatgaagttatttctggttttaattcatacaatactttaagaaaatctgttaaatataacaaaacacaagctagatgcttaagaaatgcttaaagaaatattggggcgaaggtaacagcagtcaacaggattgtggccattactggtcctattattttgatgtaccatggaaggcacagaaatcgagcaaggaagaaaatattagttattttgatctacatctttttctaaagaaaagtggagcttgcctccagttcaattcacaagagcattttccctcccatgcccaccttttcttgtggctgtcgctaggaaggatgcagaggctgtgtggtttaccaaatgccttaacttagcagtgaatgacaactgtcaaacacatgttgagggaaaatttttactgattcacaaaaaggaagacagtttgcccactcttagtggcacaaatcaaagctgcatgcactacattatccaaattagtcgtaaccaaatagttaaaaaattctgctgggcacggtggctcatacctgtaatcccagcactttgggaggccgaggcagttggatcacctgaggttaggagtttgagaccagcctggccaacagggtgaaaccctgtctcgtctaaaaatacaaaaattagccgggcgtggtggtgcatgcctgtagtcccaggtactcaggaggctgaggcaggagaatcacttgaacccgaggtggggcaggcggaggttgcagtaagccaagatcgcgccattgcactctagcctaggtgacagagtgagactccatctc

SEQ ID NO: 919 - DNA, 2528 bp, Homo sapiens
gaatattgtcatcacctaagaaagaaaccccatactctttaactattatctcccatctcccagcccccttcctccccaaccaacctcatttttagtttttatttgttttgattggtgaacctggggcatccctcgtaggcagggccagataaagcaggttgtaccttgacccaagaaataaaaacagctgggttccaaaaggcacatagattcccagttcacaggaatggaaacttgcctcctgcctgcccccttacctcccagcgcgcctgcccccttacctcgcagcgcgcctgcccccttacctcgcagcgctcctgcccccttacctcccagcgcgcctgcccccttacctcgcagcgcgcctgcccccttacctcgcagcgcgcctgcccccttacctcccagcgcgcctgcccccttacctcgcagcgcgcctgcccccttacctcccagcgcgcctgcccccttacctcgcagcgcgcctgcccccttacctcgcagcgtgcctgcccccttacctcccagcgtgcctgcccaaggcagcagcagcctcctcttgactttttaagaaatgaacataggtttaaggtattttcagtaccaggctctgtgctaggtactttcacattattttctctccaaatcttcccaacaatcctttcaagtagccattggtcccacttcaccaatgacccaacagaaactcagggaggttccgtatcttgctcaaggtcacacagctggatcagaacccagctgtctgttaggcaggttcactgcacactagttaccaacttgtcagagtccagtgaggcaaacacccacaagttacataacgctgagtccagcgaggcaaacacaagtgacatgcaacgtgtttattacccataggtaggcactaagggacaacagaaggctgggattcatttggagctggacccctacggctcaggaaagctgctgaggcagctgggggatggaccgttgtctgtgcatgcctgacttttttttttgttgttggtttgttgtgagatggagtctcgctctttcacccgggctggagtgcagtggtgtgaaccctgggattcaagcaattttcctgcctcagcctccctggtagctgggattacaggcgtgcactaccacgtccagctattttttttttttttttagtagaaacagtttcgccatgttggccaggctggtcttgaacttctgacctcaggtgatccacccgcctcggcctcccaaagtgttgtgataacaggcatgggccaccacgcccagccagccagacttgtactgaagctgagggaccccagaaaccagcccgccctgtttttcgtttgtttgtttgtttgtttgatacagagtctcactctgtctcccaggctggagtgcagtgtcgccatctgggctcactgcaacttccgcctcccaggttcaagcaattctcctgcctcagcctcccgggtagctgggactactggcacgcaccaccacacctggctagttttttgtatttttagtaaaaacggggtttcaccgtgttagccaggatggtctcaatctcctgaccttatgatccgcccgcatcggcctcccaaagtgctgggattacaggagtaagccaccgcgcccggcttctgccctgggctttataccctggggccatgtgacatgttgggctgaagtgttgaaggacatgctttttctagggggactggaacagagcatggctgtgctggccagtccttccttccctcaggatgttgcattctctgcacactctacagttttatttatttatttattgagacagtcttgctccatcacccaggctggagtgcagtggcactgtctcagctcactgcaacctccgcctcccaggttcgagggattctccctgctcagcctcccgtgtagctgggattacaggtgcccaccaccacgcttggataatttttgtatttttggtaaagacggggtttcagcatgttggctaggctggtcttgaacttctgatctcaagtgatctgcccgcctcggcctcccaaagtgctgggattacaggcgtctacagttattcttgagaactacaagcaagaaaggaggggagaaccaggtcagttcaaggccactgggagaactgtcctgcaccgcctgcctctgaagcccatgatgtttctgctttgtgggacagttgttcaggtgcctgcttccccaggccttcccctgcgccttccccctctctcctacacacaccatctgactgtccttccagcacgtacacctccagatgcttgggttggcctgacccaaaacagtctactctcccggccaagccaattgcccctgggattttctgctcctccaagatcccgtgcatagccctggtggtggctcatgcccttaatccttagttactctagatgctgaggcaggaggatcgcttgaggccgaggagttcaagacctcccctctcccaaatatttgtaaatgaaattaaaagaaagatccagccc

SEQ ID NO: 920 - DNA, 2444 bp, Homo sapiens
accactgtgctggggtgtacatctacactagacaccttcctgcttccctccttccagagcagacctctttgtcaccccgagctccttgtttcttaagcagtcatgtctgtgacaaaaagtactgagggtccccagggagccgttgccatcaaattggaccttatgtcgcctcctgaaagtgccaagaagttggagaacaaggactctacattcttggatgaaagtccttcagagtcagcaggcttgaagaagaccaagggcataacagtgttccaggccttgattcacctggtgaaaggcaacatgggcacagggatcctgggactacccctcgctgtgaagaacgcgggcatcctgatgggcccactcagtctgctggtgatgggcttcattgcctgccactgtatgcacatcctggtcaagtgtgcccagcgcttctgtaagaggcttaacaagccctttatggactatggggacacggtgatgcatggactagaagccaaccccaacgcctggctccagaatcacgctcactggggaaggcatatcgtgagcttcttccttattatcacccaacttggcttctgctgtgtgtacattgtgtttttggctgataatttaaaacaggtagtggaagctgttaatagcacaaccaacaactgctattccaatgagacggtgattctgacccccaccatggactcgcgactctacatgctctccttcctgcccttcctggtgctgctggtcctcatccggaacctcaggatcttgaccatcttctccatgctggccaacatcagcatgctggtcagcttggtcatcatcatacagtacattacccaggaaatcccagaccccagccggttgccactggtagcaagctggaagacctaccctctcttcttcggaacagccattttttcttttgaaagcattggtgtggttctgcctctggaaaacaagatgaagaatgcccgccacttcccagccatcctgtctttgggaatgtccatcgtcacttccctatacattggcatggcggctctgggctacctgcggtttggagatgacatcaaggccagcataagccttaacctgcctaactgctggctgtaccagtctgtcaagcttctctacattgccggcatcctgtgcacctatgccctgcagttctacgtccctgcagaaatcatcatcccctttgccatctcccgggtgtcaacacgctgggcactgcctctggatctgtccattcgcctcgtcatggtctgcctgacatgcctcctggccatcctcatcccccgcctggacctggtcatctccctgatgggctccgtgagtggcaccgccctggccctcatcatcccaccgctcctggaggtccccacgttctactcagagggcatgagccccctcaccatcttcaaggacgccctgatcagcatcctgggcttcgtgggctttgtggtggggacctaccaggccctggacgagctgctcaagtcagaagactctcaccccttttccaactccaccacttttgttcggtgagcctggcactgctccttgcctaccagcacccgacttttaattatatggatctctttttttttttttttttttgagacggagtttctgtcttgttgcccagactggagtacaatgatgcgatctcagctcaccacaacttcggcctcctgggttcaagcgattctcctgcctcagcctcccgagtagttgggattagaggcatagtccagcacgcctggctaattttgtatttttagtagagacggggtttctccatgttggtcaggctggtcttgaactcccgacctcaggtgatccacccaccccggcctcccaaaatgctgggatcacaggcgtgagccacctcgcctggccagatctcttttatatgcattatctttatgtcactgctttgccttttctctgggccaagtcatggtgaaacaagaaagctacaagctctaaatggtaattttttacatttttgttttgtttattacttcttcttttcatacctctggcattccactacattgtgagctttcccttggaaggctctggactctatccaagcttatgataattcacacaatgaatttcatacctagcgtggagctatgcaagaagcagccaccagagggccattactggtgcatctcttgctgatataatggccaagaggaatcagaaacctgaagttagaaaggctcaacgagaacaagctatcagggctgctaaggaagcaaaaaaggctaagcaagcatctaaaaagactgcaatggctgctgctaaggcacctacaaaggcagcacctaagcaaaagattgtgaagcctgtgaaagtttcagctccccgagttggtggaaaacgctaaactggcagattagatttttaaataaagattggattat

SEQ ID NO: 921 - DNA, 2059 bp, Homo sapiens
cttcaccgaggccatcaccaagatgccgttgtccccactgtggtctgtgctcttcttcattatgctcttctgcctggggctgtcatctatgtttgggaacatggagggcgtcgttgtgcccctgcaggacctcagagtcatccccccgaagtggcccaaggaggtgctcacaggcctcatctgcctggggacattcctcattggcttcatcttcacgctgaactccggccagtactggctctccctgctggacagctatgccggctccattcccctgctcatcatcgccttctgcgagatgttctctgtggtctacgtgtacggtgtggacaggttcaataaggacatcgagttcatgatcggccacaagcccaacatcttctggcaagtcacgtggcgcgtggtcagccccctgctcatgctgatcatcttcctcttcttcttcgtggtagaggtcagtcaggagctgacctacagcatctgggaccctggctacgaggaatttcccaaatcccagaagatctcctacccgaactgggtgtatgtggtggtggtgattgtggctggagtgccctccctcaccatccctggctatgccatctacaagctcatcaggaaccactgccagaagccaggggaccatcaggggctggtgagcacactgtccacagcctccatgaacggggacctgaagtactgagaaggcccatcccacggcgtgccatacactggtgtcagggaaggaggaaccagcaagacctgtggggtgggggccgggctgcacctgcatgtgtgtaagcgtgagtgtatgctcgtgtgtgagtgtgtgtattgtacacgcatgtgccatgtgtgcagatatgtatcgtgtgtgcatgtacatgcatgggcactgtgtgagtgtgcacgtgtatgcacacatatacgtgtgtgggtgtgtgtattgtatgtgcatgtgccatgtgtgcagatgtgtcatgttgtgtgtgtgcatgtacatgtatggacattgtgtgagtgtgcaagtgtgcatgcatatacatgtgtgcgatatttgctgcccgtgtgtgtgcatgtatatatagacatacatgcctatgttgtgtgtggtgtgcatatgtgtgaacacacacgtgtatacatgcatgcacatgtgcttgtacaatgggtgtccacatgcacgtgtatatgtatatctgtgagtgtatatacatgcatgcaattgtgtgtatgtgtgttctgtgtgtgcgtttgcaggtatatatgcacatgtgtatatgtacatgtatgcctgtgtgacgtgtgtatatgtgagcatgtgtacgtgtgtgtatacgtgtgttgtatatatgtgtgtgtctgtacctgtttgtgtatatgtgtgtgatgtgtgctcgtgtgtgtgcatattcaggcaggtgtgcatttgtgcatgccagtgtgtatgtatgtgcgcatatggacacgcatggacacgcatatggacacatatggacacacatatggacacgtgtggatatgtgtgcgtacacgtcgctgggacacatgcctgccactcggggcccagctgccctctgtgtttgtccttgccacagtcacggggtgcatgtgcagaggggagcagaccactggggacgtgctgtgccctgcacgtgcccgggggaagcggaagctgcagctggggtgggggcagcacctctatgcttcatctctgtgggtggcaggagacaaaagcacagggtactatcttggctcctgggagcgactcttgctacccacccccacccatccccttccccttggtgttgacctttgacctgggggttcccagagccctgtagccctcgacccggagcagcctctcggaagccggagtgggcagttgctggcgattctgagaaaacttggccgcatccaccggggccctgcctccagtcggccgctgccgagtctctgcgttctggccgcttcccggcttaatgaatgccagccatttaatcattgctcctgccaccacaaatagatgagcagttaaataaaactcaacttggcataattc

SEQ ID NO: 922 - DNA, 2289 bp, Homo sapiens
cttccagggcctggggattgtgggcaggtggcatggagcggatgagcagaactgttgattgacaagcgaagctggtctagcaacagctgcagcacaagccaggtggaagtgtgctgcccttcagcttgagatggtccagggtgagcaggcagtgccaggagggctggcgggccgcccttggccatcctcagcgcccagcatccaagccagggccagccagcaagaaaggggaagtggagcaagaagatgttgagaactcaggggccctgtcagagttgggagggggcccagccccgagaaaacaggatttcagagaggccacgggcgcagggataaatgaggtgagggcctggtgtggggtttcccaaggagagcgcaatagcccccttctgtgtgtttcaggttagggggccttgcatgaggtgggggcatggcttagctggggtcagactgcccaggttctaatctggctgtgtcccgggctctcaggcaagtagctcaggccccaggctcttggttccaccctgtgcacctgagggacattctttgtggagtccccagagaagggctgggggtcacctgggtgggtagggaggtgcgggctccagagaggagagactggctggtgctggggtccgagtggagggagggtgcttctgagcccggtcagccaagcccccagccctaaccctaggtgctgcccgcaggccggcagtgcgagtggcgctccattgacggcagcatcgtgctgcccctggcccggggctccccaaaggcactggccctggagtacgcactgtgcctcacaggcgacggcttggcccacctgcaggccaccgacccccagcagctgctccgcctcatcccccatgtgcaggtgttcgcccgtgtggctcccaagcagaaggagtttgtcatcaccagcctgaaggagctgggctacgtgaccctcatgtgtggggatggcaccaacgacgtgggcgccctgaagcatgctgacgtgggtgtggcgctcttggccaatgcccctgagcgggttgtcgagcggcgacggcggccccgggacagcccaaccctgagcaacagtggcatcagagccacctccaggacagccaagcagcggtcggggctccctccctccgaggagcagccaacctcccagagggaccgcctgagccaggtgctgcgagacctcgaggacgagagtacgcccattgtgaaactgggggatgccagcatcgcagcacccttcacctccaagctctcatccatccagtgcatctgccacgtgatcaagcagggccgctgcacgctggtgaccacgctacagatgttcaagatcctggcgctcaatgccctcatcctggcctacagccagagcgtcctctacctggagggagtcaagttcagtgacttccaggccaccctacaggggctgctgctggccggctgcttcctcttcatctcccgttccaagcccctcaagaccctctcccgagaacggcccctgcccaacatcttcaacctgtacaccatcctcaccgtcatgctccagttctttgtgcacttcctgagccttgtctacctgtaccgtgaggcccaggcccggagccccgagaagcaggagcagttcgtggacttgtacaaggagtttgagccaagcctggtcaacagcaccgtctacatcatggccatggccatgcagatggccaccttcgccatcaattacaaagtaaggcctgggccctgcccaaacattcactgtctgcccacccagccccaccccatgaagccatctgtccctcatccccacagggcccgcccttcatggagagcctgcccgagaacaagcccctggtgtggagtctggcagtttcactcctggccatcattggcctgctcctcggctcctcgcccgacttcaacagccagtttggcctcgtggacatccctgtggagttcaagctggtcattgcccaggtcctgctcctggacttctgcctggcgctcctggccgaccgcgtcctgcagttcttcctggggaccccgaagctgaaagtgccttcctgagatggcagtgctggtacccactgcccaccctggctgccgctgggcgggaaccccaacagggccccgggagggaaccctgcccccaaccccccacagcaaggctgtacagtctcgcccttggaagactgagctgggacccccacagccatccgctggcttggccagcagaaccagccccaagccagcacctttggtaaataaagcagcatctgagatttt

SEQ ID NO: 923 - DNA, 1934 bp, Homo sapiens
atgtaccaagaggcatactgactccattgacagaaggttttgttttgacatagaagctgctgatcggcctggcgtttccttgaccatgcaggcattttccgaagaggaaaggaagcagtggttggaagctctgggtggaaaggaagctctgtcccatagttttaatacagccatcatcccaagaccagaaggaaatgcacagttggataagatggggttcacaattatcagaaaatgcatcagtgccgttgaaacacgaggtataaatgaccaaggattgtacagagttgtgggggtgagttcaaaggtccagagacttctgagtatgttgatggatgtaaaaacatgcaatgaggtggacctggagaattctgcagattgggaagtgaagacaataacaagtgccttgaaacagtatttgaggagtcttccagagcctctcatgacctatgagttacatggagatttcattgttccagccaaaagcggcagcccagaatctcgtgttaatgcgatccatttcttggtacacaaactgccagagaagaataaagagatgttggatattttggtgaaacacttaacaaatgtttcaaatcactccaagcagaacctgatgactgtggcaaacttaggagtggtgtttggaccaactctgatgaggccacaggaagaaactgtcgctgccctcatggacttgaagtttcagaatattgttgtggaaatcttaattgaaaaccatgaaaagatttttcggacgccgcccgatactacattccctgagcccacctgcctgtcagcatcacccccaaatgcgccaccaaggcagtcgaagagacaaggccagagaaccaagaggcccgtggccgtctacaatctttgtctggagctggaagatggtgacaatccttacccttccaaggaggacacccctaccagcagtctggactcactttcctccccgtctcccgtgactacagctgtccctgggcctcctggaccagacaaaaaccaccttctggcagatggagggagctttggagactgggcatccactatcatccgcagtcggaaggctcgagccgtgtatccgtgtgaagcagaacacagctcggaattatcttttgaaataggagcaatttttgaggatgtacaaacctccagggaacctggctggctagaagggactctgaacggcaagagggggctgattccacagaactacgtcgagctgctgtagctcctggcctcagagcccctgctgaccctggcacccagggacctgcctgggggcagagagctgtcttcctcctccgaggctctgggctgcacccacaggtacctccacacttgggagttaccatcatcacagtcagccctgggggtggggggtggtgggcagggatgggacgcaccacacagaactgtgattgtggatcaggaggggaatgtcaggattcgcaaaatggacttttcatttgtcaagtattgggacttgtgatttttaattatccagcatatagaatgagagggagggcagccttctgccacctgtgtcgcctccactggcagtcacgccaccagagccaccctggctccctctcctccctgagcacctgctgctgcgattttaaagggaactgtactactcgcagtgataggtttgcagagtgtgtgcttggctgtggcagcctagcttggagaagctgctgttggtgcaagggagatggtctcaagtcagagggaagcagagacgcgcgtctcaagcctgcccttcctagacggccacctgcaggaccccacactcactgcactggcagcgtgcactggcgtatttgtaacaggcttctcggtgctcctcacccgtgtgctgttttccaaacaccacctttttgcctcaaggtctctgtaaatgaaataaactgtaatttact

SEQ ID NO: 924 - DNA, 2666 bp, Homo sapiens
atgataaaccaataacttttctgtccctgaagttgagacttgtgaatatattaataggtgccttgcaaactgaaacggaccccaacaacacccaaatgatattaggggcaatgttaaatattgttcaagattcagcacttttggaagccattggttgccagatggagatgggtggtggagaaaataacctgaagagtcgtagtcgcaccaatagtggtattagttcagcaagtggtggaagcacggagcccacgactcccgatagtgagagacctgctcaagctctcttaagagattatgctcttaatacagattcagctgctgggctcctgattcgcagcattcatctcgtcacccaaagactcaactcccagtggcgccaagacatgagcatatcactggcagctctagagctcctctctggccttgcaaaggtaaaagtgatggttgactcaggagaccggaagcgagccatcagttctgtgtgcacctacattgtttatcagtgtagtcggccagctcctttacactccagggatctgcactccatgatagtggcagcttttcagtgtctctgtgtctggctgacagagcaccctgatatgcttgatgaaaaggactgccttaaggaagtactggagattgtggaactgggtatctcaggaagtaagtccaagaacaatgggcaagaggtcaagtacaaaggagataaggagccaaaccctgcatctatgagggtaaaggatgctgctgaagccaccctaacatgcattatgcagttgctcggcgcatttccttcacctagtggtcctgcctctccttgtagtcttgtgaatgagaccactttgattaaatactccaggctgccaaccataaacaagcatagtttccggtactttgtcttggataacagtgtcatcctggcaatgctggaacaacctcttggaaatgagcagaatgattttttcccctctgtcactgtgctggtccggggaatgtctggaagacttgcttgggcacaacagctttgtcttttacccagaggagcaaaagcaaatcagaagctttttgtacctgaacctcgcccagttcctaaaaatgacgttggatttaaatattctgtgaaacatcggccatttcctgaagaggtggacaagattccttttgtgaaagcagatctcagcattccagatttgcatgaaatagtcactgaagaattagaagagagacacgaaaaattaaggagtggcatggcccagcagattgcttatgaaatacaccttgagcaacagagtgaggaggaattgcagaagagaagttttcctgacccagttacggattgcaagcccccgcctcctgcccaggaattccaaacagcccgcctttttctctcacactttggatttttgtccttagaagcactgaaggaacctgcaaatagtcgtctacctcctcaccttattgcacttgattccacgatacctggattttttgatgacattgggtatctggatctcttgccatgtcgtccttttgacacagtttttattttctatatgaagccaggtcagaaaacgaaccaagagattttaaagaatgtggagtcttccagaactgttcagccacatttcctagaatttttgctttcccttggctggtcagtagatgtgggcagacaccctggttggactgggcatgtttctaccagttggtctattaattgttgtgatgatggtgaaggatctcaacaagaagaagtgatttcctctgaagatattggagctagcattttcaatggacagaagaaggtgctgtattatgctgatgcccttacagaaattgcttttgtggttccttctcctgtggagtccttaactgattcattggaaagtaacatctcggaccaagatagtgattcaaatatggatcttatgccaggaattctgaaacagccatccctgacacttgagcttttccccaatcatacagacaatcttaattcctcacagaggctcggtcccagttccagaatgaggaagctgcctcagggtcgccctgttcctccccttggacctgagacaagagtttctgtagtctgggtggaacgctatgatgatatagaaaactttcccctctcagagctgatgacagagatcagtactggtgtggaaactactgcaaatagtagcacttcactgagatctacaactcttgaaaaagaagttcctgtcatcttcatccaccctttaaacactggattattccggataaaaattcaaggagccactggaaaatttaatatggtcatccctcttgtggatgggatgattgtcagcaggcgagctcttggctttctggtgaggcagactgtaattaacatttgtagaagaaagagactggaaagtgactcctacagtcccccccatgtccgccggaaacagaaaatcaccgacattgtcaacaagtaccggaacaagcagctggagccagagttttatacttcacttttccaggaggttggactcaagaactgcagttcttagaccactgaatttctaagactgttgaactccagtttgggaactataacacagcagaacagtttgataggtgatcactgtaaaaataaaaacaaatcactcccaagagcttactgtttaatcacc

SEQ ID NO: 925 - DNA, 1924 bp, Homo sapiens
agatgctgtcattttcagaagaagctgatgtaaatgcctctacaacctaaagcccagacggagtcttgctctgtcgccaggctggagtgcaatggcacaatctcagctcactgcaacctccgactcccgggttcaagcaattctcctgcctcagccttgcgaatagctgggattggtggcacgcacaaccacgcccagctaatttttgtatttttagtacagacggagtttcaccatgttggccaggatggtctcgactcctgacctcgtgatgcgcccgcctcagcctcccaaagtgctgggattacaggcgtgagccaccgcgcatggccacttgcactgctttttagcagcgagctctcaggtcaatcaactgcttccttaggtttacaaactgtgggtgtgtatttataaacacagttgttttgtatatcctttgtagagcacgtggtgaaagtgacacaggaataaatgcaaacctttttttccccttcttttttcaaagacataaatcccaggaacactcacaaccgcagaaggggatttgatggacatacaaagaaactaaattttgtaccgccgcagaagtgaagcatggataagctcaaaggtatttaggcagtgttttatttcaagatttgttatggggacctccgccacgccctggtccgccttcaccaggccgggcaacactgcccagtccctgagacccggccgcccactagggagccgcgggggcgaggccgtgggggtggcctcggggaggaggtcccgagaaccacacttcccagagtgccgtgcgcagccccgcccagcccgccccgcccccagaggccgcggctcgcgggggctgaggcgagaggacgccaagcgcccgccggggctccgcggggccgcgcaggagagcgcgcgtccgccgggtgctcgcgcggggttggtgaggttccgctgagggcggccggggctccgggagcgtggtaacgtggctgcaaccttagcgacatcaggaagaacagggtcgaggatcgaggtaacgggacgctcgtctcccctcagtcccctcgtctcccctcagtcccctcttcctttgtgcggtgccgtccgctcgcgccgagccctccctcaccccagcccccaagtcgcaacaccgtcccgtcttgggtctccggtgtgcggaggaaattcgagccctcgtgcaccaaccgaaactccacagctgagagggcttggggcccggacagcaggagatccagcccctgagcaaccttccacggcttttgtcgcccccattggcgggaggagcagggttatgctcccggctcccgtaggggagctccagcctctggctctgtcagcctccccggcagctccttgactccttcctcccagtctttcgaagaggggcccaggcaggtgcttcgcggggtccaggaagagggcaggcgcggtgcggctggcgcgggttcggggccccgggagggcggccggacgccccctggagccgcggcctgcgggggcggggcgagtgggccacctccgggccacgccgcgcggggacgaggcgaggaaggcactgcctgtccccactcggggggcttgctggccgccctggaggtgccttcccgggagcggcggtgtagaccttgtggagagtgcctcctgatgtggaaccaggaaccgcagcctctttctagacgctcagccgcccggtggagttgttaccgccacgatgacagctctttacgccttccactccgtgctgggttcagttggcttgctgttttcttcagagagagcgatttggctacatagcttgaattttctacgtgtctcgtgctttactggacttgcactgtttttccctcttggcagtgtttaatcgggtgacttttcatagaaaacgttcagtattttcatctgtgtt

SEQ ID NO: 926 - DNA, 2553 bp, Homo sapiens
atagttccccttttctgtgaaacaggaaacacatactgacgctttctgggctcaactatgtcattttcagggacgtcatgaatttggcctgtggagttgtgcgtgtcaaccccaagagaagcgtgagtcattattggaagacaactagaaagagggtccacggatgactccaggagtctgggttggctgaaaccccgggaagaaagacttctccaatgtacactgatggtgggctcttcgcctttatggctttctctgctatcagcaagggctgactcagcatcctctggactgtgagccaatgctgctatttcagagggggccaattcaggcacaacagcatctgcctttagactatcaggtacagcccagaccttgtcaggaattatgagaccaccgtctgatgccttgctctcagaatttgtcagttgtcgtggtggccagatttcagaagcggaagcctctagagttataatcttcagcttgttgcctgcctcccaatttccaggtctatattctttagactcttccaaaaggatatcagagagagatggaacgttgctcagagcctgactgtcttcttccccagcagtttcagccaccacagagaccctcgtcccccaacctgagcgctgccctgctccttccctagagcttgcgggtgagtgggccgtgggcaccaagtttctttcctcttgtgcagcagatgtcgtaggcaaactttgttggaaatcaggtgcagaaagagaaccctgctgggacaggctctgctgctggaccccctgctttgtttcacttcctctttcttggaaattctcttcatagctcctaaagtctgctctgtccacagtctggctcttatctccagacaggttatcaacctgaagaggggaattactgcagaaaccctctccctctgggagctgcaggacatggtgtgggactcctggcacactgggtgccctgcaaagtagctcttttgtagatttgatggtagcaccacttaaaatatgatccaactgcacttgggaaggaaattgggaaaccttttcatgggatgcacgagggaacctctcctcagtgccacctgcatgcttgtcctcaggaattgacacagcaaggtatttggctgggtggacttcggtggcaacggtaacagttgatgtgtcctcagtctccctggtcgcttgaaagcactcattattagcagttaatgttgttggcttctcccagggaaaactcacaattgaactataactggctggtgtggctgtggtgtctgcggcactaggactggggctcttgtcacctccttctttaaattgcactaaaggattgttctcagaagaaaggagctgtgtttcatcaagccctcctgagttgctggggcttggctgctcctggccagcatgtactgtggaggccagtgggtaggtggaattctccaccttggctagattttctcctgtggcaccttcactagctgtgtgtgaaatgttcaaggtgaaagtactgataaaaagaggggacatgactaagttgccgtccttgctgcttttgcacgtagacactgaagtctcagacacttgtgtctgaaaaaagacttccagtgtcttgtcattagaagaacataaatcagatactttgttttgaccttctgccagttccgtatctacagagcaaatttcttgaggcgaatatttatcaactggtctcccaacaagagaatctatggtatcaaaacacgttccttggtcaccagcctcaaaacactccattgcacacactgcttctctgtcccttggctcatcacacacattttccagggtgagggcagtatctgtgggttcaggggaagcaacagagacagccacaggctccctgaagtcagcacgagcatccttggggagatgccttgagaacacacctggggacatagtctcatcattggcttctgagatgctctgctcatattttaggtcttccctgaaattgtcaggtatgttgccatctctgtcttgtttttcttcatgctgtggaccacaggtacagggtttgacctccgagtgttgagctaatgatgcattttccttgtggacccctcctaagtttgagaaggaaattgtcgtggtcccagtgaatggggactcctccccagcaggctctgagaaagctggcatctggctgcaagagattgtctctctgactgtttcctgaacttgtacctaggaagatgaaaagtgatattagtagaattgttcatgggagagcccacaatagggcataactgcaatcccaagagtgttaatcctcaatgaccgtaataatggacaagaatgattgaaatctaaacattaatcccccaactccctctagctattagagatttcctagaaaactgcaaatttaagcaactctgtgttccagggggccctttgtcaaattcatcattataagcaaaaagcctcctgacaaccatcatttatttaatgatttctttctctcttaggaaatagatggaaataaatcgaatgttaactgttttgatcaagt

SEQ ID NO: 927 - DNA, 2993 bp, Homo sapiens
caggccgagggcgatggtttctggtgggaaggcccaggccgagggcgatggtttctgccgggacggccgaggccgagggcggtggtttctgccgggacggcccagacggaagggatgcggcttgggaggtggggcctgaggatgtggccatggcgcgtgctcttcctggctggtgcctctcctagtcagcttcaggagatgggctgtagatgtacctccactgcccagagctctgcaggggaaggcagtaaaagctccctgcatcctgacccacgtgtttgtagatcctttcagctattggcgccctggaggatggacgggaaggagaacgtggccggtgggtggaggatagcactggtgcctggccccatgaggctgcaatgcggccacattctcagtgggtcatgtctgaatgcgagagcagctgtgttctgcgagtggtgaaacaattgcctgttgcattctatttataggcagaggtaactaaaaacctcagtgctgagaggggcatcatatagatcctgcagttatgagctggttcacttggagttgttttggttgcaggtgacagaaagcacgactcaaggtagcatcaaccaaacagggaggtgggagcactcaccaggcagagaagtccctgcccccactgctgcagcccaacagtgtggccccatatgggtctccctggactaatggctgcggccttggaggtggtgtgctctggccaggcctggatcacttgtccatcctgagtgggagtgggggcagcccccagagacagactcaggagagggggagtgcaaggatgtcccccagatgccctgtgctgcccaggggacagctcactggcagtgggacgaaaccgctgtctgtccagggctctcttcctagaaggtcttaggaactcccaaatgggtgctggctggggttgcccggcccggtgctctcaaggagagctgaagctagttattgggtgcagatgctggctctgacccctgccccttcctcccgggctcagcttccccatctgtcatggagtaataacaacccagccttctggtccactgaggaatgtgtgtgcctgtgtgtttgacgctctcagaacaggcctgcagcgctgtgagccttggaagggggcctcacagctgctgccgccaccttggaggcccaggatgggactgagaaggggaagggagaggtcagagccacagctgttgggcagggacctgctgtaggaagagaaggccagggaggcgctggtggtggcctcaggctatgcaggtgatgcccattgtttccagggccatcccagtttggaggttcctgtttctagaggaggttcccttgtgaccccctcatttccacacccgagcaatgctgagggctgtggggcccccaggggcttgagtgtggtttatggcacagcagggacttatcacagtggcaccgggtgtcagtggccagtggtcagtggccaggaaccctcaggaccctcctccttgtgtgggtggcatttacccacccacaggtcacgctcaggacccgcatctcattccgatcctccttgtgtgggtggtacttacccacccacaggtcacgctcaggaccccacatctcattctgaaggccgggcacaggcggttgttttctctccaacttcggtttccccatccccactcttagggcacaaatgcaggtgtagcttccccatgcccactctttaggcacaaatgcaggtgtagcttccccatccccactcttagggcacaaatgcaggtgcagcttccccatccccactcttagggcacaaatgcaggtgcagcttccccatccccactctttaggcacaaatgcaggtgcagctttcccatccccactcttagggcacaaatgcaggtgcagctttcccatccccactcttagggcacaaatgcaggtgcagcttccccatccccactcttagggcacaaatgcaggtgcagcttccccatccccactcttagggcacaaatgcaggtgcagcttccccatccccactctttaggcacaaatgcaggtgcagcttccccatccccactctttaggcacaaatgcaggtgcagcttccccatccccactcttagggcacaaatgcaggtgcagcttccccatccccactctttaggcacaaatgcaggtgcagcttccccatccccactctttaggcacaaatgcaggtgcagctttcccatccccactcttagggcacaaatgcaggtgcagcttccccatccccactctttaggcacaaatgcaggtgcagcttccccatccccactcttagggcacaaatgcaggtgcagcttccccatccccactcttagggcacaaatgcaggtgcagcttccccatccccactctttaggcacaaatgcaggtgcagcttccccatccccactcttagggcacaaatgcaggtgcagcttccccatccccactctttaggcacaaatgcaggtgcagcttccccatccccactcttagggcacaaatgcaggtgcagcttccccatccccactctttaggcacaaatgcaggtgctgtgagcgctttagaatcctctgctgcaggtgactttgcttcagcgaaccacagaatgttcacatggttttatgcatttgttatttcagggaaaatcaaggttaaagatgtcttcagaatttgtatttttgggctgggcacggtggctcacacctgtaatcccaacacttttggaggctgaggcaggcggatcacgaggtcaggagatcgagaccatcctggctaacacggtgaaactccgtctgtaccaaaaatacaaaaaaattagccggatgtggtggcgggcgcctgtagtcccagctactcgggaggctgaggcaggagaatggcgtgcacccgtgaggcagagcttgcagtgagccgagatggtgctgctgcactccagcctgggctacagagcaagactctgtctc

SEQ ID NO: 928 - DNA, 1768 bp, Homo sapiens
actttcccggagtgcaccccgcggccgccagccggggcgatggcggggctctggctggggctcgtgtggcagaagctgctgctgtggggcgcggcgagtgccctttccctggccggcgccagtctggtcctgagcctgctgcagagggtggcgagctacgcgcggaaatggcagcagatgcggcccatccccacggtggcccgcgcctacccactggtgggccacgcgctgctgatgaagccggacgggcgagaattttttcagcagatcattgagtacacagaggaataccgccacatgccgctgctgaagctctgggtcgggccagtgcccatggtggccctttataatgcagaaaatgtggaggtaattttaactagttcaaagcaaattgacaaatcctctatgtacaagtttttagaaccatggcttggcctaggacttcttacaagtactggaaacaaatggcgctccaggagaaagatgttaacacccactttccattttaccattctggaagatttcttagatatcatgaatgaacaagcaaatatattggttaagaaacttgaaaaacacattaaccaagaagcatttaactgctttttttacatcactctttgtgccttagatatcatctgtgaaacagctatggggaagaatattggtgctcaaagtaatgatgattccgagtatgtccgtgcagtttatagaatgagtgagatgatatttcgaagaataaagatgccctggctttggcttgatctctggtaccttatgtttaaagaaggatgggaacacaaaaagagccttaagatcctacatacttttaccaacagtgtcatcgcggaacgggccaatgaaatgaacgccaatgaagactgtagaggtgatggcaggggctctgccccctccaaaaataaacgcagggcctttcttgacttgcttttaagtgtgactgatgacgaagggaacaggctaagtcatgaagatattcgagaagaagttgacaccttcatgtttgaggggcacgatacaactgcagctgcaataaactggtccttatacctgttgggttctaacccagaagtccagaagaaagtggatcatgaattggatgacgtgtttgggaagtctgaccgtcccgctacagtagaagacctgaagaaacttcggtatctggaatgtgttattaaggagacccttcgcctttttccttctgttcctttatttgcccgtagtgttagtgaagattgtgaagtggcaggttacagagttctaaaaggcactgaagccgtcatcattccctatgcattgcacagagatccgagatacttccccaaccccgaggagttccagcctgagcggttcttccccgagaatgcacaagggcgccatccatatgcctacgtgcccttctctgctggccccaggaactgtataggtcaaaagtttgctgtgatggaagaaaagaccattctttcgtgcatcctgaggcacttttggatagaatccaaccagaaaagagaagagcttggtctagaaggacagttgattcttcgtccaagtaatggcatctggatcaagttgaagaggagaaatgcagatgaacgctaactatattattgggttgtgcctttatcatgagaaaggtctttattttaagagatccttgtcatttacaatttacagatcatgagttcaatatgcttgaatcccctagacctaatttttccttgatcccactgatcttgacatcaagtctaac

SEQ ID NO: 929 - DNA, 1654 bp, Homo sapiens
attgtatagaagaacattgtgaaactccctgccctgttctgtttctctctgaccaccggtgcatgcagcccctgtcacataccgcctgcttgctcaaatcaatcatgaccctttcatgtgaaatctttagtattgtgagcccttaaaagggacggaaattgtgcattcggggagctcggattttaaggcagtagcctgctgatgctcccagctgaataaagcccttccttctacaatttggtgtctgaggggttttgtctgcggctcgtcctgctacatttcttggttccctgaccaggaaacgaggtaactgatggacagccgaggcagccccttaggcggcttaggcctcccctgtggagcatccctgaggcggactccggccagcccgagtgacgcgatccaaagagcactcccgggtagggaattgccccggtggaatgcctcaccagagcagcgtgtagcagttccctgtggaggattaacacagtggctgaacaccgggaaggaactggcacttggagtccggacatctgaaacttgatctccagcaccctgccggtggcactactgagagacgaggtgccagggtggttcctgaaagtgcctgagccccaacttatcagcaaggagctcatcatgctgacagaagtcatggaggtctggcatggcttagtgatcgcggtggtgtccctcttcctgcaggcctgcttcctcaccgccatcaactacctgctcagcaggcacatggcccacaagagtgaacagatactgaaagcggccagtctccaggttcccaggcccagccctggccaccatcatccacctgctgtcaaagagatgaaggagactcagacagagagagacatcccaatgtctgattccctttacaggcatgacagcgacacaccctcagatagcttggatagctcctgcagttcgcctcctgcctgccaggccacagaggatgtggattacacacaagtcgtcttttctgaccctggagaactaaaaaatgactccccgctggactatgagaacataaaggaaatcacagattatgtcaatgtcaatccagaaagacacaagcccagtttctggtattttgtcaaccctgctctgtctgagccagcggaatatgatcaagtggccatgtgaattccaaatatttttaatggggtccagttctctatggattcttacatttaatttgtagggaaatgccatttttcccccttaaacaaggcatggggctcacaagtctatggagacaggccaaaaagaatgtggagaagaaaactgataaatacacagaggtcctcaagacccatggactcctggtctgtacccaaaaaagctgttcgttcctcaaaaacaaaaacaaggcttggctgggaaaacaggccaatgccccggcaagaaaggttgagatcagatgttaggaagaactttcaggtaaagtatgagaactatggagtccatcagcagagatagtagtgaagtctctccccagggaaaattttaaaaaggttgaatcagctgttgtagagttctatttggcaatctcatggttaaatgacttccctttgagctctttaattattggcaataaacaacttctttaaaagttttaaataaaatagcaaccaccacc

SEQ ID NO: 930 - DNA, 1947 bp, Homo sapiens
caaagttctgtgaaaacccctgcatgaactgggcccctgactccaggaaaacagaggcatcttccaatgtccttggagccatgagaccccgaaacacctaccgggaacagaggggcttcacccagacaggccccaccagggaggaggaggccgctctccctcccaccaccgttgtcgggggtgacccgaggtgttccagatgaggagctgaatcactgggacttaagtcaataagtggcagccaccaggcaggcccagctggagccaaaccaaggcctggattctcctcgtggatgtctggtaaggccccaccacgtaccccagtcacgtagtctctaaaactgaacagatttgggacgcttcctcttagagggcagccctctttgggactgttagtctggccacttttacacatttcaagcattttttgggttagaaagggcacattttctgtatccaaaacagcccttacaggcagcagtggtggtgcatggggcctgcgtcagcatctcatcgcttcctgaagccccagctgcctggagtggggccccttttgggtgtggctcttcaggagcaaggcaaattgacgcacagagaacttgacggatgtgtaaatggaacagcttcccggaggtacctcgaggagggcaagggtaatgaaatgaatgaaatgaacccctgcacagcgagggagcacttacaccctgacaccctcctgcagggagaaggaagatgacaaggatctctctgttgaccttttcatagtgcaaacaagctactgatagaaaaaagaaaatgttttcatgcttaaaaaaaaataaacaccatcagcaacctttccccatggggagcagcagcaggtgctaccacaagagagacagacagatggatataattgccaagaggctctcaaactgggttccaaggagccggggtgtggagcccctcttcaggactgtgcaggtgaagcagggggctgggaacaaggccggttattataacccaacaaactgggttccaaggagccaggggtgtggagcccctcttcaggactgtacaggcgaagcagggggctgggaacaaggccggttattataacccaacaaactgggttccaaggagccaggggtgtggagcccctcttcaggactgtacaggcgaagcagggggctgggaacaaggccggttattataacccaacaaactgggttccaaggagccaggggtgtggagcccctcttcaggaccgtgcaagcagaagcagggggctgggaacaagggggttattacagcccaacccagagcaactcagctttttcctcgtcatctgtcaggcttccaggtaagacttcatttgaagaaagggtcctgcagtaaagatgttgagaagtgctgatatgcgctgctggttatatgaaagggtggaaggaggactggcacggtggctcactcctgtaaccccagctactccagaggccgaggcgggtggatcacctaaggtcaggagttcgagaccagcctggccaacatagtaaaaacccatctctactgaaaatacaaaaattagccaggtgtggtggcaaatgtctgtagccccagccattcaggaggctgaggtgggagggtggctggagtctaggagtttgaggctgctgtgagccatgatctagccaccgtactccagcctaggtgacagagtgagacctcgccttaaaatttaaaaaataaaataaaattcatgggtaggccaggcatagtggctcacgcctgtaaccctagcacttgggaaggctgaggcttggccagacatggtcgtgggcaactgtcgtcccaactactcgggaggctgaggcaggagaatcgcttgaacccggaaggcggagcttgcagtgagccgagatcgcgccactgcactccagcctgggcaagagagcgagactccgactc

SEQ ID NO: 931 - DNA, 2150 bp, Homo sapiens
agcgccgccgagaggtcccgcgggtggtcgcggccatgacagcggctcccgaccggctcaccttccgcgcccctcccgccagaggtgagagtaaaatgtccgtgtcagggttcaaggccaagctgaagttgttgtcctctattttccacaagaaccaggagccgccgcggcagctcaggctccactgcaacatcacggtgaggcgcccagcggcggcttcacacggcagggcgagggcggagaggaagagcccggagtcccgggacaaaggggaacctgcccaggagaggccccggttccccgggccgggtgagcgcgcacctttctcccgcgactggcctggccccgatcgccgggactgcgggaggcttgggtgggaggagggggagggcgcgtctctctggctccttgctgcggggctggcttgggggctgccggcacctctcgccccagtcaccgcgccccgaggtgggagcccgcgtcgcccgcagccctttcggggcccatggtcgccctcagtcagccagcctgctccccgggaccgcgacggggcgtggcagggcgtctccggctgttgtttgagcccgggcggggaaggggaaaggccttcaagattttcggggttttggccgggcgcagtgctcgttcctgtaatcccagtactttgggaggctgacgcagctggatcgcctgaggtcaggagttctagactagcccggccaacatggtaaaaccctgtctctactaaaaatacaaaaattagccgggcatggtggcaggcacttgttgagatggagtctcactctgtcgcccaggctggagtgcagtggggtgatctcggcttactgcagcctccgtctcttgacagtccatgggttcaagcgattctcctgcctcagcctcccgagtagctaggattacaggctcctgacaccacgcctggctaacttttgtgttgtttagtagagacagggtttcaccatgttggccaggctggtctcgaactcctgacctcaaatgacccatctctgcctcccagagttctgggattacaggcctgagccaccgcgcccagatccaaggcccttaagcttaaatgcctcgttcttcagtcaggttttccttgttcccgcatgttcagccaatcgtgtttaaggagaaactaacaatgaaaacgggcttgttgatggaggaaaagttggaatgcagcctctggtgctgtttgagcgatccctctatcccgggtcgctgctgtgttctggaaaggcacattgtaccctggatgcagcagcttcatcagcaatggaagtggctgatatgtggactctgcagattatataaccttcctaagcacccgaatgttgagatgccagatcaaccactacccatgggtcagaatgggacaacagaagaagtgacttcaaaagaagaggaagaagaagagatggatgaagatatagaagacttagatcactgtgagatgaaagaagagcctactagtgagaagaagttggaggatgaaggaactgaaaaagaaaactgggcaatattagagaaaattaggaagactgaaaggcaaggccatttaaatgtgttgaccctgatagtcctttgcacagtgatcttcagatcttaaaagaaaaagaagagataggagacattttgcttatgttttaaggtatgtattgggtagaggagcattatatatggaacctctcacaaaacaggtgattattttcttattatactcaattttcaccctgaatagagtgttttgattatgtaagttagatcgtaagtagatggctctcttaaagacattttagtggttttttgtttgttttgttttgttttgcttttttccgtagctcctactttcaagaatgaaaaaggtatcccagcagtttgggaggctgaggcgggcggatcacgaggtcaggagattgagaccatcctggctaacacggtgaaaccccgtctttactaaaaaatacaaaaaaattagccaggcgtgatggcaggcgactgtagtcccagctactcgggaggctgaggcaggagaatggcgtgaacccgggaggcagagcttgcagtgagctgagatggtgccactgcactccagcctgggtgacagagtgagactccatctc

SEQ ID NO: 932 - DNA, 2467 bp, Homo sapiens
aagctcttggctgcaaagagagaggatcccgggtatctccctccttacaaccaccgccacctcctagtgccttagaagccactgacagcccccagggcaggtgagccctgcatctggaataaggatccagaggtctcgttcaggaccatggagagcggcaccagcagccctcagcctccacagttagatcccctggatgcgtttccccagaagggcttggagcctggggacatcgcggtgctagttctgtacttcctctttgtcctggctgttggactatgggtgggatctccctctgttgctcagggtactagaacgcagtggtggcaatcatggctcactccggcctcgacttcttgggctcaagtgatcctctcacctcggctgccagacacagaggaggtactatctacgaggaacaggctctcaccagacaccaaacctctcggtgccttgatattgaacttccaagtctccagaatttccacagtgaagaccaaaagagacacagtgaaaggctacttcctggctggaggggacatggtgtggtggccagtgggtgcatccttgtttgccagcaatgttggaagtggacatttcattggcctggcagggtcaggtgctgctacgggcatttctgtatcagcttatgaacttaatggcttgttttctgtgctgatgttggcctggatcttcctacccatctacattgctggtcaggtcaccacgatgccagaatacctacggaagcgcttcggtggcatcagaatccccatcatcctggctgtactctacctatttatctacatcttcaccaagatctcggtagacatgtatgcaggtgccatcttcatccagcagtctttgcacctggatctgtacctggccatagctgggctactggccatcactgctgtatacacggttgctggtggcctggctgctgtgatctacacggatgccctgcagacgctgatcatgcttataggagcgctcaccttgatgggctacagtttcgccgcggttggtgggatggaaggactgaaggagaagtacttcttggccctggctagcaaccggagtgagaacagcagctgcgggctgccccgggaagatgccttccatattttccgagatccgctgacatctgatctcccgtggccgggggtcctatttggaatgtccatcccatccctctggtactggtgcacggatcaggtgattgtccagcggactctggctgccaagaacctgtcccatgccaaaggaggtgctctgatggctgcatacctgaaggtgctgcccctcttcataatggtgttccctgggatggtcagccgcatcctcttcccagatcaagtggcctgtgcagatccagagatctgccagaagatctgcagcaacccctcaggctgttcggacattgcgtatcccaaactcgtgctggaactcctgcccacagggctccgtgggctgatgatggctgtgatggtggcggctctcatgtcctccctcacctccatctttaacagtgccagcaccatcttcaccatggacctctggaatcacctccggcctcgggcatctgagaaggagctcatgattgtgggcagggtgtttgtgctgctgctggtcctggtctccatcctctggatccctgtggtccaggccagccagggcggccagctcttcatctatatccagtccatcagctcctacctgcagccgcctgtggcggtggtcttcatcatgggatgtttctggaagaggaccaatgaaaagggtgccttctggggcctgatctcgggcctgctcctgggcttggttaggctggtcctggactttatttacgtgcagcctcgatgcgaccagccagatgagcgcccggtcctggtgaagagcattcactacctctacttctccatgatcctgtccacggtcaccctcatcactgtctccaccgtgagctggttcacagagccaccccccaaggagatggtcagccacctgacctggtttactcgtcacgaccccgtggtccagaaggaacaagcaccaccagcagctcccttgtctcttaccctctctcagaacgggatgccagaggccagcagcagcagcagcgtccagttcgagatggttcaagaaaacacgtctaaaacccacagctgtgacatgaccccaaagcagtccaaagtggtgaaggccatcctgtggctctgtggaatacaggagaagggcaaggaagagctcccggccagagcagaagccatcatagtttccctggaagaaaaccccttggtgaagaccctcctggacgtcaacctcattttctgcgtgagctgcgccatctttatctggggctattttgcttagtgtggggtgaacccaggggtccaaactctgtttctcttcagtgctccatttttttaatgaaagaaaaaataataaagcttttgtttaccac

SEQ ID NO: 933 - DNA, 1529 bp, Homo sapiens
acgcacaccctacttcctcagcttctcgccctcaccctgccaacttccctgcgaggagggacctgccgccagcctgcttcctcgtccgcaggccctgcgctgaacgctgccgcgcccagggttcaccttgcgccgtcgggaaagcccatgaactctccagaaacggcgtaaaggagggtcccgccgcggcgcagggctggggcgcctgggttccccctgggtggagcagcggcagcagagcgggaaagtggtggaggatgatcttgcggccaaaggggacctcggcgcagtaatgtcaacatgatgtttcgctcagatcgaatgtggagctgccattggaaatggaagcccagtcctctcctgttcttatttgctttatatatcatgtgtgttcctcactcagtgtggggatgtgccaactgccgagtggttttgtccaacccttctgggacctttacttctccatgctaccctaacgactacccaaacagccaggcttgcatgtggacgctccgagcccccaccggttatatcattcagataacatttaacgactttgacattgaagaagctcccaattgcatttatgactcattatcccttgataatggagagagccagactaaattttgtggagcaactgccaaaggcctatcatttaactcaagtgcgaatgagatgcatgtgtccttttcaagtgactttagcatccagaagaaaggtttcaatgccagctacatcagagttgccgtgtccttaaggaatcaaaaggtcattttaccccagacatcagatgcttaccaggtatctgttgcaaaaagcatctctatcccagagctcagtgctttcacactctgctttgaagcaaccaaagttggccatgaagacagtgattggacagctttctcctactcaaatgcatccttcacacaattgctcagttttggaaaggccaagagtggctactttctatccatttctgattcacaatgtttgttgaataatgcattacctgtcaaagaaaaagaagacatttttgcagaaagctttgaacagctctgccttgtttggaataattctttgggctctattggtgtaaatttcaaaagaaactatgaaacagttccatgtgattctaccattagtaaagttattcctgggaatgggaaattgttgttgggctccaatcaaaatgaaattgtctctctaaaaggggacatttataactttcgactttggaattttaccatgaatgccaaaatcctctccaacctcagctgtaatgtgaaagggaatgtagtcgactggcaaaatgacttctggaatatcccaaacctagctctgaaagctgaaagcaacctaagctgtggtgagtttgtagcgtattccttttttttttttttttagcattattctatgaatatgattgtcaacaaagaattatacatacacacaaatgtacctgtatgtatattcacacatatagacatatatatatatgttgtcattaaaaagctcttttaattttt

SEQ ID NO: 934 - DNA, 2269 bp, Homo sapiens
caaatagtacagaaaattataaagttaaaataggcatctcttatattcctgtctcccaatctcaccctgtaggcaatctgtgggatgctgttcccgtgactccttccagggatattttagatcaagtcttcctcttgtcgcccaggctggagtgcaatggcatgatcttggcttactgcaacctccacctctcaagttcaagtaattctcctgcctcagcctcccagatagctatgattacaggtgcccaccatcatgcctggctaatttttgtatttttagtggggatggggtttcaccatgttggccagactggtctagaactcctgacctcaggtcatctgcctgcctcagcctcccaaggtgctgggattacaggtgtgacctccatactcggcctttttatttatttattttttgagatggagtcttgctctgtcgcccttgcgggagtgcagtggcacggtctcggctcgctgcagcctcagcctcccgggttcaagcgattctcctgcctcagcctctctggtagctgggactacaggcgtgtgccaccacacccggcctcccttcccatttttttaatgccaaagagaacatattatatatacactttgttctgtaccttgctacctgtccttgatagtttggggaccatcccttatcccttatcaatatataaagagcttctttttcattgttttccccagagatctagtattccaccagatatgcctaaatttatataatccatcccttactgatgggccttgtagcaggtagacatagtgggtgaactgtgtctcccaaaaaagtatgttcaagtcctaacccccgacacctgtgaatgtgatcttatttggaaatagggcatttgcagataatatcctcctggatttagggtggggcctaaatccaatgatgggcatcctaataaggaaaggagaggacacacatggaaacacagggaggaggcagagattggcgtgatgctgccacacaccaaggaatgctcggggccaccagaagcctgaagtggcaaggattctggcctagaccctctggaaggagcatggccctactggcatcttgatttcagatgtccagcctctagaactgggagagaataaatacattcaggtggtttaaagcacccagtgtgtggtcacttgttacagcagccctagcaagctaatacacaggtagacttgttttgagacgaagtcttgctttgttgccaggctggagtgcagtggcacaatctcggctcactgtaacctctgcctcctgggttcaagtgattctcctgcctcagccccccgagtggctgggactacaggcgcattccaccacgcccagctaatttttagaagaggcggggtttcaccttgttggcccggatggtcttcatctgttggcctcgtgatcggcccacctcagcctctcagagtgctgggattacaggcgtgagccactgcaccccggccaggtagacttctaagatggctctcaatgatccttgcctcctggtatccacaccctccacttagtgcggacaggacttgtgacttctactctgaagacccagccaagggatgggatcatttctggaattaaaactatgactgctatcttgccacaatcacgtttgctggcttcaatgaagcaactgcaaagatgtgaactatgcagaggcctacgtggaaagaaaatgagagtgacctctgtccaacagccacgaggaacagaatcatgcccaaaaccacgtgagcgagcttggaagcaaacgctttccctgctgggccttaagatgacagtgcggcctcgactgacaccttgactgcagcctgtgagaggcctgtgacccagctgagctgcaccagattcctgaccacagaagcggagatgacaaatgcaggtcattttgggcgggtgtggtggctcatgcctgtaatcccagcactttgggaggctgaggtgggcggatcacctgaggtcaggagtttgagaccagcctggccaacaggatgaaaccttgtctctactaaaaatacaaaaattagccaggcatggtggcggaagcctgtagtcccagctacttgggaggctgaggcaggagaatcgcttgaacctgggaggtggaggttgcagtgagctaagattgcaccattgcactctagcctgggcaacaagagtgaaaatctgtctcaaaaaaaaataaaaatacaaataaataaagtacctacttacaggctttgtatggttggct

SEQ ID NO: 935 - DNA, 1989 bp, Homo sapiens
gcagagtggcccttcctccggctctggaggacagacgtccgggctcgcggtgtcacagaggggcccttcctccggctctggaggacagacgtccgggctcacggtgtcagcagaggggcccttcctccggctctggaggacagacgtccgggatcgcggtgtcagcagagtggcccttcctccggctctggaggacagacgtccgggctcgctgtgtcacagagtggcccttcctccggctctggaggacagacgtccgggctcccggtgtcaacagagtggcccttcctccgcctctggaggacagatgtccgggctcacggtgtcacagagtggcccttcctccggctctggaggacagacttccgggctcgcggtgtcacagagtggcccttcctccggctctggaggacagacgtccgggctcgcggtgtcagcagagtggcccttcctccggctctggaggacagacgtccgggctcgcggtgtcacagagtggcccttcctccggctctggaggacagacgtccgggctcgcggtgtcagcagagtggcccttcctccagctctggaggacagaagtctgggctcgcggtgtcacagagtggcccttcctccggctctggaggacagaagtctgggctcgcggtgtcagcagagtggcccttcctccggctctggaggacagacgtctgggctcgcggtgtcacagagtggcccttcctccggctctggaagacagacatctgggatcacggtgtcagcagagtggcccttcctctggctctggaggacagacgtctgggatcacggtgtcagtagaggggcccttcctctggagcctctagtggggaacctgttagttgcatcttttggcttctggtggctggtgtttcttttttcttttttcatcttttttttttttaatttaattagagacagggtctgcctgtgtagcccaggctggtctcaaactcctggcctcaagcagtcctcctgctctgtcctcacaaagtgctgtggttacaggcgtgagtcatggggcccagcctgttggtgtttcctgacttgtggccccatcactgcagtctctgccttcagggtcacatggccttctcctctgctggagcatcccctcctgtaagtttctttttttttttttttttgagatggagcctagctctgtcacccaggctggaatgctgtggcgggatcttggctcactgcaacctccacctccagggttcaagcaactctcgcgcctcagccccccaagtagctgggactaccagtgagcaccactacacctggctaatttttgtatttttagtagagatgaggtttcaccatgttggccaggctgatctcaaactcctaaccttaggtgatctgcttgcttcagcctctcaaaatgctgggattacaggcgtgggccagcacgcccagcctcctgtaagtttattgtaaaggcactcatcatgtgatttcgggcatgctgggcaatctaggatgatttcctcatcttaagatccctattttagttacaacaaaaatcactttttctcataatgtcactgttgtggtttgaatgatggtgtcctctctaaaactgatgctgaaactgaatcctcaatgcaacagcattaagaggtggggcctttaggtggtgattaggctattagagctctgccctcatggatatggttagtgtcttatcaaatgtcttcgggggtgagttcattccttctacctcctctgctatggaggatgcagcgttcaccccctcaaaggtcttcgggggtgagctcattccttccacctcctctgctatggaggacacagtgttcctcccctctggaagatgctgcaataaggcaacattgtggaagcagagagcagcctcacctgcccccaggtctgctgctgccttgatcttgaacttcccagcctctagaactgtgagaaataaattcccattgtttgaaaatc

SEQ ID NO: 936 - DNA, 2669 bp, Homo sapiens
tttcagggggatgccctgggtaaagtttgggtcacctaatgggccctctacttttcaaagtcctcttctctgttccagaccactatgggcaactctctatctattcgacctgattccactatgggcaattctacacctgttccaccggattcctcacttggctacatcatccaccattggaatcaatttgaccctgacactctaaagggaaaatgtataatttttttctgtaatactgtttggccccattatgagctgcccagcccccagcaatgggcagtcagtggtagccttaatgatgacaccatcctgcaattagacctactttgcaagaggctgggaagatggtcagaagtcccatatgtacaggcttttatcaaaatatcaaaaacctaacaatctgtgaaactcccagaacccaccccccaaaggaaagtactaaggcagaactagatattatagatgaccctcttttacaagggctagctgtctctcagggtgaacagcaaccatccccataaagccccttgccaagtgctcctgaggctaaaacccaggagcaaacaccagggaccctactaaatccccctcacacttggagaggaatgccatattcaattctctctccagccctgctacctcttagggaagtagcaggaaccaaggggccagtcctagtgcaggcccccttctctataatttatacatacaatataaggaaaagctaggaaactattctgagaatcctaagaaacttgcagatgggttccagcgtttgaccttagcctctgatctatcatggagagatgttcaattcattctagcaacctgttacacaccctcagaaaaggaatgaatctctgaggccgcccacctgcaagcaatgaattatttgcccaaaactctcagggcaatcatcccggcccagacacagttcccactattgatcataattgggactataacactcctgaggaaatgaacaaccgggctaaatttcttgaggctctccttggaggaatgagaaagggaataactaaaggcagtaaattatgataaagtaagggaggttacacaaggcaaggaggaaaatccagccatgttttatggcaggctggagggagactttaaaaaatatactaatctggacccttcctctcccgaaggcaaaatattaatagcacagcatttcattagccaatctgccccagacattagagataagctccaaaagctacagatggggccacaaactaatcaaaatcagcttacttatatcacatttatggtgtataacaatcgtgacctgaaggaaggaaaaagggaacagagtaaacaaaatggcaagccaaaagtatggcagccatcattgacgatgccctgaatgtacaaagagtgtctaagggaaacccgaagggccataaagataatgccagcaaaggctcttgcttcaaatgcaagaaaagaagacattgggcaaaggattgtgctaagtccccgccaggcccctgccgtcaatgcaagggcaccagtcatgacccctggcactggagaattgactgcccatgttcccactgaggggctcagtcagtcaaaactctagcagtgcaaaaggaggaattagatgaagactgaaggggcctgaggtcttcctcactgcccctgttcaggaacattgtaattactactgaggagccccaggtaactctggacgtcatgggcacccaaattcagtttctttttgatgcaggagcaaattactctgttcttactgcttatgcagtaaggcgttcctcccagtccacaagtgttatgggaatagaatggaagccacaaacgagtttttattttattttattttattttattttactttaagttctgggatacatatgcagaatgtgcaggtttgttacataggtatacatgtgccatggtggtttgctgcacctatcgacccatcatctaggttttaagtcccacatggattaggtatttgtcctaatgctcttcctccccttgcccccaaccccccaacaggccttggtgtgtgatgttcccctccctgtgtccatgtgttctcattgttcacctcccacttattagtgagaacatgcggtgtttggttttctgttcctgtgttagtttgctgagaatgatggtttccagcttcatccatgttcctgcaaaggacatgaactcattcttttttatggttgcgtagtattccatggtgtatatgtgccatattttctttatcccgtctatcactgatgggcatttgggttggttccaagtctttgccatggtaaatagtgttgcagtaaacatacatgtgcatgtatctttataatagaatgatttataatcctttgggtatatatccagtaatgggattgctgggtcaaatggtatttctggttctagatccttgaggaatcaccacactgtcttccacaatggttgaactaatttacactcccaccaacagtgtaaaaatgttcctacttctccacagcctcaccagcctgtttcctgactttttaatgatcaccattctaactggtgtgagatggtatctcactgtgattttgatttgcatttctctaacaacaagtgatgagcattttttcatatgtttgttggctgcataaatgtcttcttttgag

SEQ ID NO: 937 - DNA, 2307 bp, Homo sapiens
aaaaatatttttcccagacgcggaggttggggtcatggcgccccgaagcctcctcctgctgctctcaggggccctggccctgaccgatacttgggcgggctcccactccttgaggtatttcagcaccgctgtgtcgcggcccggccgcggggagccccgctacatcgccgtggagtacgtagacgacacgcaattcctgcggttcgacagcgacgccgcgattccgaggatggagccgcgggagccgtgggtggagcaagaggggccgcagtattgggagtggaccacagggtacgccaaggccaacgcacagactgaccgagtggccctgaggaacctgctccgcagatacttggagaatgggaaggagacgctacagcgcgcagatcctccaaaggcacacgttgcccaccaccccatctctgaccatgaggccaccctgaggtgctgggccctgggcttctaccctgcggagatcacgctgacctggcagcgggatggggaggaacagacccaggacacagagcttgtggagaccaggcctgcaggggatggaaccttccagaagtgggccgctgtggtggtgccttctggagaggaacagagatacacatgccatgtgcagcacgaggggctgccccagcccctcatcctgagatgggagcagtctccccagcccaccatccccatcgtgggcatcgttgctggccttgttgtccttggagctgtggtcactggagctgtggtcgctgctgtgatgtggaggaagaagagctcagatagaaacagagggagctactctcaggctgcagcctactcagtggtcagcggaaacttgatgataacatggtggtcaagcttatttctcctgggggtgctcttccaaggatatttgggctgcctccggagtcacagtgtcttgggccgccggaaggcccagctcctgagtgtctctacctctcaaacaagtattctcatccaggagcaattttcccaccagaggacattagctatgtctggaaaaatgttttgttgccatgactggagtgaggagaaggtgctaccagcatcttgtggggaatgaccagggatgctgaacatcctgcagtgcacaagtcagcccaatcacccacataacagataattatccagccccaataccaagattgccaagggtaaggaggcctgccaggactttctctcccttgagtacaagcttccttgaactgagggacaccctgaaggaaaagtgtggtcccaccccagtcatctctcccttccctggagctccatctgtatgcctgtagtgcttaggcctgtaacctggggtccaggaacccaccttcccatgagactgcatgcagaagtgatgatatgtgcacacatgacttcattacagggcattggatattgatattcatcaggtcagctggggcccaagacactactcttctgccaacaggccgcaatcctctgcattagagagagggtaaagattgagggaggccctaacttcaaaccttctatcactgctagtgaagtgccaaaaagaagtgcaaggtcatctgcccttgtaggaaccacacaggaaggcagagtgtccaccaatgtcaaattccatcaaagaaataatattttgacaaaaaatgcaagtcacctttctaagtcccagacagcagctcaaaataaaaagcattaaacccctcaaatcttagaccaggtgaaattattgaagctgcagtaaggtctcgtgggacctgcagttagagagaagggacaactcaatttgggactgcagcagaaacccctacatcatggggttcctggaagggaccctctcccttcagcgacgcattgtgaggccatttctaggtaaaaaggtagaatttccttggattcctgaggtttattttacacttactgcttattctttgactttatagaagccaacttcagtttgaacatcttgcaattaattttttttggctctaagtggagagtttgaacttgtttctgaagaaaaccaggggctccttatgtgagcaagcaaccctccctgtggcccccttatgcaataaacataagccattgtgagccagcaaaatttaaagcaaggaaagcagtaaaccctccatttcagcatgtttcagcctgtctagtgatgttctagtcttgcctcactcttaacattttaaaatttataattttatttgattttgatttaataagaattcatatgtattcatttcttttgggtttgtcaccaaaagcctcctccaatcacctgtggagtaaagacaagtaaat

SEQ ID NO: 938 - DNA, 2026 bp, Homo sapiens
atttcaatcctcagccctccagggatccgaagcaggtcccggggagttagctgactataggtcaaagagtcagcattggggatggtttgtccagtcaatggacaactctgagggagaagggccagtagagggtggggccctggccctgagcatcctgcagggctcagcgcgggcctgacgacaccctcccttgaccctcgcggggtctcctttggtagcttctgcccagcgggggtcaagcggggtggagcggagctgctgggaggctgctggataggagaggggtcacggctgcggaagaggaggttcttcgggacacccgtggatggacacggcaaggaaagagcaaggctcaggatgatttatcctcttttcactgatgaggaatctgaggcccagagaacagtcatgaagtgtgatcagaccctgaggtctccaaaaagataatgtccttgcgaactccagggattctggcatcttgctgtacccaccccagcccacacggcaggatcctatccaagtcccttatccacccggacactcactttagcttttacaccctcaaggctgagaccctaaggacacgccctggatccaaggagtccctggcccctctgctaatatgcgccacctggactcccagagggaaagccggtcagcaccccacatgcattagcaccatgggccacccccaagccctaccccaggagaagctcgtggtggcaaaaagaacctaagcatttgaggcaggtcacccaagcttgaatctcagtctgcctctcatctgtgaccctggcgagccactcgtcctcaggaagccttcactttccctagtgcacggcgggcacacagctcaacgtgggactgtgaggatgggaaatgaggggtgccatgcaccctggaggaactcagtgaacagtggcaactgtcacttccctggggccctatggtccttcctttctccccagcctgtccacactagcatcttcctcaactcctggttttcagagggaaacacttatcggtcatctgctccacaggaaacaccaggccaaccacagctggggataaaatagcacaaccacaccctgccgtccagcgcctcccagcctgtgccccttcctagtaccaccagcaaccatcaatcccgtctcctcctgcctcctctcctgcaatccaccccgccacgactatcgccatggcagccctgatcgcagagaacttccgcttcctgtcacttttcttcaagagcaaggatgtgatgattttcaacggcctggtggcactgggcacggtgggcagccaggagctgttctctgtggtggccttccactgcccctgctcgccggcccggaactacctgtacgggctggcggccatcggcgtgcccgccctggtgctcttcatcattggcatcatcctcaacaaccacacctggaacctcgtggccgagtgccagcaccggaggaccaagaactgctccgccgcccccaccttcctccttctaagctccatcctgggacgtgcggctgtggcccctgtcacctggtctgtcatctccctgctgcgtggtgaggcttatgtctgtgctctcagtgagttcgtggacccttcctcactcacggccagggaagagcacttcccatcagcccacgccactgaaatcctggccaggttcccctgcaaggagaaccctgacaacctgtcagacttccgggaggaggtcagccgcaggctcaggtatgagtcccaggtaaggagctgtgcaaagggaagctcctcttccctagtggtggctggtgagaggtccggggatggcctagtgctaaagctggggttggtcctcaggggctgaggtctgtgggaaagcactagcgttaggtatcagggctggttaactggtgcatggtggggcaagggccagttccagacacaaataagacagttttatcaatttttttttttactgtaaatctcagttgtatatgaccaaattagttttaaacattaaaggaacattcttctg

SEQ ID NO: 939 - DNA, 3319 bp, Homo sapiens
cgagtcggccttgttcgcctactggctcgccagccgcgggttcgggcgtcttcggaccagcggggcgccgcaggcccctcgcagcgtccgtcggcaggcgggcagacgggcgggggagtcgccccggcggggcaagtccgtaccgcgacatgggcgcgccgagcacgtccgtaccgcaagatggctgctcggacggggacagagctcgcctctgccgcctcgacaactgctcctgggtcctctaagaggaggaagcgccacccatggcacacagtgtcccgtcggacagcagaaccagccgtcgtcccacgacacgaccccatgccgcccgcggggcgccccggggctcgcgtcggcccggccgtacgccaaaatggcggctcccgcgtatttccgctcgcgcgccgtatcgtcttcgccgcctgcgccggcacacctattggcccccgcggcgtcccgtcgccgcgtcgcgttgctggcccgtcggagcgacgccgctcgggtcagtcggcggccggactgggaagatggacgcagctactctgacctacgacactctccggtttgctgagtttgaagattttcctgagacctcagagcccgtttggatactgggtagaaaatacagcattttcacagaaaaggacgagatcttgtctgatgtggcatctagactttggtttacatacaggaaaaactttccagccattggggggacaggccccacctcggacacaggctggggctgcatgctgcggtgtggacagatgatctttgcccaagccctggtgtgccggcacctaggccgagattggaggtggacacaaaggaagaggcagccagacagctacttcagcgtcctcaacgcattcatcgacaggaaggacagttactactccattcaccagatagcgcaaatgggagttggcgaaggcaagtccataggccagtggtacgggcccaacactgtcgcccaggtcctgaagaagcttgctgtcttcgatacgtggagctccttggcggtccacattgcaatggacaacactgttgtgatggaggaaatcagaaggttgtgcaggaccagcgttccctgtgcaggcgccactgcgtttcctgcagattccgaccggcactgcaacggattccctgccggagctgaggtcaccaacaggccgtcgccatggagacccctggtacttctcattcccctgcgcctggggctcacggacatcaacgaggcctacgtggagacgctgaagcactgcttcatgatgccccagtccctgggcgtcatcggagggaagcccaacagcgcccactacttcatcggctacgttggtgaggagctcatctacctggacccccacaccacgcagccagccgtggagcccactgatggctgcttcatcccggacgagagcttccactgccagcacccgccgtgccgcatgagcatcgcggagcttgacccgtccatcgctgtggggtttttctgtaagactgaagatgacttcaatgattggtgccagcaagtcaaaaagctgtctctgcttggaggtgccctgcccatgtttgagctggtggagctgcagccttcacatctggcctgccccgacgtcctgaacctgtccctaggtgagagctgccaagtccagattcttctgatgtagagcgactggaaagattcttcgactcagaagatgaagactttgaaatcctgtccctttgaaaatcctggggtcgggggtggcacctgtgagagcctggggctcctggtgccgctgcgtttcatccatcccgcccgctcgcctgccgagggctgcgccccgtgctgcctccccccagagggccacccgctgtgctcgtggactgaggctgcgctgcccgggaggccttactgcttggtgtcagactgcccagctcagagtgcccgtcagggcctgtgcatccgcacgcggagccgtctgttaggagcttccagagtgttctctcgacactgccagccccgtgttagcacctgggcctcagtcccacttgctcccaggcgccggttctgtggttggtttggaattaaagtcctgtttgaagttgtcagacacagacatgaatttctgggcgctccctgagtcagagtctcagaagacctgtgcaggctggcgtgagaggagcggcagccacactgcggccccacgcccaaggactgggctgctctcgaggggggcgcgcccaccgctgtgtcctctctgcccagcctggcttaccaagggctacctcagtgggagatgaggttggaggaacgaaggcgaggttcctccttgctttggggagaaaagtattcaggaagtgggtgtgtgggaaacctgaagatggcgtgcacaggacacagcgtgggcggcctgggcagaagggcggctggctgtcctggagctgctgctggagcctgccctcagagtgtccctttccagtgctgtggcattctgtggcagcttccccaggtgtggtgacggggggggggcggggcctccacctgtgacagccaggcttgagggtggacggcgtgcctctcccaggagccttccccatgtccttgccttgctgagaattgccctcccatgccgctgaggtgttaggtggtttagggccaaaaggggaaaaccacttgagtcttgtggtgtgtggtgggcagacaccacagggtggcatcacctggtggcatttccagaacctcagccccgattccagcacccaccaccgcctgaccctgtgtaacctgctgtcccgggtcccagagtgcactctgccccgctgctctgctgcctgtcctgggaaagtatctttgccccactaggaaatgtaaacaggagggcttggggagcgtgggcacttttctcatgagcagctactgcggcgttggcaggactcgctgctgctgctgctgcttgtgtaggtcggggagccagagatccccgaggacgcgcgccggacagtcggcactgaccggcccacctggtagcagaggacacccccagccccccaagcattgaagacatagtgtatttcctcgtatcctttctcccttgggtgtagttggggtggggaagcagggaaggctggtgcgatctccattccttgggctccacgtccgagttcatggtgcgccgctgtgctgggagctgcagtggtaatgtgtgggacaccttgaccaaaggggagctttgtctcgtgtgttttgaaaaaggcttaatgaagagaatgttgttcattcttagtagtatagtttgcaattcttaatggcaaataataagtttcagtagaaaac

SEQ ID NO: 940 - DNA, 2654 bp, Homo sapiens
gcacgcgcaccggggcctcagccatggcgaccgtgctgtccagggcgctcaagctgccggggaagaagagcccagacctaggggagtatgatccacttacccaggctgacagtgatgagagcgaagacgatctggtgcttaacctgcagaagaatggaggggtcaaaaatgggaagagtcctttgggagaagcgccaaaacccgactcagatgctgaggttgcagaggctgcaaagccacatctttcagaagtcaccacggagggctacccctcagaaccccttgggggcctggaacagaaggcggcctcctccctggtgtcatatgtgcgcacgtctgtcttcctgctgactttggggatctcgatgatcctggtgctcctgtgtgctttcctgatcccctgtcctcccagagatctgcacagcacctggagccgccacttgggctcccagggaggtggggacctgtctccattggaattggctgatgtgaatggagatggcctgcgtgatgtgcttctctcctttgtgatgtcaaggaacgggagtgcagtaggtgtctcaagaccagctgctaatcttgtgtgcccttcggggatgaatggcagcacactgtggtctagtcttctccctgaggaggctcgagatatcacatgtttggagctgatgccaggaagcttggctgaaaccatctgccttgtgacagggacacacaagatgctcagcgcattcaatgcaacgtcagggaaagccatttggactttaaacccaaactacttgtccaacggtaccttggctgccccagttgtggtactgccagacttggatgaagacggtgttcgagaccttgtggttctggccattggggaattgcagccagatctgtgctttctgctggtgtctggccggaccggaaatccagtgggtcgacctgtgaagtacaacatcgttggagttgggaatctgattggtcctcaggtttacatcaccacaaatggggctgtctacatcctgtttggctttggaaatatacaagctgtcgcactgcgggacatttttgttcaggcccaaaatcgagacagctcaccaccttctctgcagatagaagagccagaatgggaaaagcgaagatccatcaacctgtctgagctcattgatgtttacagtgatggtgttgaactactccagatggtgaaggcaccagattccaactgcagcaaccttctgattacaaccagacaaagccttgtgctgcttcgggggcaaaatctgacaccttactgggcattgagacttcaaggcctgcgcagccagcctactcctggatatttcactgatgatcagacattagacttccttctgcagatacaggatggagttgggatgaaaaagatgatggttgtggatggtgactctggctccattgtttggagttaccgtgctccgtgtcacatgaaagaaacgccagccacctcagcagttacttcagaccagaagtctgtcttcctcttctgggccgaagggctgtcagctgcatctcccaattccgatatcatcctaggaactgagccgcccagccttcaccacctttacctcctgcatcctgcgttcccctccatccttctggatctggccaacaccaccggcacagtgacggcttcagaggttggaattaacgacctctggaaagatgccttttatgttaccaggacaacagggccaagctccgaaggccatccagcagccctggtggtcagcaagcttagtctacggtgggcactaatggagggccagatggctcagctacaggagtccacccccaaaattggccgtggggagctgcgaagatttctctctaggataaagtttgttgaagctccctacgagatctaatctgatggaatcttcagttgcagaagaagtgaacagagtggataccctctctactctcctgtcactgtaaaatcagttctatggagagaagacttcttcgtcctcatttaccacctccctgatggttgcaaaggcttgggaaggcatgttggagtctttgacggcagcatgatctatttggctggggcatcttacctaccttttcagtccctgcattaatcccctctaggaactctgcgtggatcgtttggaaatgtgaatctcttaagtatttaatttttttgccggtacagaaaggtgtaagtggtggctgaaaattgaggaagcttcatctgaccaatgtgggtgctggtttcttgtgaaatgtgtccctaagcctccttctccttgcaggcagccacccacccaggtgtctaagataggacatgctcctttctttctctaatcccatcctgaggttgccggcaaagccaatatgaccactactgagaaatagtaatgacttctacaaatgcaagggtcttaccctcctctttcccttaaacaccctcccttttccttagaccccgtttttgccatcccccaaatgtgtggcatggtgaaactaatcccctgaatgtgaattgctatccttattgccctattaaagaagagccagctggtatattgtcaggaagcactatttaaaatgtgaactgttatagagtaaataaataaatactctacaggaaaaaaaaaaaaaaaaaaaaaaaaaaaaaaaac

SEQ ID NO: 941 - DNA, 2274 bp, Homo sapiens
gcatttgtgcctgaagctgccgggtctgctacggcaccgcggggctgcagaaacccgggggccaagggcgggctgcttgccgctatggctggcagtcaggacatattcgatgccatcgtgatggcggatgagagcagaaagatgaaggtcttagaatcattgattggaatgatccagaaattcccttatgatgaccctacttacgataaactccatgaagacttagacaagatcagaggaaaatttaaacagttttgttcgttactcaatgttcagccagaccttaaaattagtgcagaaggttccggactttcattttgaggaggatggatgaacagagaccgaacgtcgaggaacagatgtgtgtgtgacgtgtttagaaatgcggtgaagggccagacggtgctgggaaggcagttgttcattgggagggtgagggttccggttcggccgtgggagggcttccttccctggggttttctgcctgtgtcaccttggtgcccgtcttggggcctcgccacacatgccctttgttgggctgaagccgtccctggcagagccctcgtgcattgacttgacagcctctccggcagcacaggcctagctggttctgggttggagttggctctggatagggtcagtcaccaggcctggactgaaggcagttatttttattattattattatttgcaatgagagagatggttggccccgaatgaggctcatgggaggtttggacgggtgctgtgccgcatgtcgaggccgattgtgtgccaggcggtgcgggacgtgcctcccgtgtgttatttaatcccttcaggagcccacaagatgggtgttattctcattttacagaggagggaggggagacgcgaagggattgcctggtctaagggcacccagcagcagagctaggacttccgccctaaggctgtgcctcactgccaccaggcacagccgcctccggaatgcacaggcgagtccctgccctccctcccaggccgcacaggtcctgccaagcctcacggagcacgggggagtctgtggtggccagtttacctgggcatctggctgagaggaagaaaggccaacctgatcctgaggggacccagacatatcctttgcactgtccctagaggggcgatgagctttgcagcattaaaaaatggtgaaggggggaaatattttgaaccaaagaccaaatgttaggctgccgttatatttgcagaagctttgagaaccatgcgtatagcctcctgcattctcccctctcctaggagctcttttgtctctgtccttacgaggcgtcatacagaggcagtggggtgggcacagatgagcagagtggatggttcggtgggtccccacgaggcgagtggtggtcatatgtgatggcacgtgttcacacaccctcctgtgtacccccccagggtcaccgaagtccccacacgctggctctccacacccctcctgttccagaaagcatgtccgaaagcagtccaggagattattaaggggtcgccatgaatccactttggttttaaaaccattcccgaatgtcctagtggattgtgttgtgctgcctaagctgccggctgcaggagccagagaagtgacccccgcgggagcagcggcaggtggatctccacggtggctcgctttgtttttgttttgttttttcttttaagacggagtctcactctgtcgccgagtttggagtgtattggcgcgatctcggctcactgtaacctccgcctcctgaattcaagtgattctcctgcctcagcctccctagtagctgggattataggcgccccccaccacgcccaagtaacttttgtatttttagtagagatggggttttgccttgttggccaggctggtcttgaactcccagcctgaaatgatccacccacgtccacctaccaaagtgctggaattgcaggcatgagccaccactcccggcctgctttttgtttttgaagacaggacttaggtctcctcctcccgaactctaaacctgcgtgtgtggctgtgcaccgctcgtttgtagcgtcacctcaggtctggggaagtctgtgctggcatctcctcattgtgccttcatcagagctggtgccttcgggccagaaagactctcgttctttctagatggtgggatcaggggcctttgctgtgtttcccttggtggatttttgtgttttgtaagttgtctattttgataatgtattatttttataactgtaaaaaaagtaaatagcatattttaaagtg

SEQ ID NO: 942 - DNA, 2924 bp, Homo sapiens
ctgacacaggacttaggtgtcccctttcaggccagcaggtaggttctcctgagctcttcggggctgtttctggctctctctgccgggtgctgagttgtttgctgggcactcacctggtcatggggagacagaacttgcagctctctccccaccccttgatcagctcacctcataacagagatcagctggacaagctgggagtcctcttccctccatgctgcctgggagtaacctgaacccctgcccccctccaggcccccctccgtgaaagcgctgcctttctcctgcccctgcagcggtctgagggctttcagctgtgctggggaacagtcctgcagacagccacagccagaacgtcccttctgcccctgagagtgagcatggccattaaggaaatatccgatgcattgatcaacatgtttgtccattcagcagattttactggcacctcctgcatgtcagaccccctttctgggtggtggggagttgaggatgagttcagcctcaacgagatctgctgcctctgtggacctgacagccccaggaagagacacacacgcacagtgcccgatcctgaggaggaacgagcacttcagagccgtgcacgccagccaggccatgtggagaggagggggctccactgggaggggctgaggaccttccacagggtctgtcgggcagcttaccttccaggtgggtccgtcttggcagggagaggaatgagagagccgtgcacaccagccagggcgttcgggaggagcagcacgcaagttagaaagtccccagtgccgctgtccgtatgagcttctctccagctcattttccccatctgtccagcgggatctcgctgcgtgggaccaatgcaaggataggatgagatgtgcatgtgagcaagcttgttaaatattaactagtactttgtgcgtggccttccacaacagtcccctcgtgtgcacaggcagggtctgagcagagggagggctttgtggattccaaaggccaccaggcccttggcaggcaactgcagctcgccacctccctcaccgaccggtcagctttccaacaccaacactgaagaggtgtgggagttctgtgccaggagctcccagagcagcttcagggagagtgtggggccccctgggacctggggcatctttgcccaccttaggagtgctttgtccatctggacaagctaggcttggctcactgccacccctctttggtccagctgtccccgggcagtggtgcccaggctgcctgacattgcaggggtgtggacagagcccttgccagggaatccctaccccaggattctggtgtggcctccgcctgggtgtgtcctggttaattcctgtgcctactgaaggcctgccccagctgatctcgctcgctcgcctcctagaccatgctggccacattggttctcatccagtcttctggggtggggacccgtccaaggacaggctggctgctcagtcattctgcagggccaagcagggcctgcaaggacgatgggcagacacagccgcatcacccaggcaggacagcaggctctggcccaggagatctgggggtgaatcctggctctgccagccattagccagagtggaagtgggcaaatggattaacgcctccagcacctggtttctcaccgagaacacagagaaggttataatctggacctggtataatctggactctgacttacaaatctgaatgccaagcaaaacccattcactagcgaaaactgactcaggctgaacgtatttaggggcaaaacctaaattgtcgaggctagttaaaagtcctgatttttctctgttacattgaatagtcacatgttcctctgaggaacaggagtgggtttaattatggggttctgccctagacccgtgtgggcatgccatgatccacaccatgcaccacgtgtgcctttgtcatcgaaatacctgcagttcccaaatacatctggcctcacagggttgttggggcttaaatgtgcaaatacgagtaaagaggtgagagcggagcctgacagcgcacctgctgggcagggtctccaacactgcagcattttgggggaagctctcctactgggtggggtctttgtacagcagcagcatttcaaggtgggctgatccttctcatctggggaagccagggctgggcaggtgcctgagcctcatgagggtctcagtctagatgctgggccctattctccctgctgccttgggcttggagatgctcacaggtgagttctcatttgtgaagaggtctgtcttcctgaggaagcaggggaccctcacctgtgaaccaagtgtgccatgggagctgctccatgtccaggtccaggtctcctggtctgcagggaacggcacaagagggctggcctaggccaggaggatgtgatctgtcctagaagggggctgacctgcttgctgaccccgcttgctgctgcctggctggcctgactcagccacggctgttccgagggcccttctgagtacgaacttccagttggaggatctgggtgaagacccagctgcttgagatagcagcctctggctaggcccttggcgtggccaagccaatcaggcaggtttagagcctggtgcccctagacaggtcctgcaaccaagaacaggggtagccttcaaaggccagccctgccttccaaccaccgctccacagcgagggaaaccaaggctcttagggcaggaggcttgtccgagattagcacctgcgtgctccaggctctgagttctgtcccctcagctgtccggcccctgggtgctcactttaatctcaagtcattcatcttactattaaacgtgagcccagaaatattgttgtaatggagaacgatgcctgcgagtctccaaagccttccctcggaacggttccattaaatctctcctgctcag

SEQ ID NO: 943 - DNA, 3000 bp, Homo sapiens
agcctttgatggggagagtctgagatgggacccaggaacatcaccatgaagctgtccaggatggatgtgggaccctctgtcagaccaggccagttctcttaatgtaagatcagcaggccaaggtcctgggatatgggagctcccaggaagtggactgggatgcctgagggatccaagaattagcagtgtcctgtgtggtctcgctgagggaagccaggcaaaatctagcggctcagctgtaacagccggagctcttggctcccaagcaacaggaaacaattctggcttatttaagcagaaaaggactttatcaaaaggatcttggggaactcacaaaataaccaagagggctgaagaatacagttggtgagtcgaccaaggaggctgcacagcagtcaggaccacagccaaagtcaggcaatccagggatgacctcgctgccaaatccaggactccctggcatacactgccaccttgggacgtggatatggtccctgtcgccccaggaactggaatgccattgacttggcgactgccaccatccaccagaatggacttctgtgctccttgcatctctgtattattagttcccaactccaagcctttgatgggggcatctgatggattgagcctaaggattccgatggtgcctgttggctgcttccgtgatgtctggagttgcaaaatgtgccagaaagcagaaggatacaccgctattcagagaggattttcttagggacttgaagaaattgacctcaaaatttcagtagatgagaggactgtggctggcctgtgtctttggcactggttgttggagcccaatgaaaaattctacattgaagactaagggaaaaagaggtttcattatagagctgggactgattgcattttcaaaaggtggctgcaacaatatcccacacacttttctgctgtataatctgccacttctccatcaagtagaggagacaatttctcccctcctttgaatctgagtgagttctgtgactgttttgactgatagaatgatgtggaagacagactgtgtgacctgaaaggtgaggtcacagaaagccttgcaacttccacctggcctgtgaagaacacttgctcttgggatactccttcttggaacccagccaccatgctgtaagaagcccaatctacatgcagacaccacatataaggcatcgtagtcaacagccacagttaagttcccagccggcagccaacatcaactaccagtcttgtgagtgagctatcttggacatccagcttggttaaaccttcagatgactccagccccagctgacacctgactgcaaccacatgagaaaccaggaatgaaaatccaccagctgagcccagtcaactcatagaactgtgagagataataataagttgtggtactaagccactaggattggggcaccatgcaataataggtaaccaagacagtagcaactttggttagacacatgagccatgggatgacacataattaggtatatttttaaaaacttggattcagctttagggcaatgtgtccctaacatagagaggcactatttcagttcacatctgctgcctctgatcaaaacactctcttgcacttccagagagagagagagagagagcaaatgtgtgtatttactgacaggtgtccctttgtgtccccatctgtgtgactgtggagctcagtgtctctcacacattctagtatgatacttggtgccatatttgcaggtcctgaggtaagaacccatgctgttgtcttcagagagtttcatgggttggactgtgccatatatgggcaaaaatccacccacacgttttcttttaatcacctttatggatgtataatttacatatatacttttttcttattactttttatttatgtaatttattcattttttgagatagggtctcactctcttgcccaggctggagtgcagtggagtgatcatggctcactgcagccttgacctcctgggcttaagcaatcctcccacttcagccacctgagtagctgggaccacaggcacacaccaccactcctggctaatttaaaaagttgttttttttttttttttttgtagagacagggtctcactatgttgtcaaggctggtctcaaactcctgggctcaagcgatcctagtgcctcagccttccaaagttccgggattacaagcatgagccaccatgcctggcatcttttgtggatgtgtaatttacatacgtacaataatatgtacctattttaagtatacagtttgatgagctttgacgaatgtagcccacgaaaccaccaccataatcgaagtatagaactttttttttttttttttgagacgaagtctctctcttgtcacccaggctggagtgcaatggcatgatcccggctcactgaaacttccgcctcccaggttcaagcgattctcctgcctcagcctcctgagtagctgggattacaggcacctgccaccacgcccagctaatttttgtatttttagtagagacagggtttcaccatgctggccaggctggtctcgagctcctgacctcaggtgatcccccctcctcggcctcccaaagtgctgggattacaggcatgagccactgcgcccggcctatagaacattttaatcaccccagagatgtgccccctgtgcagccagttccctcctctcaccccccagcccctggcaagcattgatttgctttgccactatcaatcaatttttgtcttttctggtatttcatatgaatggaatcatataggatagatttttatgtgactacacactattttagcataatatttttgaagttcttccatgttgttgtgtatatctatagttaatttctttttctcactgaattgtataccactgtatgatgtatcacaatttgtttattcattctcccgttgctggacatttggactgtttattgtttggggctactatgaataaaactgctatggatgtttatgtac

SEQ ID NO: 944 - DNA, 3479 bp, Homo sapiens
aattatctttcagttcaagtgacaaacgtacctgtggtccctggatccagtgctactgctacaaataagatcactattatcttcaaagcccaccatgagtgtacagatcagaaagtctaccaagctgtgacagatgacctgccggccgcctttgtggatggcaccaccagtggtggggacagcgatgccaagagcctgcgtatcgtggaaagggagagtggccactatgtggagatgcacgcccgctatatagggaccacagtgtttgtgcggcaggtgggtcgctacctgacccttgccatccgtatgcctgaagacctggccatgtcctacgaggagagccaggacctgcagctgtgcgtgaacggctgccccctgagtgaacgcatcgatgacgggcagggccaggtgtctgccatcctgggacacagcctgcctcgcacctccttggtgcaggcctggcctggctacacactggagactgccaacactcaatgccatgagaagatgccagtgaaggacatctatttccagtcctgtgtcttcgacctgctcaccactggtgatgccaactttactgccgcagcccacagtgccttggaggatgtggaggccctgcacccaaggaaggaacgctggcacattttccccagcagtggcaatgggactccccgtggaggcagtgatttgtctgtcagtctaggactcacctgcttgatccttatcgtgtttttgtaggggttgtcttttgttttggttttttattttttgtctataacaaaattttaaaatatatattgtcataatatattgagtaaaagagtatatatgtatataccatgtatatgacaggatgtttgtcctgggacacccaccagattgtacatactgtgtttggctgttttcacatatgttggatgtagtgttctttgattgtatcaattttgttttgcagttctgtgaaatgttttataatgtccctgcccagggacctgttagaaagcactttattttttatatattaaatatttatgtgtgtgcttggttgatatgtatagtacatatacacagacatccatatgcagcgtttcctttgaaggtgaccagttgtttgtagctattcttggctgtaccttcctgccctttcccattgctactgatttgccacggtgtgcagcttttactcgccaccttccggtggagctgcctcgttcctttgaactatgccctcacccttctgccctcacttgatttgaaagggtcgttaactctcccttacaggtgctttgactcttaaacgctgatcttaagaagctctcttcatctaagagctgttactttttcagaagggggggtattattggtattctgattactctcaattctaattgttatatatttgagcccatacagtgtattaggttgaaccatagaaactgctattctcgtaggtcaaaagggtctagtgatggaagttttgtagataagtaccaggcatctcagtaactcctagactttttctcatcccatgccccgttttaaattgtcagttttccctctgactcttctgtgttaaaacatgaaactataaatttagtaattatcatgccttgctctttttaatctatatgactgatgcaagcccctcttcttaaccgtttcttggctttgagcccagaaacacagctctccctgtctccaactccagtaagccctcctcagcctcaccttacgaatccaaagaactggggtttgttaggttctttctctaatgtagaggcccagatcccatcacaaagtttttcattcttccttgtccaccatgatcttcatcacagtctttgatatgtctgcatgcaaagtggaacagagttgggcggcaatgacagaagagcttccttggcctgactcggtgtgcggccacttcggcactgcttaatccagatattcttgttaactaagcattgtgcttcccaggtggtctgaagtcaggtactctctctctcaacacctgtagttgaatatgatttggtcagttgctcgttgtaacttggagaaattcctataaagtaagatctccttgcctcttccatccattgttggcacccccttgcaaaaggaaaagaacagcaaaagtcaggagcagtaatctgagaaagttaactccaggataggtaggtttctattgttatagctagatgtaaatctttagttccaagaagtgatagagtttctgctttaataatttgttgataagtttacataaacagaaataaaagatactatctttaccgtagtagttcaggccaagattatgcttagttttagttctccaggtagttacttttgccatgtcctattgatcagtgacactgccagaggcccataccggcaagaggaagaggacgtcattttgtaaagtttaacttcttagcgaactgatgtgccacccagtcacagagtggagttgtgaattcatgtagaggtggcaaacctctaccttgtgttgatgagagaataatcttgggcagtctgggaaaataaggaaggcatctccttcttactcatggagattcaactatagagagttgaaacctaaacccgccttccttttatagaagctggactagagacggactgaccatcagctctgaactgtggcttttttttgttcacctatgatgccatgtaccaaattcagaagctatcgttaataatttgttttataattgagtagtacaagcgaggaaaaaatacggaggataaccactatttttgtgcaaatagtatgaaagtgaagtaaaagcaatagaagaaatttctataggatctgggtttagagtgtgtatcattaataaatatacctttgctcttttcagggaaaataacaaccacccttactgatagttgggaaaagaagattgggttattttgccatatcatttagctggaagtgacatttaaaagcaccctgcatcactagtaatagtgtattttgctattctgcccttgtaatcggtgtccctgtaaaacaatccccacagattactttcagaaatagatgtatttctctacgtaagggccaggtttattttctccttttttgagatttctagaaaaaatgctgcttgcacatgttggttcttgaaaccttagctagaagaatttcaggtcataccaacatgtggataggctatagctgttcagaggtctcctgggggagcttaaaacgggggaaacactggttttcacagatgctccacatggctgtctttaaaagactcaaaacttttttttgtcctctttgttatgcttggaagctcccccccccccccacagtgtgtcgagtctttgcaaagaaacctttagatgtggttcatagatatatgaatacgtatctgtgtaaaacagtgagtgtgcagtgtgtaaatactttaaattattatgctagaaaaataaagttacataccttgctgtgg

SEQ ID NO: 945 - DNA, 3218 bp, Homo sapiens
tccgatgattctgttgctcacccccattaagaaccattgctataaaggaattctcctccacatgaggaggtcgatgcctggagacagaggcagcaggccaagggcaggcacacccagctgagatggggcagggctggaaggcaggcctcctggatcctgcctggggccttgtctctctccccacactcattctttcaccgtatttgctgctcctcatggtgaggtcagaaatagcccgcccagccttggtgagccttcgctcccacaggagcccaacacccagcccgccacagtccggtgagcagcaggctgtcggtgttcctaagtcagggaaatctttggaagaacaatggagggagtcgtgggaccccaggctgcgacctgccgcctggctgctcactgcatcatgctggtttcaccctgctcagagcgggctccacccctgctcggcatcctgactcatcctatgcatatggcagcgctgcttgcaggagagcccaggcgccctggcagcccccaggtccccatttgttccagttttactcactggattcttgccagaggtggcagccgctgtgacacagtatatgctacatttggtattgggctaatcctatatgacactaacactgtcatggcaagtagccaactgctcactgcgagccagctgctttctgtgtactatcccattaattccccagcaaccctaagggcgggcatcgttacttctgccttaacaggtgaagaaaccgaggctcagagagggttagctgacttatcggaggccacacagccagtgagcagcagagttggaatttgaacccaggatgttcaatcgtgcagggcccagacttttaacccccctgctctcctttttcttactccacgagtaagctcagtccctgcctctgctgcttcagctgtgactggagctccagtgtagggcttgggagcctcacccccgccaactgctgtctgataaaggaatgtcttatgcgtgactggaaatgatggcatcacgactggtgggtttttatttttagtctgttttttttgtttgtttgtttgtttgtttgttttactgaggcaggtactcactcacccaagctggagtgccagtggcacagtcacggcttactttggcctcagcctcccctcctacctcagcctctcaagtagctgggactacagccatgtgtcaccatgtccagctggtttatgtttatttttagtagagacagggtctccctatgttgcccaggctggtctctccctccggggctcagcctcccaaagtactgggattacaggcatgagccagcctgctgggttttggaaacaactgtgagctctgcttattctaactacatttctcaaagacagcacttgttgtccccaaggtccatttgtcagtcttagcacctacatggcctagcatctgcgccgtggtgatgtttcttcactggtgcctgtgtggggcgcgcaggctcatttatggagaggctcatttatggagcggctcatagcccacctcccttcagagggtgtcttgcctgagcctggaggatgtgacgtggtgacgcatgatgccagggaggtgccaggcagagtgccttcctctcttttgctctcaccccaccccggtccttacttggttaagacctgcagtgccttaacctctttgctttctctcagtcccctccccatccgcatttccttccctgtgaaaggagagacccgtcagactttaccttgaagattctctctgctgtcttcaacttcattgccttgttgctcttccttctttcctagcagccactgaggtgggatcagcctgctgttcactgccccatccactcctcgatcgctctgcatcgatggacatctcactgccttttagaggggcctccgcagagtcaaggtctttgacctcatttgggcttttcctctttttttctctccatccttcctccacggagggattgttctcaagtgtagacctgatcgtggtgttgcctaaagcctttgggaggctggttcgaaggtggctgtgacccctctccgttgatttttcagttacagatcgaactccttgttctgctctttcccttcttctcactgctgcagttgactagtttaaaaaacaaacaaacgggctggcagggtggctcatgcctgcaatcctggcagtttggaaaacagatgggaggattgcttgagctcaggaattcaagaccagcctgggcaacgtagtgagaccctgtctccataagaagttagctggacgcgatggtgtgcgcctgtagtcccagctgtttgagatcatgtaagcccagcaggctgaggcttcagtgaaccatcatcacaccactgcactccagcctgggagacagcgagtgagaccctatctcaaaacaaaacaaaacaaaacaaaacaaaacaaaacaaaacccttcagaatagcagtgtccaatcttttggcttccctgggccacactggaagaattgtcttgggccacacttaaaacacactaacactaacgatagctgattagctaaaaaagaaaaataaaataattgcaaaaaaatcttataatgttttaagaaagtttacaaatctgtgttgggccgcattcaaagctgtcctggggcgcaggttggacaagcttgctttagaggttccctgggacccccaaaaccaacaaggagaacaagctcagtcttctgtgtcttaatttttggctttactcttagccctgccccatttcctaggctctccacagtccagccgctttgagctacttttccttccctgatatgtgcagctctctcacctctgagcctccgcacctgctgttccacagcactctccgcattgccttctcccactgtggctcactgctgagctgtgttcaggccctttgggaaaccctctctttcactccttttccctggtctggcttgggagcccatgcttacccctgtcaggacaccttgaaacccagcagtgaaaacatgacacttccttgtctggctgattttcttagtgaagcgagtaggagtttcctttgtcaggacttcagcaagcaaaattcaggagagacttatttatttttattttattttattttttttttgaggtggagtctcgctccagcctgggcaacagtgttaagactctgtctcaaatataaataaataaataaataaataaaaat

SEQ ID NO: 946 - DNA, 2332 bp, Homo sapiens
acactactgggctccaagactgctcaaggtctcactgatagtcaaggcttgtgctcctttttttcaggagagtaagattaaagaaaaccactgtgaattaaaaagtgtgggtgccaacatgggacgggagtcccccttcactccatggatgacatagagggggcagaagattacagaattggcattgtcctgcgtggaagctgggccacccacagtggcgtgggaagcctctcagatgctggattctaatgggctcttgatcaccttggattgggctatttcattgttatcacaaaataaacaggatgctccaagtcatgttatggcagagaaccaaccagcttcacactggtcctctaaaccaatcctcacaacaggactgggagacaggtgttacctttcccactttacagagaatgaaacagagtggcaaagcctctgaaggaccctacacttcggacatcgcaaagcaggatctgagtcccggctcctctgtccaaacctacttgctaggctttctttcccatgtctactctatagctggaaaggtcgtggaggacacattttaggccaaccctctcggtttacaatccagagaggggagaccctcagaagccaagcgacatgtccacggctacgcggcgagtgtgtggcaaggtggaaggggagcccgagacgccctggtctctcctttctctcgcaggttcctttctccccgcacgcagcccgcaggggacgctggaggaggagctgagctggagttgccggggccccgggaccgggcgttccgggggcggtccccagcagccgcgcattccagagccagcagcgcgtcctggccgctcctgcgctctcccgcctcccggggctcggaggagccggggcacgttccaggagctgcctagggctgaggttccaggcctgggggtcgcttccagctgccagatcccgtgcagtcctggggaccctgagaagcaccgagccatccctgacccaggaactttccgcagactcgccgccatctgggagtgaagcaacatggatgcagtcagccaagtccccatggaagtcgtgcttcccaagcacatcctggatatctgggttattgtcctcatcatcctggccaccattgtcatcatgacctcgttgttgctgtgcccagccactgcagtaatcatctatcgcatgcggactcatccgatccttagtggggctgtttgagagcctcccaagagggccgggtgagggatgaggacaggcatcctatccccagcctcttcctgtcttcagaaaagcagcaggagggactttggggcatggacctgagttctggttttgattctgccacgagccagctgtgtgaatttggtcaagggacctaactctctgagttccaggttccttatctttcaaatggggatggtgatccctgccctttctacctcatagggatgtgagaaccacctgacttagtggatgtgaaagctgtttgtgatcagtaaagctaccacagatataagggtgttatgctgaatcctgagaagctttcaagaaccagagaacctgattgctgatgatggccttaaaggtggtgagggagatactgggggcagagcagactttgccagtgcccctcaggtcaaaccaagccaagagcaccctgtccccattccaaggggccagcagcactttggcccaaagtattttctttaaggtgccattccttcatgttttctcagtttggagggtgatgggtagagctttccagaaccttctccattccagaatctctgcccctgtgtaatctgaaggaaggctgtgccatctttgggcactgccaagggagttggggtgatgggcttctttctgcactggagtctcacatctgttagctttgacactcaagcaatgttggaaaatgcagggtgactgagttccctgcccagctttcgggatctctggcccccatccccttgtgtgtgtccctctgcccagctcctgctgtaattagctccacgtgtacccccttcactccctcccaccagctctgcagccagcctatggcaattatattttaagaggtgttcccaggacttttgggacctactaaaacaatgatggttattttagatgtgatgatttatatttatgtagagatatttctggaccactcaagctcttcgataccaaaatcaggagcatcttgggatttattaaattatgtaagaagatagcacagatatcgggatattattgtgtgaaaatgctgcttttactttgatgtgatctcattgatgtacacaaccaagttccaataaagtgctagaatgtg

SEQ ID NO: 947 - DNA, 2006 bp, Homo sapiens
ctttcattttctggtagagacaaaagagacatgttttatccgtgaacccaaaactccggtgccggtcacggactgggaaggcagccttcccttggtgtttaatcatttcagggacacctctctgattatacactcacgtttcaaggatgtcagaccacgcagggatgcctgacttggtccttcacccttggtggcaagtctcgctttcctggggcaggggcaagtacccctcaaccccttctccttcacccttagtggcaagtcccgctttcctagggggcaagaaccccccaatcgcttatttccacgccccaacctcttatctctgtgccccaatcccttatttccacgccccaatctcttatctctgcaccccaatcccttatttccgtgccccaactctttctctgcttttctggaggggaagaaaaccccaccccttctccatgtctctactcttttctctgggcttgcctccttcactatgcttccaccttccattcctccttcttctcccttagcctgtattcttaagaacttaaaacctcttcaattctcacctgacctaaaatctaagcgtcttattttcttctgcaatgccgcttgaccccaatacaaactcgacagtagttccaaatagccagaaaacggcactttcaatttttccatcctgcaagatctaaataattcttgttgtaaaatgggcaaatggtctgaggtgcctaacgtccaggcattcttttacacatcagtcccctcctagtctctgtgcccagtgcaactcctcccaaatcttctttctttccctcccgcctgtcccctcagtaccaaccccaagtgtcgctgagtctttctaatcttccttttctacagacccatctgacctctcccctcctcgacaggctgagctaggtcccaattcttcctcagcctccactcctccaccctataatctttttatcgcctcccctcctcacacctgttccggcttacagtttcattccgtgactagcactcccccacctgcccagcaatttattcttaaaaaggtggctggagctaaaggcatagtcaaggctaatgctcctttttctttatcccaaatcagatagtgtttaggctctttttcatcaaatataaaaatccagcccagttcatgacttgtttggcagcaaccctgagacactttacagccctaggccctaaaaggtctaaaggccgtcttattctcaatatacattttattacccaatctgctcccgacattaaataaaactccaaaaactggaatctggccctcaaaccccacaacaggacttaattaacctcaccttcaaggtgtgcaataacagaaaaaagttgcaattccttgccaccactgtgagacaaaccccagccacatctccagcacacaagaacttccaaacgcctgaactgtagcagccaggcgttcctccagaaccttctcccccaggaacttgttacacatgccggaaatctggccactgggccaaggaacgcccgcagcccaggattcctcctaagccacgtcccatctgtgtgggaccccactgaaaatcggactgttcaactcacctggcagccactcccagagctcctggaactctggcccagggctctctgactgactccttcttggcttaccggctgaagactgatgctgcccgatcgcctcagaagccccgtagaccatcacggacgccgagctttagaaggcaggaatgtcaggcctctgagcccaagccaagccatcgcatcccctgtgacttgcacggatacgaccagatggccggaagtaactgaagaatcacaaaagaagtgaatatgccctgccccaccttaactgatgacattccaccacaacagaagtggacgcgcatgaaaggaaggatatatggaagaaatagtgacaagcttggaagaaaggcttcttcgcagaagttattacagaattcaggagtcagagaattaaagaatttcttagc

SEQ ID NO: 948 - DNA, 1758 bp, Homo sapiens
ctttgcctgctgtgcctgagtcgaagtgagttcgggaagccagtgcccgaatgctcaaccttgctgtatcagggagggccaaagtgctgggattacaggcgtgagccaccgtgcctggccccggccaggtattcttttagagcaacacaaaatggaccaagacatgaatcaacagacacactgatggatgaagagagaggttggagtgggggagactcgcacctgtggtgtccacctggggcaggaggcgcaggaagatgggccgggcatagggtgccagcaccttctgcagctcctggtatatcgcgttggggtccagcaggctgtgggggtctgcgacggccgccatccctgccttaccctccactcctggaggcagaggctcagctgaggacaccccgcctctcatcctccccaccagcaggaccagatacactgtcaagcagtagcccctggtctgtaatctccagtctctcccaacctgggatgacatttatggaagcagccacacattttgtggagctcctgcttggctcattgaagccctaagacaggtgggctttcatgatcccattttctggatgacaaaactgaggctcaacatcacccaggtgaactggctccagatccagtgcttcctcctgggctgccatgagcagttgtccaggttgtgcactgcccaaaggcatgtgtacttctaagccccttttggctgagctccctcaggaccatgcctcaggaccaccccctgcaaccccagcttgcctggaacagccaccccatagacggccacgtctgtctggcccagcaggcggctcagcacgccctccacctcggtggtggagacgttctcccctcgccagcggaaggtgtccccgctacggtcccggaagtacatgtagcccagctcatccatcactagcacgtcacctggcagaggggagaggggcagatgggtggcggatccccatccgcacagccagtcaccggggcctagcaggctgcgcacctgagaggtaggcgctgtcgcccttgctgaagacgctgtgggcgatcttcttgctggtggcgctctcgctgacatagccatcgaagcggcgcagcgggtcctgttggttgatctgacccacaaggaggccaggctcccctagggagaaggccatgttcaggctgcgctaggcaggcagggtgtggggacccctgctccgggtggggaccatgcgggggccctgctcaccggcctggcaggggatgcagaggccctgggcatcccgcagcagctccattgtgtcctcattgaccttcaccagccggatggggtacacgtggggcaggatgcggctgttgaaaccacaggagccgacctggaatggggtgaactgagttggaaggagccggggatatgcggggtccttctcagtaacactttgcctgccttgccctggggcttggacctagcacctccagtgtcattctaagctctgtgaccttggctgatctgcaaaagcagggtagtaagcgtcgcctccaactcagggcccctcctcccaccttcccagcctgcattcagtcaagagaagacctctggctggcgcccacttcctgatccacaaaaccctccatgctggcaggaagtagatgcctctgtgtggacactacagctacgtcagacgctgcagagcttcacctgctgcccgccgccctgcttggcatggttctatgaacagaaatgcttctccaacatgtttgagccactac

SEQ ID NO: 949 - DNA, 1624 bp, Homo sapiens
aactctgggagaggagccccagccctgagattcccaggtgtttccatccggtgatcaggactgagcacagagaacgcaccatggagtttggactgacctgggttttccttgttgctcttttaaaaggtgtccagtgtgaggtgcaattggtggagtcggggggaaccgtggtacagcctggggggtccctcagactctcctgtacagccactggattcgatatgccttctttcaccatgcactgggtccgccaggctccggggaagggtctggagtgggtctctctcattagttgggatggtggtagttattaccatgcagacgctgtgcggggccgcttcgtcgtctccagagacaacggcagacactccctatatctacaaatgaacaatctgagacctgaggacaccgccttgtattactgtgcaaaggatcccttgcggccaaatacttattactatgacagtggtgacggcgccggtatctggggccaagggacaatggtcaccgtctcttcggcatccccgaccagccccaaggtcttcccgctgagcctctgcagcacccagccagatgggaacgtggtcatcgcctgcctggtccagggcttcttcccccaggagccactcagtgtgacctggagcgaaagcggacagggcgtgaccgccagaaacttcccacccagccaggatgcctccggggacctgtacaccacgagcagccagctgaccctgccggccacacagtgcctagccggcaagtccgtgacatgccacgtgaagcactacacgaatcccagccaggatgtgactgtgccctgcccagttccctcaactccacctaccccatctccctcaactccacctaccccatctccctcatgctgccacccccgactgtcactgcaccgaccggccctcgaggacctgctcttaggttcagaagcgaacctcacgtgcacactgaccggcctgagagatgcctcaggtgtcaccttcacctggacgccctcaagtgggaagagcgctgttcaaggaccacctgagcgtgacctctgtggctgctacagcgtgtccagtgtcctgccgggctgtgccgagccatggaaccatgggaagaccttcacttgcactgctgcctaccccgagtccaagaccccgctaaccgccaccctctcaaaatccggaaacacattccggcccgaggtccacctgctgccgccgccgtcggaggagctggccctgaacgagctggtgacgctgacgtgcctggcacgcggcttcagccccaaggacgtgctggttcgctggctgcaggggtcacaggagctgccccgcgagaagtacctgacttgggcatcccggcaggagcccagccagggcaccaccaccttcgctgtgaccagcatactgcgcgtggcagccgaggactggaagaagggggacaccttctcctgcatggtgggccacgaggccctgccgctggccttcacacagaagaccatcgaccgcttggcgggtaaacccacccatgtcaatgtgtctgttgtcatggcggaggtggacggcacctgctactgagccgcccgcctgtccccacccctgaataaactccatgctccccc

SEQ ID NO: 950 - DNA, 2178 bp, Homo sapiens
attccagccacagcagcccctcagcgtcccccagtcacaccgtccccattgctgcttatctgtgcctttgtccatctacaatgcccttatttcactctgcctgtgggagtcctgtgaatctctccaaagccaactcagttcatctttctgcttgaaaccttccctgaataggccaggtgcggtggctcacgcctgtaatcccagcactttgggaggccaaggcaggcagatcacaaggtcaggagatggagaccatcctggctaacacagtggaaccccgtctctactaaaaatgcaaaaaattagctgggtgtggtggcgggcgtgtgtcgtcccagctacttgtgaggctgaagcaggagaatggcatgaacctgggaggtggagcatgcagccagccaagatcaggctgctgcactccagcctgggggacagagcgagactctgcctcaaaaaaaaaaaaaaaaaagaaagaaagaaacttccctgaatattccagccctcctgagcctagtccctttttgagatttgtccccatttcttggacaccatatgagagacttcagaggctgaagtgggaggattgcttgagcctgggaggtcgaggatgcagtgagctgtggtcataccactgcactctagcctgggcaacagagcgagaccttgtctcaaaaacagccaccaccaaaaactatcttgggatttgaataggattaccttaaatttgtagataaatttgagaattgacatctgtacgacattctagaacatggtatttcatgtcatgaattcatttcttgttaatgtctttcagaagagttttagggtttccatcatatagatcttacacatcttttgttagataacagatctttgtatttttgttcctaaatacttcagacatttgtattgccattgtaaatgggatctttcttccattttctagttagttattggtggtacatctgaaaagcatttgaggtttgtgtgctgctctcttgattttgtttctagccaccgtactgaattctcatattacttccagtaaaatcttagttgattctcttaggcttctttggctaacatttattattttatatgcaaataatgacagttttgtctcttccttttcaatacttacactctttccttcctttcctttcttttttttttctttctcagggccttgttgtcacccagactggagagcaatggtgtgatctagctcactgtaacctcaaactcctgggcttaagggatcctcctgcctcagcttcctgagtggctgggactacaggcaggcagtgaatttgaaaacttttgttgtagagacaagatcttgctatgttgcccaggctggttttcctgccactttagagcaggtttcctttttttcatacttttaagagttttttattaggaattgtccgctgaatgttagctaaaacagtcaataaaatgcgttaagtaccagctgcatgcaagaccctaagttagatacagtcagccctcttcatcagcaggtccacatcttcagattcaactagataaggctgaatatttgaagaaagaaacaataaaaatacaattagaaagtacagtataacaactgttgtcattatacaatatctatacattttattagtgatgacctaaagtacatgggaccaggcacggtgactcacacttgtaatcccaacactttgggaggccagcctgggcagcatagtgagaccttgtctttaataaaaataaaaataaaaaaattagctagtgtggtggtatgcacctgtagtcccagctactcaggaggctgaggtgggcagatcactggggcccaggaggttgcggctgctgtgagctgtgattgtgacactgctctccagcctgagtgacagagggtgatcctgtctctaagtaagtaaataaataaagtatatgggggggggtgtgttggttatatgcagacactgcaccattatacgtaaggtattgagcatccacagattctggtatggtgtgggggcgatatcctagaaccagtcctctgcaaggtagcaaggatgactgaactgtggaagaatcaaagcactgttaaacagcatacaattcctgtcttcaaaaaagttatctcatcgggtagatgagacttaaaatgaataaaaggaatgaatacac

SEQ ID NO: 951 - DNA, 1558 bp, Homo sapiens
gagctcggcgggggctgccgggattggggcgccgcagctagcgctggtctcggtggcagctcctccgcgccgcaggactcggctctacgggacatgtccgtgccgcgctcgccgcgcgcccgggcctgctagctcctctgtgctccctgaacgcgcggcgccgcacctggcagcggcctcggagctcggctcgggcaggagcgcgcggccgtgcgcaccgcgcagcgaccgctgccgtcatggggctgcagcccctggagttcagcgactgctacctcgacagcccgtggttccgggagaggatccgcgctcacgaagcggaactcgagaggaccaacaagttcatcaaagagctcattaaggacgggaagaacctcatcgctgcgacgaaaagtctgtcagtggcccagcggaagtttgctcattcactcagagactttaagtttgagtttatcggtgatgctgtgacagatgatgaacgatgcatagatgcttccttacgtgaattttcaaattttttgaagaatctggaggaacagagagaaattatggcattaagtgtaactgaaaccctgattaaacccttggaaaaattcagaaaagagcaacttggagctgtaaaggaagaaaaaaagaagtttgacaaagagacagaaaagaattatagtctaattgataaacatttgaatttatcagcaaaaaagaaagactcacatttacaagaggtataattttttatttttctgttacgttttcaaaatttgataagcaatacatgtcttttaaaaatgtgctttaatttggataacttttcatctggcattatatagagataacaaaaagtgaacaggtattgtcataaattaagaaaaaagtccttgtgaaacaagaaaaaataatgaatacatcttatagtgattaatgagctatggattcatagtagtaaaatttttgtttctgagcattattttataggaacataactttaaaccagcattagtgaagaacagatatattatttgcaggaatagatcaattaattggcttttgggagttcttgaagaaatgaattgaatttaataagctcatataccattatgcgtttatgtgaaggcagcattaatcttatttaatgctgaggattcaggaggttcaactttgttggaaagagagcatctgttttacttgtattaatagactcatttattttggaggcagccatatgtaagcaggaaggaatttatattttatttttcattttctctttgtttacttctaaatcccctgccatttgtttctctcactcacacacttggatggaaactcagttgtttacaattcaaaacaaaatgcttttattaaaaataatgctgtttgccattgttaggatttagtctcatcccacaaaattgtattttttttcttgtttttttaacacataaggaatctggacattatgtactactgtcataaacacttattgaagtattatcaaaatgacacagtattaagtcttgtgtaaacctggattatatttaaatgttagctatttagttac

SEQ ID NO: 952 - DNA, 2720 bp, Homo sapiens
aatttcagttccagacctagcgtgtaaccactggcattgttattcttgccatccaggagagctgacagtgtcattttgatacctggctttagggtctcagtgtattctaaacctgttaggctagagttgttcacttagccaagaagcaggtgtcagggttgatcagatacttgggtattccaaagtgagtgtttgtattagtctgttttcacactgctagtaaagatacaccttgggactgggtaatttataaaggaaaaggtttaatgggctcacacagttccacgtggctggagaggcctcaccattgtgggggaaggcgaaaggcacatcttacatggtggcaggcgggagagaaaatgaaagccaagtgaaaggagtttccccttataaaaccatcagatcccgtgagacattcactaccatgagaacagtatggggaaactgcccccatgattcaattatctcccaccaggtcagtcccacacacgtgggaattatgggagctacaattcaagattagatttgggtggggacacagacaaaccgtattagtgttactgtttcctgctgtccaggtgaaattgacagtggtctccaacttcttactcaccttctggtaaatggagccaccaaactgtcccattatttacgttagtgtgaagttggaattcatcagacttgtaaccaactgcagagttgctctgggtcactcaggattttgcagtctcaaaatttatctggtagccagccagtcaacccttgtaacccagcaccagagcgccccagatggaaggtccagtgatgtcaaaatccaggttacagcccaggttgatgtgctcctgcttgtacctggtgttgattttagcatttttcccccagtattaggtgacaagggtgaattgagggtcagcttcagtccacttgcaagatgatcttccacagtaatctcagtcctggtgtgttgtgtgtttcacttcgtaaacatcaggccgtactcagtccatctgtacttggtctccatgactgcctgtcactttggtgatttcagtgttggctgagcctaagctttcaaattccaatgcattctcagattttgttttcaaaaggtttattaggccatatccgtagcccttgttgaagacattcctggcagatttgccaagattggcatacttgggtggcacagccatcttctgctcagaggtggtggtggcaggcttggcggcagctatgatgggggcttcatcagggaggcatggagcaaagcaagcagccggtgtgtagtgcttttaatggtgtttcattatatacctcataaagtcagagtccatgtctgtattgctcaccattgtatccttatcacagtgcttggcatataatgtgtgctcaacaaatatttgttgaatgagcatctttgaatctcctcccagctcaatttgctattaactaagagaaaggcttttttatcagaagagacagaagtgaacctgcacatctaacctttgacgtttttccaatgatttaaagatgtttttcacccaaaatctcagtaggtgttatcttctacccttaatagtcacagatcagtcaacatctaaaaggccccgtctggagcaaatcactctgccattctagtttccacctaatttctaagtcctatagttctgcttaaatatctcttaaaccattttccttctctccatcttcattgttattaccttaaccaaacttttatcagctttattttttttttttaagatggagtctcgctctgcccaggctggtgtgcaatgatgcaatctctgctcactgcaacctccacctctcctcggcgagtctcctgcctgatgcctcccaagcagctgggattacaggtgcccatcaccacacctagctaatttttgtatttttagtagagatggggtttcaccttgttggtcgggctggtctcaaactcctgacctcaggttatccaaccgcctcagcttcccaaagtgctgggattgcaggtgtgagccactgcgcccggccccttaaaattttatcagctcttatacagattacagcagcagtctcctaacagcttttgttgttgttacacttaaaaaatttttttaatttaatttttaaaaaaggagtccctgcagctccagcacggagacacaggggctcaacagagtgcttcctaatagctttttgtcttgagtctagaccccttttgattagttaggaattagcttagttacatgtaatagagattctgtttttccttttctgggtatgccccacattcatctatatattcacatattccacagatatttgagtgactgcttttaccaattttagcttaagccctgcagatacagagctgaacgagaacgttcaatccgtgttctcttgaaacttaacgtagttacgtgaaggttaatataggaccagtaatcacaactgtgatgaatgttataaagaagaaatgcatcttgtaatggaaacatacagaagtgcaaactttttctgtttgagggatgaaggagagcttcactggaagtgattttgaagctgagacccaaaggatgaattaaaattaaccagacaggcctggcatggtgactcacacctataatcccagcgctttgggaggccaaggcgggaggattgcttgagcccaggagttcgagaccagcctggggaacatagtgagaccccatatctac

SEQ ID NO: 953 - DNA, 2438 bp, Homo sapiens
cagcagggccccaggacattgttggaagtcgccctcaggttctgagcccctcccttctgtactgtgggggtcatcccgggagtcctctcctggagctctgtgcctggggaggtacgtccagcatggcatggatggcgggcttccataggggcctttcctggcttgttcttttctgggagaaacctgagccgactgccaccttcctcgggtgtgttttgggtaaagtcttgaggccagaaagatcttgcatccctcaagcactcttgagctggtgctgaaccagggcacaggcaggtcccgcggcggagtcttgagctctgcctccttcgcactgtactgagctgagtgtgaggatggtgccagcccaggccctgcagtttctggatccctcgatgttcattgtctcgcgtgagcctcacagctgcgtggcaaagtcagtttactgggcagagcacattttcccatttcacagaggaggaaacaggctcagagaagttaatccgttggtccagagtcacacagtaagacctggagcccagactccatctcctgcctcctgtttggaccctgagggttcggggttggctgcctgctcctggaacccccacccagtgtcagaagctcctggtccaggcagtagcaggctgcctgctcccggcccagcggaggcctgtacagagcgtgatgggccctgtgtctgttgcaggtgcactgtgaagagttcatccccgagtttgagaagcaatacccagaatttccctggacggacgtccaggctgagatcttccgggccttcacggagctgttccaggtggcctgtgccaagccaccacccctgggcctctgcgactacccctcatcccgggccatgtatgccgtcgacctcatgctgaagtgggacaacggcccagatggaaggcgggtgatgcagccgcagatcctggaggtgaacttcaaccccgactgtgagcgagcctgcaggtaccaccccaccttcttcaacgacgtcttcagcaccttgtttctggaccagcccggtggctgccacgttacctgccttgtctaggcactcgctgtccccaaaacctgtgcttggggcaggattccaacctcagttctctgagctgcttctgcaaaggcccccatgtccctccccacaccggccctgggcatagcctcagccccaggcctctgtcctgccgagccatcctcccggcgccacactccgggagcacagcatcctcctctcacctgtgggtcagagcaggacagtgatggtgtccccagggctgagcaccaccccacgccctgccctcacccctcaccaccatctgtgcactgatgagtctccagtttagccaagggcttcgttcctggcatggagaatttgttcctggctgctgtgttcccaggggggtgctgggggaagggttccgtggagcgagacaaggtgtcctcgggagcagggttccaccgggaagcgtttgggagccctgtatcacacggggcaggcgggtttctcttccggggtctctgctcttatgcatcaggacgaccccgggacggctgtggggccccacactgcacccacagggctctatgcgacaggggcccaggaacagcctgaggccaccacccagcaagcccgccttatcacccattccagctcacccagaaccttcaccagcaaacctcctgctgaggtcctggcaggaggccaccgtcttgttaccgtttccttttcgtttgctgagggtcacagaccccaacagggaaatcagtatctgtcttcccagtggttgccctgctcgccgggcactccacggggtcccgcccttgtgtgagatgggccaggatccttcggcaaggggcgcctggggctggggctgattgtgggcggtggagcgccagacagaaaaggattccaatgagaacttcaggttaaagtcagatgccacctaccagggtctacagtcaaaatgttggctttttcttgttttttaatgtatgggagaaaaatgtaaaattccagttcttttctaattgtgtttctgaaattaggagtcagctgccagcgtttttgtgtggctgcagtgtgcctgggcccagctcacgggcagtgggtggacctaactgcccaggcaggcgagagctacttccagagccttccagtgcatgggagggcaggtgtctcctctttgaaattaagaactatctttcttgtagcaaagctgcacctgatgatgctgcctctcctctctgtgttgtctgggcccttgtttacaagcacgcgttacccttcctgaggggagccatgctctagcccctggagggcctgttgcaggggcagggcgggcccgtcgcctttggcagctcctggagagctgtggacatgcagtccccctcagttcgtgctgcaataaaggccatcttctctt

SEQ ID NO: 954 - DNA, 2103 bp, Homo sapiens
tcgccagcagctagcagcactgactagtaggagggcccgccggaggagagccgcgcggcccacagaagcggaacgcgcgtcgagagcgccctgtccgctcgccccagacagatgcccggttattcattaccgcgaggcctagaggaaagagtggctgccgtcttcctgcccacagcccgccggaccctccgtcgcggctgcccggtccccggagccgcagccgccgagcccggctgtgcgtgtcgtggctgctggggagaaagaggcttccggaagccccagagagattggtgagggtgatttcccaggaagacgcagtgtgctctgacttctgtgacagtgagcaacgggaccagtggatgtccagatgctggcaatgagacatgctctggagtcagaagacagcgaaaagagaagcagaagccccggtggcaagagtctgaagcaggaaggatgactgtagcctgtggattgtactgcagtaggaaactgtcctagcaaggctccactttgccccagcttcaagctggaaaggaggagaacatgaaacattgcttgaagacaatggccgagacagcaggtcccaccctgcacagccaccagcatctctcccctcagccctgtctcctcttctgcagttgggatctgcacatttaagcctgaaattgtcctgtgaagtgaagtatgatcggacagcctcttttcagcttttatgacaatggagacagaggaattgtggctcttgccaaggtcacaggattggaatacagagccaagccaccccaggacatgcaagagcctcagaagggaaaaaagcccagcaggaagggagaacaagtagcctctgtcctgaagttgtaacagccaggggccaggatggaggaggaggaccccataatctgcccatctgggacttggcaggggacctgggaaaatgtaccccaacccatcccttaagggcctttgtctttggcccattggcctagcatctccttcttcaccgtgtctgttcttgtcacacctagtcaggtctgtttgggtctgaggtgcatggaacattctgggtaggcctccagcaaacggaagctcttcaccgtgtttccagcctgggaccaagggcagcatactggcaaagttgccaaagcaagggactccagcctcttaggagttaatgactccctctccccagctgtcctccccttggtgctcctcttcctccctcctcctgctcacagcaggcagggcctagacccgggagccatgctgctgtgctgttgccaggggagcacggaggcatatctgagctatgcagggaaaaggcccagcctgtcaaagtgtctgagatgaaccgccgccgtccctgtgcagctgggctcagacgtgtctcagctcttgttctgtgcctgagaatggcgaaacccagtgaggttcaagggcaaactcgctattcattagtcaggggttcttgacgtcccgtctctcccagggatgagttcccccctcctctttctccccctcctatgacacattcctgggtgcctttggtgaggactgcacaccctcctcctgcctagccccctctccaaaggcccctgaataaactccccccaaggagaccaggcagggcagagacaatggctgcaggaaatcattcaggcgggacatgctggcctgccctccacccagtccccctgtgggccccactcccttctgattcagggcacccttgggcccccagcctatacaggcctggacaggaagaaaccactgggaaccaccctaaggacaacatgctagtccagtgccattcttcgctggctctgtgggtgcctttgtggcctgtaccgactggctggctaattttgtggtttctgtaccatcacatgcctattttaagacactctccagcactgtcggttagggagtgtaaattttgcaatattttctgaaatgtggcaatatcaaaatgtaaaaggcacacatacttggtcacaaacaaatggcactatttactctgtgggcatatttgtaaaagttgccaaagaattatatacaaggatgttcatcagagcatttcttttgaagagtaaagaaatggacatg

SEQ ID NO: 955 - DNA, 2447 bp, Homo sapiens
aaaagcctgccgctaatcatcttgggatgacggcccggcacccagcacacaaacagcgacagtcccgagggttcagcccactctggcgacctcgacagtcggagaggaaggggcgggggtgcgagcaccttcggatctacgccgcccagggcgcaccggaaagctgccgcgagccggggtgggcttccgctgggaataagggctcgcctttttgcgggacacaggccctggcaaacctgaagcatgactcaccgaaaagcgcaggcgcagttccggagccttcagccgcccagtgcccacggagaacttccgatcaccgggactgggacaacgtcaaggctcagccaatccaagcccacaggccggcgcacgtggtcctgggacccagtgcatgcgcgctagggaaatggctgccgtgggactgcgctcgcgcggcttcctagaggaggagccatggccccgccccgggcccgagagaaagaaactgcactttcgttttttagcagcaaagtttgttgatgtactttacaacttatcttttctgcttctactcaggacagtcaagacagtgctcagctagatgttcacataactgtagacataaatgtgaatctatttaacgcagtaattaattcaaaaagtgtttttagcatcctagcatgcatcagttgatatgaaagtagtaaatgttaattgagtggtcttgtgcatcctggacttctcatctgtgcatattctcattctttgcctgcaaagggccagtaaaagcacagtgatggttgaacgaatgtgacagcctcctttgctgatgccttaccccaaggtaatttggggaaaggttcagggaaacagagtatccaatccaatactctggactgggtgctggcaggaaggagggcgattgtatgattaagtatcataataaatcttacctaaaaggaggggagacaagaccagtgactcattaactgggataggggatgtttggtcatttttgtggtttggacaatgtttacgttttttcagcattcccacgtgattacgaaggagtcttgtttttgtcttgatccatctggtcaaagagtggccacgtctgatggtgttctgtgaagtatttatgttccacgcagcaccaaggcccagctgtgactgccggggcagctcagagctgtcaggggttacttttttcttgctgtctattatagggctaaaatgtttaaggattatataatacctttttaaagaaaaaattatttggctgggcgtggtggctcatgcctgtaatcccagcactttgggaggtcgaggcaggcggatcatgaggtcaggagatcgagaccatcctggctaacacggtgaaaccccgtctctactaaaaatacaaaaaattagccaggcgtggtggcacgtgcttgtaatcccagctacttgggaggctgaggcaggagaatcgcttgaacccgggaggcggaggttgcagtgagctgagatcgagccattgcactccagcctagcgacagagcaagacttggtctcaaaaaaaaaaaaattatttaatgacacttgtcacttgttaaagcatggtaaggaagactttattcaggaccattgagatagacataggtaccactgcaacagggtcttgcagtggggaagagagattgggctcaacttcaattgtagcatggaaaagtgagaatttatagccaaggagcaaggtaggggggtcagtggatggaaaattattaagaggaaacatcaggggtaagggggattctgtctaaaccaacctgacaagattcttgctgaagacgggccagggtgatcagatgtcacctggaggttggtggaggatgaggaaccaaatcagatattaagggtgatcagatattgagggtggttgcttttggctaaactgatttatcaaggctttttgctaaaactggattttacaaggaagtgcacagataggcctagtcaggagactgactaaagtttggttggaaaagaatgcttgataatctttacttttgcctgttaaaataaaaaaaaattgacgtaatttaaatttggcagagtttatgtgagcaaagaatgattcatgaatcggacagcactcagaatcagaataggttcagagagctttgtgggccgtgagtatttatagacagagaatggaagtaaaatacagaaataggctgattggttgcaatcaatgatcagatcatttggatatgatctgagaagttggcagcttgtgattggctgaagcttgtctgcttgtgtttggctgagacttggctgtttattatactcttccttaggttaagctttcagtgtatttatgtactaagttaaattgcaattcattgtgtagaaaatcaaagtacagagacagccttgagccaatagcctcctgcttatttaatttaacatgctttaatggt

SEQ ID NO: 956 - DNA, 2944 bp, Homo sapiens
atcaagcgatcctcccacctgggcctcccaaagtgttgagattacagcatgagccaccacacccagactaaaaggcagtttgattttacaaatcaaaatagcagtaatctatggagatttacttgtgagattggtaggaaacatcttaaatgtaatcaaacaataacttacatcttgatgaattcacgtgtaggtttctcttcctcagaagaaatcagatgctgttcagagcacgaaggctagaattttaccctggttctcatgctaccttgcacccaggttggatcctgagtacagtttttggcaggtgggcctgcatataagttagcaatgggggatacccagctgcctctcttcatacagctgaggttttggggagtcattcttatagcccctgggttgggcctagtcctgcaaatgaattcaccagccctaaagcccaaattgcagcctctgtcattcaccttccaggagtggaaagggcagtaagtttcatcttattattattgctattttggtggttttgttgaggttggtgtgtgtatgttagtaagataaagctctcagaaattacatagcatttgtcaaggatataagagggactgtgccacatctggctgtatagaaggtggtttcatatctttaaatagagccccaggtccttagccaccagaaaggttttcaggggaagtgtgcaccctcagcagctgctgctggtgggcaggatgggcacgcatggaacaggctttcctctgtggccaggtgagaagcaggtggtgagacacagagcagtgctgggctctgcttctgaagcctccaacctttccttccctaggaagccccagagagattggtgagggtgatttcccaggaagacgcagtgtgctctgacttctgtgacagtgagcaacgggaccagtggatgtccagatgctggcaatgagtaggccttccctacgctgggtggcgtccacaccctccggcttccattgcctgggtctcctggaggtggtttgctggatgaataccgcatgcacagaggctggccttgggtttgaatatggcagccagtggacagcatgtgcttcagttatgagactgcccaggagatgcttcttccaaggcagagcacgtgcagagtccagtgctggagaggccgggtgcgcagttgacccatttccagttctgttttccctctcatgttcctctgtccccatctaggacatgctctggagtcagaagacagcgaaaagagaagcagaagccccggtggcaagagtctgaagcaggaaggatgactgtagcctgtggattgtactgcagtaggaaactgtcctagcaaggctccactttgccccagcttcaagctggaaaggaggagaacatgaaacattgcttgaagacaatggccgagacagcaggtcccaccctgcacagccaccagcatctctcccctcagccctgtctcctcttctgcagttgggatctgcacatttaagcctgaaattgtcctgtgaagtgaagtatgatcggacagcctcttttcagcttttatgacaatggagacagaggaattgtggctcttgccaaggtcacgggattggaatacagagccaagccaccccaggacatgcaagagcctcagaagggaaaaaagcccagcaggaagggagaacaagtagcctctgtcctgaagttgtaacagccaggggccaggatggaggaggaggaccccataatctgcccatctgggacttggcaggggacctgggaaaatgtaccccaacccatcccttaagggcctttgtctttggcccattggcctagcatctccttcttcaccgtgtctgttcttgtcacacctagtcaggtctgtttgggtctgaggtgcatggaacattctgggtaggcctccagcaaacggaagctcttcaccgtgtttccagcctgggaccaagggcagcatactggcaaagttgccaaagcaagggactccagcctcttaggagttaatgactccctctccccagctgtcctccccttggtgctcctcttcctccctcctcctgctcacagcaggcagggcctagacccgggagccatgctgctgtgctgttgccaggggagcacggaggcagatctgagctatgcagggaaaaggcccagcctgtcaaagtgtctgagatgaaccgccgccgtccctgtgcagctgggctcagacgtgtctcagctcttgttctgtgcctgagaatggcgaaacccagtgaggttcaagggcaaactcgctattcattagtcaggggttcttgacgtcccgtctctcccagggatgagttcccccctcctctttctccccctcctatgacacattcctgggtgcctttggtgaggactgcacaccctcctcctgcctagccccctctccaaaggcccctgaataaactccccccaaggagaccaggcagggcagagacaatggctgcaggaaatcattcaggcgggacatgctggcctgccctccacccagtccccctgtgggccccactcccttctgattcagggcacccttgggcccccagcctatacaggcctggacaggaagaaaccactgggaaccaccctaaggacaacatgctagtccagtgccattcttcgctggctctgtgggtgcctttgtggcctgtaccgactggctggctaattttgtggtttctgtaccatcacatgcctattttaagacactctccagcactgtcggttagggagtgtaaattttgcaatattttctgaaatgtggcaatatcaaaatgtaaaaggcacacatacttggtcacaaacaaatggcactatttactctgtgggcatatttgtaaaagttgccaaagaattatatacaaggatgttcatcagagcatttcttttgaagagtaaagaaatggacatg

SEQ ID NO: 957 - DNA, 2199 bp, Homo sapiens
tatctgtgattctgaaccccatgataaatcccctttgaacctttttcctctttttgatgccgatcctcctttacgggactccaattggcattacgataattcttatcgacccaggtatgcccctctacttcttcagcatccccaggcacctcggtttgcttctttatggtggagaacatcgggcattgccaccgccgctcctctccctcagtatcaacatagattcaagcattctgctttgtttacctccaacctgactattcctatacagagttgtgttaagcttccttacatgctgttagtggcaaatatcaaaatttggacaaacaatcaaactgtccaatgcattgtcatttatacacttgtgttgactcccgttttgactccaggaaaagtgtaatgttggttggagctcgagaaggaatctggatactgtgtgccggaccagccaaagaatcctgtgtcaaaaccgagagaacgaataagccttcatcaccatggcacatttatataaaaagaaagggagagatgttgcgggaagtcagggaccccgaatggagggactgactggagccgcggcagaggaacataaattgcaaatatttcattttaatatggacatttatcagttcccaaattattactttttacatttcttacgcctgtcttactttaatctcttaatcctgttatcttcataagctgaggatatatgtcacctcaggaccactgtgataattgtgttaactgtacaaattgattgtaaaacatgtgtgtttgcacaatatgaaatcagtgcaccttgaagaagaacagaataacagtgatttttaggcaacaataggcgacaaccataaggtctgactgcgtgcagggtcaggcaaaatagagccatatttttcttcttgcagggagcctataaatggacatggaagtagggaagatattgctaaattcttttcctagcaaggaatattactattaatactctgggaaaggaatgcattcctggggggaggtctataaacggccactctgggaatgtctgtcctatgcagttgagacaaggactgaagtacaccctggtctcctgcagtaccctcaggcttactagggtggggaaaaacctggccctggcaaatctgtggtcagactggttctctgctcttgaaccctgtgttctgttgtttaagatgtttatcaagacaatacgtgcactgctgaacatagacccttatcaggagttctacttttgcccttgtcctgtttcctcagaagcatgtgatctctgttctgctttttgccccttaaagcatgtgatctttgtacctaccccccgttcgtacaccccctccccttttgcaatccttaataaaaacttgctggttttgaggctcgggccggcatcacggtcctactgatatgtgatgtcacccctggcggcccagctgtaaaattcctctctttgtactctttctctttatttctcagccagctgacacttatggaaaatagaacctatgttgaaatactgggggcagtttccccgatagccttgctgaggaaattaaatttatgttcaagtgctatttctttatggaaccaaggaacaagtatttcaaacaatactaatgtaacagtactggttctatgtgtttcaaaattattattctcatgagtgttagctttcttaaaaaatcgtttttatcaattggatctagacatcttatctttcacagctcaagacccattaactcaaaatcataaactcttaatgcataatgagaaatataatgattcctagggccaggcacttgtgtctgtgctggtgctattgcctcaatgcaggaaaatctatgtgagaattcactgtgaggccaaaactgcttcctaaacatggatacctgccaggtatctgagctgggagtactgcccaggtctggatgggtggggagtgtttgcaacaaggactgtgccttgccagcctcagtgacacagtgtccaagtgccccaacttagcagccacctgctgaccacctgatttctgtggcctaatagggatgtgatgaagtctacctgtttactcaaccccaaaccacacattatccaggtggtttgaaacttttttgatatactgggttcatcctctggagtcctaacaatgttttagctaatttacaaaaaaacaaaaacaaaaac

SEQ ID NO: 958 - DNA, 1714 bp, Homo sapiens
agtttcggccgagggtgggctccgcggtcgccggtttctcttcccagctctgccctcgcttgctggccggtctccggggtcagcgcggggccaccatccagccccttggggcccgccccaagcagctgtcgaggacgcactcagcctgcgcagccatggcctcggcaggggcggagaggcggccgggggtccaggaggcgacggtcgtggggcagggacagctcacggaggagcccggcagcgctcagacctccgagtgtccagtggcgggagaccagttcctggtgcctgcccatgaggcccgcggaacccggagtgaagaccagcgcccagcaggcgcagcttcggagtcggagctccaggaggaaggacccaagctgggggaggagcggcccaagccgcatgccggggcgctagaggagagaggccccaggcccgtggtctccattgtgaggccccgtcatggtccaaagagaaagcctgtcaagtgagggggctctcggggggaaggagctgcagccccggggttggggcacacaccacagtaggattcctaaatcctgcactcctgcagggaggattctcgtccccagccactaccatcactctcctcccgttcctcaagagcccccgtgtagggagcagcaggagagtgggagcttcagggcttgtaggggcctgggctcactggcctctaagcctcttgggcctggggtctcattgaccaggaacgggacaggcgtcgagccctggggctgtgggcaggctgggctattccctgggccagggaatgggagccagggctggagcctggctcaagtctcttgtccctggctcaggtctctcagcctcccgggccttcgtgcccatcttaaggctgaagctgagctgccacccaagctgccgctgcaggaggaggagccagaggacagccagagtgagccctcaccatctgccaaacagcacaaaaaagccaagaagcgcaagagcctgggggctcccgtgctccacgctgtggccagcatggtgtctgcacccttagagacattgaggctggagcgtgagtggcagtccctggactgttccttctccccctgcctgtggggcccgacatggcacaacctggcgctctagcctctgccctgccctgggtctttgcaggaaaggcccagcgcctgcggccgctgtaccagtacgtcaactattgcaaccctgagctgaaccaggcagggaagggggacggggaggctgaggtggaggcagaggcagagctggccccggttcccgaggagggaggtgtggagcaactgcaggccttgctgcccttggcaggtgagctgggcccaggcctcgctttgccctgtcccagtccactagtgacccccacccatgccctggctcccctcggagaggaggctggagaggagcctgggggcttgcccagcttgggggtgagtgaccacaaggccgaggtggataagtcaacccaggtggacatcgacaagatgctgagtgtctgcactgctccacttgtccccccgctctctcctcagtacaagtgactgtcccgccccactggtggctcccctccttccacgcctgaatttggcttcaggcttcctgtgggcctaggccctctggtggcgggggcaaatttggcacctgcccccacttgggactttggtcttgctgaaaataaatatttttctttttc

SEQ ID NO: 959 - DNA, 2084 bp, Homo sapiens
ccttttgccgagtctttgtctggccccagccccgcggggccccgggtccctgtgccctcgggggtccctagaaggcgacaatggctcgagtccaggcgccgaggctggcgagcgcctgcttggcgcacagctgcccgttgagcggcggcggctgctccgaggagtccggctgtcggctcaccagccccgagaagccggagccaaagatggagatcaagtttgagatgttggacgcgtccggggacgagtccgggcagaagtcctcgaagcgggcgcgcttgcagggggcgaacggggcgcccccggggggctcggcccccagcccgcccgcatcctcctcgtcgtcttcctcctcctcctggccagggagccggctcaggtgtctctccctccaggaagtggggcttgtgccctttggatacctgcactccccatcaccgcactccccatcgtggcacttcccttgttgcagttttatggagtgtgcgtctggctctccaactagacttgaaccgcttgagtgcataactcgggacttgaccatttgcgtctccctacggccagctcagcctccgcacacagggacctgcagagagtggatgtagccactgccccagcgtccctgggctctgaagagaagccattgcccttcaagagccaccctcatttcctgggcactggttggaaaaaacgaagaaaaagagacacccagctcacctccaagtttgcctgcaggtgaatatcttgttgaaagagaggggactccctgagtcttgctgggttgaggaagctgattggatttccggactcagaggagggctgcagagagggaggaatgggggggatgggcagctggctttctggatgggtgcaggacaatgacattgatggggaagcttggggtggctctgccgttgcccactgcttggctggtgaacttgctacatcttggccagcactatcctcttctggcctgcaccctgccagacacaggcagtaccccaaataccctgtccctgtgccccgaagtctccatgaccttcagatcccaagggacaagtggctccacgaggcagggcctgtccctctggctcacactatggagtccacagaacctagcccggagcctagtgcacagtaggtgctcaatgtattctatttgaatgttgcatgagtgaataaatgcaggaatgtcaggctggaaaacaggtatttgtacacctgttttcatagcagtgttattcacagtagtcaaagggtggaagcatcccacgtgtctgctgatgggtgaacgagtaaacagaatgtgccccagccatacaatggaatgcgattcagccttttttttttttgagacggagtctggctctgtcacccaggctggagtgcagtggcacgacctcagcttgctgcaacctctgtctcccgggttcaagtgattctcctgcttcagcctcctgagtagctgggattacaggcatgtaccaccacacctggctaatttttatatttttagcagagacagggtttcaccatgttggccaggggctggtgtcgaactcctgacctcaagtgatcctccctcttcggcctctcaaagtgctgggattacaggcgtgagccacggcgcccggccacgattcacccttaaaaaaggaaggacattctgacacatgctacgacttgggtgaaccttgagtacctgagtgaaataagcccatcaaaaaaggacaaatattagccaggtgctgtggctaatgcctgtaatctcagcactttgggaggccaaggagggaggattgcttgaggattgctcaataccagcctgggccacaaagcaagaccacccatgtgaggtgtttagagtagtcaaattcatagagacagtaggatggggagtgccaggagctggggagaagggggaatggggagttagagtttaatggggacagattttcagttttacaagatgaaaaatgttctggagatgatggtggtgatagaggcacaatgtggatatgcttcatgccactgaactggacctaaccatttatgttttgtgtattttatcacaataaaaaatg

SEQ ID NO: 960 - DNA, 2139 bp, Homo sapiens
ctcttctctggccggcgtcgaaacgaagtggaccttgttcctaagtggcgttttttattttttattttaggaacaacgcaaaaatatattcttccgcaacattaaacaattcagcaattgacgtccaagtcgtgggagacctgagtggggggaaccaacaataacctggaacaatgaagtggggttgggtgtttctgggggccctgctctctttggggaacatgtcctggggagagaagggtctggagatccctgaatatgatgggaaagaccgcgtccatgatctcaatgctaagaactacaagtctgtgatgaagaagtacgatgtcatggtgatctactaccatgcacatgtggagagcaacaaaaacgcccagaaagcattcgagatggaggagctcgccctggagcttgcagcccaggttctggatgatctcgacgacgaagacattggattcggccttgtggatgagaagaaggacctctctgtcgccaagaagctgggtctggatgaggtggagagcatctatatctttgtcgataatgagataattgagtacgatggcgagctggccgctgacaccctggtggagtttctctatgatgtgattgaggaccctgtggagatcattgataatgagcgtgagctcaagggcttccacaacatcgatgaggacatcaagctggtcggctacttcaagagtgagaaatccccccacttcattgagtatgacgatgctgccgaggagttccaccccttcatcaagttcttcgccacctttgacgccaagattgccaagaagctaaagatgaaactgaacgaggttgacttctatgaacccttcatggaggagccagtgaccatcccaggacagccctactctgaggctgagcttgtagactacatcgaggagcacgacaggcccactctgaggaagcttgagccccacagcatgtacgagacctgggaggatgacatagatggagagcacattgttgcctttgctgaggaggatgaccctgatggttatgagttcctggagatcctaaaggaggtggcccgtgagaacactgacaacgctgacctcagcatcatctggattgaccccgacgatttccccttgcttgtgccctactgggagaagacattcggcattgaccttggttctcctcagatcggtgtcgtggatgtagaagatgctgatagtgtgtggatggagatggatgatgatgaggacatgcccactgctgatgagcttgaggactggatcgaggacgtgctgtctggaaagatcgacccagacgatgatgatgacgatgatgacgatgatgacgacgatgacgatgatgatgacgatgatgatgacgacgacgatgatgacgacgatgacgacgacgatgatgacgatgatgatgacgacgatgatgatgacgacgatgatgatgacgatgatgatgacgatgatgacgacgacgaataaatgatcgcttgccatccttgggtttactcggctttaaccaacagtggccaaaagccggcaccaatatttagtttcctaacatctcgtcgttaacacatgctgtgtctcttcctgtttgctttctgtatctctttctcaaatccctggtcagatagtcaagtgacacacccaaagggcaacacctaaatcaatttcactgggtaagaaaagacacgaaagcagggggaagtttttgtctgtgaaaaaaagaatgggttgtggttgaattgtaagttctgtgttctttgttgtatgaaatgtttgtctctcggggttataactgtctgtgtgtatgtgagaactaagctgaggaaaactagcatgtttgaccttgttttgtttatctcgtttagcactagtcagggatgccccctttccccttcctcctttatcccatttttctgtattctggaaccactacatgttttctactggtaaagagaagcaacaaccaacttattgtaccattttttaaagaaaaggaaacttaacctctctgaaacgtcttaagaataacatagtttgagaaagtgataaagatcttggaattcacaaaaaatgcaaaatcatttgattgtttctggtccgatattggaaaaaaagaaaatatttaaaaatc

SEQ ID NO: 961 - DNA, 1709 bp, Homo sapiens
ctggcttccccaagtggagtgaaactcaggagctgagaaaccgagtcactgtgaaaagatgggaaattatctcctgcgaaaactcagttgcctgggagagaatcaaaagaagcccaagaaaggaaacccagatgaggaaagaaaacggcaggaaatgactacatttgaaagaaaacttcaagatcgagataagaaaagccaagaagtttcatccacttctaatcaggaaaacgagaatggcagtggttctgaagaagtgtgctacactgtcattaatcacatcccccatcagagatcctccctgagctccaatgatgatggctatgagaacattgactccctcacaaggaaagtgagacagtttagagaaaggtcagagacagaatatgcccttcttaggacttctgttagtaggccttgttcctgcacccatgagcatgattatgaagttgtgtttccacactaaaatcctcaagctgctttatcaccttccagcaatgaagacaatgcagaatagcagactctggcgaagttgttcaccctgagcagtgcatgaaacattcctttctggctaaagtttagaaatattatcttattatatatccttaggcaactctgatatgtggcatctctgtggcttaggtgaaatcatagaaattgacacaatgacctaaaatattctatgtgtttttgcttgtaaagtttgaggacatggaggtgataaaaaaaactttcttaggacaataatgtaaaatgaaaataaatttctaatccccctgactaactgaatggaccctcttctaggccaaagagacctcagatgaacctgaaagactgaattctggccatgataggaagggaggtgagacacaccttgttataccccttcccttttggagtttatgcacaagtgaccaggatgagtcataagactgatgaaatagactgattgtggcaataagagtcccaattccaacctgactctggtgtagatcacacactgtctgagggattccatctatgagactttgtctacataacagagaccttggtttccacaacccctttattttagctaaagcattcttttctactgacttcttaagtctttagacaaagcttaactctttcaaccaattgccaatcagacaaactttgaatctacctatgacctgtaagctctctcctgcttcaagatcttgcctctttaagctgaaccgatgtgcactttccatttaatgatttatgtctttgcttgtaactcctgtctccctaaaatgtataaaagtaaacggtgacctgaccacctcaggcacactttctcaggacctcctgagagtgtatcccaggccatggtaagtcatgttggctcagaatcaacctctttaaatattttacagaatttgggttttggttaccaataagtctccacaaatatatgtccaagaatcttcaattccaagcctgctcaccaaatttcaaatgccaacatctccccatccaattacctatttcatctttgaggtgtaatctactcaataaactgtgtaagaccagtgaccagaccctttgctaacctgacatttacttcaatttttctttttctatgtactggatatttttgcatataaacttgcagtaatagttcaaaaattaatagtttttgacattggcttttctgagaagagaaattgaaagtgtcacaaaat

SEQ ID NO: 962 - DNA, 1762 bp, Homo sapiens
agacgcaaaagacactctttctgtatggcttctgtaaaaaaccgacgagttgtggctgataatggttgtttgccacaaactcatccacaacagctgtgccggcacagttcaacatggcccctggctcttggtatgcagttattatctagtgaaagcattcgctttatttttttttttttgagacagagtctcgttctgtcacccaggctggagtgcagtggcgtaatgttggctcactgcaacctctgcctcccgggttcaagcgattctcccacctcagcctcccgagtggcttggactacaggcacccgccactatgctcagctaattgtatctttagtagagacagtgtttcgccattttggccagactggtctcgaactcctgacctgaggtgatcgaccgcctcaggcttccaaggtgctgggattacaggcgtaagccaccgtgcctgacccccaaatccaaattttctaaaagctaaaccagtaggaatagttttctccatctgtaagtattcaataaccaacacatcatttgttataataatagtcctgaggcattacaagatgttataagtttattctgaatctcattcaattgtgttcaatgtggctcaattctttacaaattaaaattcttgaatatatgttaaaaattaaacaatcttaatgtttcttccttaactagactggatacacgtctgtttaactacgcaaaaggtaatgctggcatggcttactgggaccctaagtgtggcgaagggactctgctccagtgaactggcgagtgtggaacctcctgacaccttctgaggacctcctgcctgccatgttgctgtggagctcgcactcctcaggcatcccctgatgttgagtgatacaaactctatcaccggaatcgatgctgctgcaatgacaagacttctttctggttttcagattctaaagtttaaaacaacgacaacaacaggagcgcttgaaagttacggtgcttctccctctccagtgtggactcgctgatgtttggaaagattggacttgctacagaaggtctttccacagtgacgacaccagtagggcttttccccggtgtggattctgtggtgtttattgaggttggagctgtggttgaaggctttcccacactccttacacttatgtggcttctctccggtgtggagtctctggtgggagctgaggcccgcatgctgactgaggctcttcccacattcgttacactgatgaggcttctccccagtgtggatccgatagtgacgaatgaggctgcctttcccgctgaaagccttgccacaatctttgcactgatatggcgcctcttctgtgtgcattctctgatgtttaagaaggtctgagctctgcccaaaagcttttccacacttacagtcatagggccggtccaccaagtgtgttctgtagtggagggtgaggtttgagctgtggctgaaagctttcccacacttggtgcacacgtaaggtttctccccagtgtgtgttctcctgtgtttggtgagatttgagctattactaaaggctttgccacattcagcacatatataacgtctctctcctggggtaggtttagtaggaactgattctctacctttcttggagcctgcctcttgaagagggggttttgttcctttttcattttcaaggtttacgcactgcctctctaagctggcctcaggtttattggcgataatcacagaaattatatcccctttgagcccctctgcttc

SEQ ID NO: 963 - DNA, 1615 bp, Homo sapiens
aactagattcctcctctatagcagcccctgggagcacagctcttcaccatggactggacctggaggttcctctttgtggtggcagcagctgcaggtgtccagtccctcctccagttggtgcagtctggggctgaggtgaagaagcctgggtcttcggtgacagtctcctgcgaggcctctggagacagctccccgacatatactataagttgggtgcgacaggcccctggacagggcctcgagtggatgggagacatcacccctgtctttggaacaaaagagatgtcacagaagtttcaggacagagtctcgatcaccgcggacagcgtctcggtcaccgcggacacaagacgtacagtctacttggaggtcaggaggctaacatctgacgactcggccgtctattattgtgcaaagtcagagactgaccattcattctactactacatagaactctggggacaaggtaccacggtcaccgtctcctcagcctccaccaagggcccatcggtcttccccctggcaccctcctccaagagcacctctgggggcacagcggccctgggctgcctggtcaaggactacttccccgaaccggtgacggtgtcgtggaactcaggcgccctgaccagcggcgtgcacactttcccggctgtcctacagtcctcaggactctactccctcagcagcgtggtgaccgtgccctccagcagcttgggcacccagacctacatctgcaacgtgaatcacaagcccagcaacaccaaggtggacaagaaagttgagcccaaatcttgtgacaaaactcacacatgcccaccgtgcccagcacctgaactcctggggggaccgtcagtcttcctcttccccccaaaacccaaggacaccctcatgatctcccggacccctgaggtcacatgcgtggtggtggacgtgagccacgaagaccctgaggtcaagttcaactggtacgtggacggcgtggaggtgcataatgccaagacaaagccgcgggaggagcagtacaacagcacgtaccgtgtggtcagcgtcctcaccgtcctgcaccaggactggctgaatggcaaggagtacaagtgcaaggtctccaacaaagccctcccagcccccatcgagaaaaccatctccaaagccaaagggcagccccgagaaccacaggtgtataccctgcccccatcccgggatgagctgaccaagaaccaggtcagcctgacctgcctggtcaaaggcttctatcccagcgacatcgccgtggagtgggagagcaatgggcagccggagaacaactacaagaccacgcctcccgtgctggactccgacggctccttcttcctctacagcaagctcaccgtggacaagagcaggtggcagcaggggaacgtcttctcatgctccgtgatgcatgaggctctgcacaaccactacacgcagaagagcctctccctgtctccgggtaaatgagtgcgacggccggcaagcccccgctccccaggctctcggggtcgcgcgaggatgcttggcacgtaccccgtgtacatacttcccgggcgcccagcatggaaataaagcacccagcgctgccctgggcccctgc

SEQ ID NO: 964 - DNA, 1802 bp, Homo sapiens
tttgggggagagacatcatcaaagtaggtttgtgcgtgtgtgcatgtgtgcgggtgtacatgtgttcaccttcccacccgctgaaacttcagatgcagtgaagccttctcacataaaacaatataccttaactgggcatattgctctgtgggattcaaaagtattttgtaaattctggtcacttgagggcttcttggaatcaggtttttgtctagtctgtgagcacttctgccagttcctgaaacatgggctgccgtgcctgcttcccaggtgccgagctgtttccttcaaccatggtcaccctttgtctcaccatctgaaaggacacacatttcatgtggagtgtggtcgcttggagtctctcaaaaacactcttttttttcccataactttatgtagtttcttaggtaacatgtgctctatttttgtaagccactctgagttcttttgggctgtgtgtaggtgggcatggactaattttagggcgtgatgtggaaatagtattcgtattactgtttaatatgttctcctttcttttattaggcaagaaaaagtcatatttcccacgttgttcatggggcagtaaacggctttgaccccgctcctcctcctcctggtctgggctcctcgcgtccatcgtcagcgccgggtatgctgcctctcagtgtgtgagtgcctagcctccaggtgggggctcctgccctcctccaacaacccaggacacccacgcctcacccctcggtgcctgggcccagccccgtgcccctccgtctgcctccgcacggctggcagagggcaggctgcatgcagtggcggctactgggccctgcccagccccggaactctgcgcgatatcaatactggctattttctcttctcgccgtagtgccgttggtttcacatgattgcacttttgtgggtcgcaaggtgatacatacgtgtattacttggtcactggatgcagaagtacccattcatcacacctgccccatagcccccactctgctgtactgataggatttagttgtgttttaggacattgcaaatcttctagaagttctcccccaaatcaggtcaatgtgtgccctcctgagctcccacccaggcatctccagtgctcatgatcatgtgtcccccaactccacccctcacagtttgggcctgtttctggcaaagagtcaggaaggttactgaattagggaacattttctgcaccttctgattttacttaagcagctaccattccatggacttgcctcccagagcagcacaatgcccgtctgagccccacgtggcaggagcctctgggacggggcacacacaggcccagcctctgtgctgtctcctcctctgtgcgcctcagactcggggtgagggaggcgggcagcctctcgccagccttcccgtccttcagttcaacgacatctttggagtgtttttgttttctcttccaagggccgtcccgttgtgttaggaagggtgagtggctggttccagggtgggccggtgccagctccggggtggactgaacagcggcggctgtccctgtgcatcctttgattactctcatgctgcatttactgtttacatttgttttattgtacataggtttgtaaacattattgcctgagatatttgtatataacttgggctttgtagcttttatttattcagaacgcatacggcatgttaatgactctgatggtgtcctcctctgggcagctgtataggatcatcatgtggttacaaaaaatacttccctcaaaaaaattcttttaatgtggaaacaataaatttcacag

SEQ ID NO: 965 - DNA, 2105 bp, Homo sapiens
tgggtgttgtgttgtgtgtccatgcatggtgactctgtgtctgggcgtgcgtgtttgtgtgtcgtattcaggcgtggtgttgtgcatccggtgctgtcttctggtctgtggcctctatgcaccaggcgtggatgtgtctgtgtctgtgtctctgtgccttcttgtgtgcatcatgtcttgtgtgtccaggcgggagggtgggagctgtgtgttgttttttccccggtgtgtgtgtggagagacctggacgcgcctgcgtccctggctgccctgtgcctctgtacgcgctgccagcttgcacacccgtgcacacctgcccactgatctgctgacccctccccacagggcaccttcagccgctgctacaagctgacagacatgtccaccagcgccgtgttcgccctcaaggtggtgccgtgtggcagggctggggtcgggtggcttcgcccgcagggaaaggtggagcgtgagattgccctgcatagccgcctgcgaccccgcaacatcgtggctttccacggacactttgctgaccgcgaccacgtgtacatggtgctggagtactgcagccgccagtctttggcccacgtgctgagggcgcggcagatcctgacggagccagaagtgcgctactacctgcggggcctggtcagcggcctgcgctacctgcaccagcggtgcatcctgcaccgcgacctgaagctcagtaacttcttccttaacaagaacatggaggtgaagattggagacctgggactggcggccaaggtggggccagggggccgctgccacagagtactctgtgggacccctaacttcctggcccctgaggttgtctccagaaacggtcactcctgccagtaggacatctgggctctgggctgcatcatgtacacggtgctgactggcaccccacccttcatggcctcacccctgtcggagatgtaccaaaacatccgtgagggccactaccccgaacccgctcacctgtctgccaatgcgcgccgcctcatcgtgcacctcctagcacccaacccggccgagcggcccagcctggaccacctgctgcaggacgacttcttcacacagggtttcactccagaccggctgccggcccactcctgccacagtccccccatcttcgccatacccccgcctctgggcaggatcttccggaaggtgggccagcggctgctcacccagtgccggccaccctgccccttcacgcctaaagaggcctcgggtccaggagaaggtgggccagaccctgactccatggagtgggacggcgagagctccctgtctgcgaaagaggttccctgcctggaaggccccatccacctggtcgcacaagggatcctgcagagtgacctggccgggcccgaggggagccggcggccagaggtggaggcggccctcagacacctgcagctgtgcctggatgtaggccccccggccacacaggaccccctgggagagcagcagcccatcctctgggcccccaaatgggtggattattccagcaaatacggctttggctaccagctcttggacggggggcgcacgggacggcacccacatggccctgtgaccccccggagggaggggaccctccccacacctgtgccacctgctggacccggcctctgcctcctgcgcttcctggcctctgagcacgccctgctgctgctgttcagcaatgggatggtgcaggtgagcttcagtggagtcccggcccaactggtgctgagtggcgagggtgagggtttgcagctcaccctctgggagcaggggtcccctggcacctcctactccctggacgtcccgcagagccacggctgcgcccccaccaccggacagcaccttcaccacgccctccgcatgctgcagagtatctagtgcccctgagggtcagagtggacccctgcatggtagtgccagggacccaggctccatttccattcctgtggctcccccagaggggctgtcctgggggagagctggggggcacacgggaggtgggttcttgccttgtggcatgactgttcaacccagactttgctgggatctcttcctttttcattaaagacaatttgaaatgctgt

SEQ ID NO: 966 - DNA, 1985 bp, Homo sapiens
tttattttgagacccagtctggagtgcagtggcgttatctcggctctctgcaacctctgcctcctgggttcaagcgattctcctgcctcagcctcccgagtagctgggactatgtgtgggagccaccatgcctggctaatttttttgtatttttcatagagacgggtttcaccatgttgtccaggctggtcttgaattcgtggcctcaagtgatccgcccacctcagcctcccacagtgctgggtttataggtgtgagccaccacacccggctaattgttttgtatttttagtagagacggagcttcactatgttggcaaggctggctcgaactcctgacctcaagtgatccgcccacctcagcctcccaaagtgctgggattacaggcgtgagccaccgcggccgagcagaacacgttctaggacccttgttcatgtgtccatcatggacaggaggacgtgcgggccatagggaccctggctcattccggagccgggactggagggtggggcgtcacccttgggaacacccgtgcccaccctccgctgcccagggtaggggtggggagccaggctttgggccccacttgataaagtcccctccccagactccacaggcaaatactggacggtgggcagtgactccgcggtcaccagcagcggcgacactcctgtggacttcttcttcgagttctgcgactataacaaggtggccatcaaggtgggcgggcgctacctgaagggcgaccacgcaggcgtcctgaaggcctcggcggaaaccgtggaccccgcctcgctctgggagtactagggccggcccgtccttccccgcccctgcccacatggcggctcctgccaactctccctgctaaccccttctccgccaggtgggctccagggcgggaggcaagcccccttgcctttcaaactggaaaccccagagaaaacggtgcccccacctgtcgcccctatggactccccactctcccctccgcccgggttccctactcccctcgggtcagcggctgcggcctggccctgggagggatttcagatgcccctgccctcttgtctgccacggggcgagtctggcacctctttcttctgacctcagacggctctgagccttatttctctggaagcggctaagggacggttgggggctgggagccctgggcgtgtagtgtaactggaatcttttgcctctcccagccacctcctcccagccccccaggagagctgggcacatgtcccaagcctgtcagtggccctccctggtgcactgtccccgaaacccctgcttgggaagggaagctgtcgggtgggctaggactgacccttgtggtgtttttttgggtggtggctggaaacagcccctctcccacgtggcagaggctcagcctggctcccttccctggagcggcagggcgtgacggccacagggtctgcccgctgcacgttctgccaaggtggtggtggcgggcgggtaggggtgtgggggccgtcttcctcctgtctctttcctttcaccctagcctgactggaagcagaaaatgaccaaatcagtattttttttaatgaaatattattgctggaggcgtcccaggcaagcctggctgtagtagcgagtgatctggcggggggcgtctcagcaccctccccagggggtgcatctcagccccctctttccgtccttcccgtccagccccagccctgggcctgggctgccgacacctgggccagagcccctgctgtgattggtgctccctgggcctcccgggtggatgaagccaggcgtcgccccctccgggagccctggggtgagccgccggggcccccctgctgccagcctcccccgtccccaacatgcatctcactctgggtgtcttggtcttttattttttgtaagtgtcatttgtataactctaaacgcccatgatagtagcttcaaactggaaatagcgaaataaaataactcagtctgc

SEQ ID NO: 967 - DNA, 2104 bp, Homo sapiens
gatgggaatgtggagcagaccctcgtccactccggaggccgagggtcctccgggcttccgaaggaagccgacctcaacgctggacgcttcttggagaatgattgcgttgagtggagatgtggtctgtctataaaaggccgggagggaacaatatctgttaccactcagtccgtctctaaagagacactctttaccgctgaaaacctcaagagtgagcactcccacgcccccgtctctggtcctacctgggtccaaggccgatgtgaagtggacaagtccagtaaggcaggcatcatgccacagcagctcctgatcaccctgcctaccgaggccagcacctgggtgaagctgcaacatccaaagaaggccgtggagggggcgcccctgtgggaggatgtgactaaaatgtttgaaggagaagctctgctgtctcaggatgctgaggacgtaaagacccagagagaaagtttagaggatgaagtgacccctggactcccgacagcagaatcccaggaattgttgactttcaaggacatatctattgacttcacccaggaagagtgggggcagctggctcctgctcaccagaatctataccgagaggtgatgctggagaactacagcaacttggtgtcagtgggatatcaactttccaaacctagtgtgatatcccagttagagaaaggagaagagccatggatggcagagaaagaaggcccaggagatcccagttcagacttgaagagtaaaatagaaaccattgagtcaactgcaaagagtaccatttcacaggagcgcttatatcatggcattatgatggaaagtttcatgagggatgatataatttattccacgttgagaaaagtctccacatatgatgatgtcttagaaaggcaccaggaaacttgtatgagagatgtgagacaagccatcttgacccataagaagagagtccaagaaactaacaaatttggggaaaatatcattgtgcattcaaatgttattattgaacagaggcaccataaatatgatacacctacaaagcggaacacatacaaattagatctgattaatcatccaacaagttacataagaacaaaaacctatgaatgtaatatatgtgaaaaaatcttcaaacaacctattcaccttactgaacatatgagaattcatactggtgagaaacctttcagatgtaaggaatgtggaagggcctttagtcaaagtgcatccctcagtacacaccagagaatccatactggtgagaaaccctttgaatgtgaggaatgtgggaaagccttcagacatcgctcatcacttaatcagcatcatagaactcacactggggagaaaccctatgtatgtgataaatgtcagaaagctttcagccagaacattagcttggttcaacatttgaggactcattctggagagaaaccttttacttgcaatgaatgtgggaaaacctttagacagattagacaccttagtgaacatataagaattcataccggggagaagccctatgcatgcactgcatgttgtaaaacctttagtcatagagcgtatctaacacatcaccagagaatccatactggggagagaccctacaaatgtaaagaatgtggaaaagcctttaggcagaggatacaccttagcaaccataaaactgttcatacaggagtgaaagcatatgaatgcaaccgctgtggaaaagcctataggcatgattcatcctttaaaaaacatcagagacatcacactggagaaaaaccttacgaatgtaacgaatgtggaaaagccttcagctaaaactcttcacttagtcgacatcatgaaatacacaggaggaacgccttccgaaataaggtgtaaaaacagatatttgacttgagaacaaaagccaagtgtaaattggtgatttagagtgctttaaaatttcaggactcagatatgaggaattgatgtaatgatgccaacttttaatttttcccattgtaaataaacattacattgacaggtattgactactaacacctctaaaaagtacttaagattaaaatctggtccttaaaattaaatgaattcagcattatgaaaaatt

SEQ ID NO: 968 - DNA, 2431 bp, Homo sapiens
gtcctgaattggaaagtgagcggagtgtgacgggttcccatcttgaaccgtccggggttgagtagtacaataaactaacacggaactccagcttccaaaattctctccagtgcctacagagcctcgcggagagctgtgattgtgaatgtcaacgcagatttgattaaatctcttagatttaagagatatgtggagtcatgacaatagaaatgtgtacaagtgaacacatttcttagcccgtttccccactgcctgtgtgatttataaaaacgcaaatataaaatatttccgttccagcagagacgccgcttgctacggcgggttgcccgtctccacaggtatctccggctgactctagagctcaacttcccctttaaacttcaccctgcgcttgccgatttgcttcgggaatgcccgaggcaccggacgaagcagtcgggtctggccccagtcgactccagccaggcggggctccaagccgagactcctgcacgcccggcccgaagctagcccgacaccctcagctgagtcctccgccgtcccagcattccctgcgtccctaccatcgagagcagcttccggcgtggctggtgtaggcgggtggagaaggatcggggccctcgccgctctgtctcattccctcgcgctctctcgggcaacatggcgggtgtggaggaggtagcggcctccgggagccacctgaatggcgacctggatccagacgacagggaagaaggagctgcctctacggctgaggaagcagccaagaaaaaaagacgaaagaagaagaagagcaaagggccttctgcagcaggggaacaggaacctgataaagaatcaggagcctcagtggatgaagtagcaagacagttggaaagatcagcattggaagataaagaaagagatgaagatgatgaagatggagatggcgatggagatggagcaactggaaagaagaagaaaaagaagaagaagaagagaggaccaaaagttcaaacagaccctccctcagttccaatatgtgacctgtatcctaatggtgtatttcccaaaggacaagaatgcgaatacccacccacacaagatgggcgaacagctgcttggagaactacaagtgaagaaaagaaagcattagatcaggcaagtgaagagatttggaatgattttcgagaagctgcagaagcacatcgacaagttagaaaatacgtaatgagctggatcaagcctgggatgacaatgatagaaatctgtgaaaagttggaagactgttcacgcaagttaataaaagagaatggattaaatgcaggcctggcatttcctactggatgttctctcaataattgtgctgcccattatactcccaatgccggtgacacaacagtattacagtatgatgacatctgtaaaatagactttggaacacatataagtggtaggattattgactgtgcttttactgtcacttttaatcccaaatatgatacgttattaaaagctgtaaaagatgctactaacactggaataaagtgtgctggaattgatgttcgtctgtgtgatgttggtgaggccatccaagaagttatggagtcctatgaagttgaaatagatgggaagacatatcaaagaaggagaagtatatgcaattgaaacctttggtagtacaggaaaaggtgttgttcatgatgatatggaatgttcacattacatgaaaaattttgatgttggacatgtgccaataaggcttccaagaacaaaacacttgttaaatgtcatcaatgaaaactttggaacccttgccttctgccgcagatggctggatcgcttgggagaaagtaaatacttgatggctctgaagaatctgtgtgacttgggcattgtagatccatatccaccattatgtgacattaaaggatcatatacagcgcaatttgaacataccatcctgttgcgtccaacatgtaaagaagttgtcagcagaggagatgactattaaacttagtccaaagccacctcaacacctttattttctgagctttgttggaaaacatgataccagaattaatttgccacatgttgtctgttttaacagtggacccatgtaatacttttatccatgtttaaaaaagaaggaatttggacaaaggcaaactgtctaatgtaattaaccaacgaaaaagctttccggacttttaaatgctaactgtttttccccttcctgtctaggaaaatgctataaagctcaaattagttaggaatgacttatacgttttgttttgaatacctaagagatactttttggatatttatattgccatattcttacttgaatgctttgaatgactacatccagttctgcacctataccctctggtgttgctttttaaccttcctggaatccattttctaaaaaataaagacattttcagatctg

SEQ ID NO: 969 - DNA, 2640 bp, Homo sapiens
attacagcttgtgaggccaggagtttgagaccatcctgggcaacatgatgagacaccgtctctaaaataaaattagctgggtgtggtggtgcaccgcctgtggtcccagctcctcagaggttgagtagaggctgaggtgagcggagcacttgagccaggagtatgaggctgcagtgagcccatgagccccaccactacactccagcctggaagacaccatgacacacaggcctggatggggaaagagtcctgctgttgatcctcacatgtttcctgggcacctaactctgtcagccactgccagggaccaaggatccagcatccatggcacccctggttcctgccatcctggggtacccgattcaaagaaggactctgctccctgtctgagaccacccccggctctgactgagagtaaggggactgtcagggcctcgacttgccattggttggggtcgtacggggctgggagccctgcgttttgaggcagaccactgcccttccgacctcagtcctgtctgctccagtcttgcccagctcgaaggagagcagatctgaccacttgccagcccctgtctgctgtgaattaccatttcctttgtccttcccttagttgggtctattagctcagattgagaggtgttgccttaaaactgagttgggtgacttggtacctgctcaggaccccccgcactgtcccaatcccactcaggcccacctccagctggcctcactccgctggtgacttcgtacctgctcaggagcccccactgtcccagtcccactcaggcccatctctggctggcctcactgcgctgggactccgccttcataaggagagctcactgctcacgttagtagatggccccttctcgtgaggcctctcccctggcacctgcttcagttgtcctccacagcactgatttgcagcccacaagctggcaggtttatctgtctcatgtttgtcttgtgctggtgggcaaggggtttgtctagcacaccagcatataatgagatgcttgatgaatggtgcatgttgaatgtataaagcccaccggtcctgagagtttgctcactggagactttctggagatggagtctcgctctgttgcccaggctggcgagtgcaatggcgcgatcttggctcactgcaacctccacctcctgggttcaagcgattctcctgcctcagcctcccgagtagctgggattacaggtgggtgtcaccacacccagctcagtattgtatttttagcagagatggggtttcaccattttgcccaggctggtttggaactcctgacttcaaattacccacctgcctcagcctcccaaagtgctggcattacaggcgctcgaggctttctgatgtggctgctgctgctcagaaggccttgtccttaaccacctccttgcctgccctggaggcttgtgcctctaggccccaccccctgtggagtcctgctggctttctccatccctatctgaatcctccctgctgtgtggcctcccctggtctcatccgtaacacagcccagcttagtgggcctctgttcctgcgggtggccagcctgtctgtgtggctgggctggggaggccacgtctggtatctgaatgctatcggtgggttggggtggaggaaccagaagagggctggagggagggagatggtctcagccccacagagtttggagtcctcagtgtgctgagcaaacgtggagacaccatttccctcctctagacctcatcttggagagagagatgttggatggggccatctattccagctttattcacacaaatcatgtctgttggcctggaaattggagaaccagttaaaccaaaaacatgatattaagaaaacaggcaggctcaccatagtaaaaatgctgaaagccaaagacaaaattgggagaacaaaagaaaagcgtcttgtcacatacagaaggtccctgataaagttagtagctgccctcatcagaaaccaggcccaggcagtggggacacatccagagtgctgaaagaacctcccccaggtcatcctatccccaagagtgatgcccggcagcattcccagctcagggctaatggttcacggaagccaggaatcaaactgcctgggttccagtcccagctctgccagttatgcccagctgtggggacttgggcagctcgtttagtagcaccgtgcctcagtttcccatatgtaaaaggccattttgagtgcctttcacagccctgcataaggcaggtgtctcagtgttcactgctgtctctccagctcttagtccagtagctgcatggtgagtgagcgtagggcgcaccctggaaggctgccaagcccaaagttgtgcagagcgctggggactccagactccccacagcagcagagactcgggactgaggcatcctctgttcacaggacatgctggcatctactgggtcagggctctgctgctcggtggctgtgcaaccttgggcaagttcctcaacctctctgtgtcttcgtaccctcatctgtaacatgcgtgtcgatagaccctactactcagggttgatgagaagattaaatgtgcaaaacctgcttgactgtgcccacaaatcctgattgtaggaataaattaatgactttttataaat

SEQ ID NO: 970 - DNA, 1986 bp, Homo sapiens
aagttcggcggggaagatggcggatgacaaggattctctgcctaagcttaaggacctggcatttctcaagaaccagctggaaagcctgcagcggcgtgtagaagacgaagtcaacagtggagtgggccaggatggctcgctgttgtcctccccgttcctcaagggattcctggctggctatgtggtggccaaactgagggcatcagcagtattgggctttgctgtgggcacctgcactggcatctatgcggctcaggcatatgctgtgcccaacgtggagaagacattaagggactatttgcagttgctacgcaaggggcccgactagctctaggtgccatggaagaggcaggatgagcagctcagccttcaggtggagacactttatctggattccccagctgtcatccatttgctatctccaactttcctgccaccttcatccttgcctcccttcctgcagattgtggacagtagttcctcagcctgcaccctggattccttcttccccttcctagctccatgggactcgccccaagactgtggcttcaaggaccaccagccccttactcttcaagccctaactgtggagttggtagatgcctctgatcctcagtattctctctggcaatgttccacggcttctccttcctgggagctggctccataacttgattttccccaaacgtgttgcaatccctgctgcccctggcacttcagaacctcttcctctacacttttggtgtgcttctgaatctaggtctgcatgctggcggcggctctggcccaggcctcctggaaggtttctcaggatgggcagcactcgtggtgctgagccaggcactaaatggactgctcatgtctgctgtcatgaagcatggcagcagcatcacacgcctctttgtggtgtcctgctcgctggtggtcaacgccgtgctctcagcagtcctgctacggctgcagctcacagccgccttcttcctggccacattgctcattggcctggccatgcgcctgtactatggcagccgctagtccctgacaacttccaccctgattccggaccctgtagattgggcgccaacaccagatccccctcccaggccttcctccctctcccatcagcagccctgtaacaagtgccttgtgagaaaagctggagaagtgagggcagccaggttattctctggaggttggtggatgaaggggtacccctaggagatgtgaagtgtgggtttggttaaggaaatgcttaccatcccctacccccaaccaagttcttccagactaaagaattaaggtaacatcaatacctaggcctgagaaataaccccatccttgttgggcagctccctgctttgtcctgcatgaacagagttgatgaaagtggggtgtgggcaacaagtggctttccttgcctactttagtcacccagcagagccactggagctggctagtccagcccagccatggtgcatgactcttccataagggatcctcacccttccactttcatgcaagaaggcccagttgccacagattatacaaccattacccaaaccactctgacagtctcctccagttccagcaatgcctagagacatgctccctgccctctccacagtgctgctccccacacctagcctttgttctggaaaccccagagagggctgggcttgactcatctcagggaatgtagcccctgggccctggcttaagccgacactcctgacctctctgttcaccctgagggctgtcttgaagcccgctacccactctgaggctcctaggaggtaccatgcttcccactctggggcctgcccctgcctagcagtctcccagctcccaacagcctggggaagctctgcacagagtgacctgagaccaggtacaggaaacctgtagctcaatcagtgtctctttaactgcataagcaataagatcttaataaagtcttctaggctgtagggtggttcctacaaccac

SEQ ID NO: 971 - DNA, 1613 bp, Homo sapiens
agatcggaggcggcccgcgccgggccccacattcagggcttgggggttcattcgccgcgccgcccgccgctgcttcaggccctccgcttcggctcggagccccgggacccctaacctccagggccctcaccttggacccgcctccctgcctcccacccgccgcctttacctgcttctggagcgggcagagggcgtcgaagccggtgccgcgtcgtcgaacgcacaacgcggcgccgcagaaagggtctcactcttttgcccaggctggggtgcactggcactatctcggctcactgcaacctctgcctttggaactcgaaggatcatcccacctcagcctcccaggcctgccagacacctgcgccctcctgcagccaccgccacagctgccagcatgtctggcccagacatcaagacgccgaccgccatccagatctgccggattatgcggacgctaatgtggcccgcaatgtctaggcgggaccatcctgaagatgatcaaagaggcgggcgccatcatcagcacccggcattgcaatccgcagaacggggatcgctgtgtggccgctctggctcgggtcgagtgcacccacttcctgtggcccatgtgcatcggtgaggtggcccacgtcagcgcggagatcacctacacctccaagcactctgtggaggtgcaggtcaacatgatgtccgaaaacatcctcacaggtgccaaaaagctgaccaataaggccaccctctggtatgcgcccctgtcgctgacgaacgtggacaaggtcctcgaagagcctcctgttgtgtatttccggcaggagcaggaggaggagggccagaagcggtacaaaacccagaagctggagcgcatggagaccaactggaggaacggggacatcgtccagccagtcctcaacccagagccgaacactgtcagctacagccagtccagcttgatccacctggtggggccttcagactgtaccctgcacagcttcgtgcatgaaggggtgaccatgaaggtcatggacgaggtcgccgggatcttggctgcacgccactgcaagaccaacctcgtcacagcctccatggaggccattaattttgacaacaagatcagaaaaggctgcatcaagaccatctccggacgcatgaccttcacgagcaataagtccgtagagatcgaggtcttggtggatgccgactgtgttgtggacagctctcagaagcgctacagggccgccagtgtcttcacctaagtgtcgctgagccaggaaggcaggtcgctgcccatgccccagctcgtgctggagacccaggacgagaagggctttgaggcctggctcggtggctcacgcctgtaatcccagcactttgggatgctgaggcaggcggatcacttgacgtcaggagttcaagaccagcctggccagcatggcggaaccccgtctctactaaaaatgcagaacttaactgggcgtggtggcgggcgcctgtgatcccagctactcgggaggctgaggcaggacaatctcttgaacctgggaggcggaggttgcggtgagccgagatcgtgccactgctctccagcctgggcaacaggagcgagactccgtctc

SEQ ID NO: 972 - DNA, 1729 bp, Homo sapiens
agtgccctcgtgctgcctaggagacaagacgcgaggccggcagcgcccacccggtcgcaatggagcttcccctagggcggtgcgatgattcccgcacctgggacgatgactcggacccagagtcagagacagacccagacgcgcaggccaaggcctacgtggcccgcgttctcagtccgccaaaatccgggctggcgttctcgcgcccctcgcagctatccacacccgccgcgtccccgagcgcttcggagcctcgggccgcgtccagggtttcggccgtaagtgagccgggccttctgagccttcccccggagctgctgctcgagatctgctcctacctggacgcccgcctcgtgctccacgtcctgtcgcgggtgtgccacgcgctccgcgacctcgtgtctgaccatgtcacctggaggctacgcgcgctacgccgcgtacgcgcgccctacccagtggtggaagagaagaactttgactggccggcagcctgcattgcgctggagcagcacctgtcccgctgggcagaggatgggcgctgggtcgaatacttctgcctggccgaaggccacgtggcttccgttgactcagtgctgctgctccagggtgggtcactctgtctgtcgggctcccgagatcgcaacgtcaacttgtgggacctgcggcagctggggacggagtccaaccaggttctgatcaagaccttaggcactaagcgaaatagtacccatgagggctgggtgtggtcactggcagcgcaggaccaccgcgtgtgctccggctcctgggacagcacagtgaagctctgggacatggcagcggatgggcagcagttcggcgagataaaggccagctcagccgtgctgtgcctctcctacctgcctgacatcctggtgactggcacctatgacaagaaggtgaccatctacgaccccagagccggcccagccctgttgaagcaccagcaactacactccagacccgtgctgaccctgctggcggatgaccggcacatcatctcaggcagcgaggaccacaccctggtggtggtggaccgccgagccaacagcgtcctgcagcgtctgcagctggactcctacctgctctgcatgtcctaccaggaaccccagctctgggctggtgacaaccagggcctgctgcacgtcttcgccaaccgcaacggctgcttccagcttatccggtcctttgatgtgggccacagctttcccatcactgggatccagtactccgtgggagccttgtacaccacatccactgacaagaccatccgggtgcacgtgcccacagacccaccaaggaccatttgcacccgaaggcatgacaatgggctcaatagggtctgtgctgagggcaacctggtggtggccggctctggagacctgtcgctagaggtctggaggctgcaggcctgagcaggtgggcgtggatgtggatactgcctgccggaggctgggcttcctcctctgttcttgggggaccatccccaatgttggtgctgcctccgccccgtgggcctagggcacaaggagtcccagccacattcgggtgagcgtcctggcctgggccctatgcccgggggaagggtgaaattggggttcaggcccacccagggggccgcttcccactcttgggccctggttttgttatgatttggatgccccgctctcagttgagagcgaaggagaaataaacctgacatgttggt

SEQ ID NO: 973 - DNA, 2556 bp, Homo sapiens
caatacccaagacatgttcagccctgatcagagctcaatgcccatgagcaacgtgggcaccacccggctcagccacatgcctctgccccctgcgtccaatcctcctgggaccgtgcattcagccccaaaccgggggctaggcaggcggccttcggacctcaccatcagtattaatcagatgggctcaccgggcatggggcacttgaagtcgcccacccttagccaggtgcactcacccctggtcacctcgccctctgccaacctcaagtcaccccagactccctcacagatggtgcccttgccttctgccaacccgccaggacctctcaagtcgccccaggtcctcggctcctccctcagtgtccgttcacccactggctcgcccagcaggctcaagtctccttccatggcggtgccttctccaggctgggttgcctcacctaagacggccatgcccagcccgggggtctcccagaacaagcagccgcctctcaacatgaactcttccaccaccctgagcaacatggaacagggtaccctcccgcctagcggcccccggagcagctcctcagcacctcccgccaaccctcccagcggcctcatgaaccccagcctaccattcacttcctccccagaccccacaccttcccagaaccccctgtcactgatgatgacccagatgtccaagtacgccatgcccagctccaccccgctctaccacaatgccatcaagaccatcgccacctcagacgacgagctgctgcccgaccggcccctgctgccccccccaccaccaccgcagggctccgggccagggatcagcaacagccagcccagccagatgcacctgaactcagccgctgcccagagccctatgggcatgaacctgccaggccagcagcccctgtcccatgagcccccgcccgccatgctgccctcccccacccctctgggctccaacattccactgcatcccaacgcacaggggacaggggggccccctcaaaactccatgatgatggccccagggggccccgactccctgaatgccccctgtggcccagtgcccagctcctcccagatgatgcccttcccccctcggctgcagcagccccatggtgccatggcccccactgggggtgggggcggggggcctggcctgcagcagcactacccgtcaggcatggccctgcctcccgaggacctgcccaaccagccgccaggccccatgcctccccagcagcacctgatgggcaaagccatggctgggcgcatgggcgacgcatacccaccgggtgtgctccctggggtggcatcagtgctgaacgaccccgagctgagcgaggtgatccggcccaccccaacggggatccccgagttcgacttgtcgaggatcatcccctctgagaagccaagcagcaccctccagtacttccccaagagcgagaaccagccccccaaggctcagccccctaatctgcatctcatgaacctgcagaacatgatggcggagcagactccctctcggcctcccaacctcccaggccagcagggcgtccagcgggggctcaacatgtccatgtgccaccccggacagatgtccttgctgggcaggacaggcgtgcccccacagcaggggatggtgccccatggcctgcaccagggggtcatgtcccctccacaaggcctcatgacccagcagaatttcatgctgatgaagcagcggggcgtggggggcgaggtctacagccagccgccccacatgctctccccgcagggctccctcatgggccccccgccccagcagaacctcatggtgtcccacccccttcggcagcgcagtgtgtccctggacagccagatgggctacctcccggcaccaggcggcatggccaacctgcccttctagaagtcgctgccagggctggagccggggcaatgttgcaaatacgataaccttaacaaagttcttcccctcaatgttgggatggcctgggtcgcggggtggggtggagggggtgggagggggcttgtgtagggagtggcatttgtggaaaccagatgtgctggcagcttagggggaagtggcagtgtggggtgggggattttgcattggggttggtcccatttcggccaccaggactgcccctcccccactcctcccaattcctatggagcctctctattttacctctttccgtgcatccctgcacccgccacacccccttcagctatgcttttggagtcctggatgggaatctggggggagagaggaaggacaggtcaggtctcccccagccccttctgctcctgtctcctcgtgtccgcattgctggagctccacctccctcttggtttctccgcacccgcccattttccttctgtctttacctgcttcgtatcctttccctgctgatgtggctgacccctctcccacccctccctgcaggcggctggccaggtgggcaggtgccagccggagctgtaaatagagcgctgcgcttttgtgctggtttgtgcgtgtgctgtatttctgtgttttgatagaagtcacac

SEQ ID NO: 974 - DNA, 2150 bp, Homo sapiens
gcaggaggcggtggagcgcagagcgggcgagcgcgaaaaatcactaccaatataatggattttatatatcagattgctttattctggatatcatggtaacaatacagaaagtatacataatttcccatttctgcaagtagtcatgactgctgaagaaagaaaaacttaaagctacggcagaattattttatggaaattctgattttgtttttaatttttgataactttttactaaaggtatgaacacacaaagagcttattttgttaggcaaatacacattaataagaatgcctagaagaggactgattcttcacacccggacccactggttgctgttgggccttgctttgctctgcagtttggtattatttatgtacctcctggaatgtgccccccagactgatggaaatgcatctcttcctggtgttgttggggaaaattatggtaaagagtattatcaagccctcctacaggaacaagaagaacattatcagaccagggcaaccagtctgaaacgccaaattgcccaactaaaacaagaattacaagaaatgagtgagaagatgcggtcactgcaagaaagaaggaatgtaggggctaatggcataggctatcagagcaacaaagagcaagcacctagtgatcttttagagtttcttcattcccaaattgacaaagctgaagttagcataggggccaaactacccagtgagtatggggtcattccctttgaaagttttaccttaatgaaagtatttcaattggaaatgggtctcactcgccatcctgaagaaaagccagttagaaaagacaaacgagatgaattggtggaagttattgaagcgggcttggaggtcattaataatcctgatgaagatgatgaacaagaagatgaggagggtccccttggagagaaactgatatttaatgaaaatgacttcgtagaaggttattatcgcactgagagagataagggcacacagtatgaactcttttttaagaaagcagaccttacggaatatagacatgtgaccctcttccgcccttttggacctctcatgaaagtgaagagtgagatgattgacatcactagatcaattattaatatcattgtgccacttgctgaaagaactgaagcatttgtacaatttatgcagaacttcagggatgtttgtattcatcaagacaagaagattcatctcacagtggtgtattttggtaaagaaggactgtctaaagtcaagtctatcctagaatctgtcaccagtgagtctaattttcacaattacaccttggtctcattgaatgaagaatttaatcgtggacgaggactaaatgtgggtgcccgagcttgggacaagggagaggtcttgatgtttttctgtgatgttgatatctatttctcagccgaattccttaacagctgccggttaaatgctgagccaggtaagaaggtgttttaccctgtggtgttcagtctttacaatcctgccattgtttatgccaaccaggaagtgccaccacctgtggagcagcagctggttcacaaaaaggattctggcttttggcgagattttggctttggaatgacttgtcagtatcgttcagatttcctgaccattggtggatttgacatggaagtgaaaggttggggtggagaagatgttcatctttatcgaaaatacttacatggtgacctcattgtgattcggactccggttcctggtcttttccacctctggcacgaaaagcgctgtgctgatgagctgacccccgagcagtaccgcatgtgcatccagtctaaagccatgaatgaggcctctcactcccacctgggaatgctggtcttcagggaggaaatagagacgcatcttcataaacaggcatacaggacaaacagtgaagctgttggttgaaatcataattaatgcgttactgtatgaaccacaaaacagcactatttatttagccttacttctacttccagatgcagtgcctcttttggagaagacatgtttatttttcatgttctttctgacattactttagcaattcaacttgatgtgagaagaaaaaacaaatgtttcaacacaaaatctctattttgtgagaatactgcactatggaataattgacaaattgaaatctc

SEQ ID NO: 975 - DNA, 2523 bp, Homo sapiens
gttcctaagtactccactggcttaccaagtataggattaccctttgattactttatctggctaccaggacagagagattcttgggagccaaccagccatcaggtcaactattttgctacagatactgctttctgggtttagtcccctgtactttcaggtcttcagcctcagtttgacttcctggcttcttcagtgaggattttagagttatgtcagaacagtggttggtaggatggcggagacatggacttcagagagttcttggtagaagactcaaagagccacctgtcatgagacatcccacttccttccccaggttacttccaagactgagcagccaggtttttggtagatgagaacaaatgtttcttcctgaagccctggggcttcaggtaggaagaaggactgctatacttgttctcacccttggcttctggctgctccagttaaacatggttcccattgatacagacattagagtgggaaaggacttcgttcatagaccgaagaccctcaaaggaaagtccttccattttgggaagggtgacattgatttcgtttagctgcttaagatatgtacttgctgttgtcttgtgagacatgacatctgaagctgaagaggagtccctctcattgttgtcattgtcccaccgggactgaaagtctcccagttgaggcagcattttagctttgatgtctacagggcaatcatggatcaggaaatttctgcaaattagacttggaaaacaaggtcttgatccttcttgtctttggacgaagactaatcatcacttttgactgaaggtgtagtgctggagactatgttggaggcagcacctgatgcactatccatattcttccccttgatcttgtcttaaagttttccaaatggattccgaggcttgtctttgatgaaaaggtcaaacatactggcagtcatgttgtttctcataagctggatgtcaacctcaatttctcctctttatccttctctcctggtttggatttcaaggtataccaccgcatcttcctgctcccctagtctgggtgcaggtcctgcaggtacacctcggcgaagcccaagtacagtagcagcagcacctcaaaggtggcctcctcctctgacactgaggtggcatacttctccttacccacctgaatcaccgagtacatgttgcttgtaccgtcaggctcttggttcttggcccctggccctatgcctgcaacactgtcacctgcacgtggattgggaaccacatagcccccggacctgctaaggccattaaggacaggatggtgatgcctcggctgactgacgtgagaagattgtcatgacccatggcctctactgctgtcctaccaacagaaacttcataatgttgtgcaggcgttaccactacctagttccagaacattgccatcacccccaaaataaatcttgcattcattaagcagtcacccctattttcccccatccctgtcaaccactgatttatgttctgtctctatggattcccctgttccggataattcacgtaaatggaataacacaatagatgccttttatcatgggtttctttcacttaggatgttttgtagggtaatccatatagcatgtatcaggacttcatttttttttttttttttttgagatggagtttcattcttcttgcccaggctggagtgcagtggtgcagtctcagctcacttcaacctctgccttctaggttcaagcgattctcctgtcttggcttcccaagtagccaggattacaggcgcctggcaccatgcccagctactttttttgtatttttagtagagacagggtttcaccatgttggccaggctggtctcaaactcctgacctcaggtgatccgcctgcctcagcctcccaacgtgctgggattacaggcgtgagccaccatggtcagccttcattcattttcatggagaaaaatatttcattgtatgagtataccacattttgtttatccatttatccattgattggttgtttctacttttttttagctattatgaataatattgctgtgaacatttgtgtacaaggttttagtggacacaagtttttatttttcttgggtatatatctaggagtggaattgctgggtcatattgtaattctgttcaactttttgaagaacttcccaactgttctccatggtggctgtgccattgtatattcctaccagcagtgtatgaagttacaaatttctccacatcctgagaacccctttattattttctgtttttctttttgattatagccatcctagtaggtgtaaagtggtatctcattgtgattttattttgcatttccctaaatgattaatgatattgagcatcttttcatgtgcttcttggccactagtatatcttctttgaagaaatgtctattcaagtctttggcagtttctaaatgagttattgtctttttgttgttaggttgtaagagttataatctggataacagatccttattagatatgtaatttgcacat

SEQ ID NO: 976 - DNA, 2222 bp, Homo sapiens
gtagagagcgcttgcgggcgccgggcggagctgctgcggatcaggacccgagccgattcccgatcccgacccagatcctaacccgcgcccccgccccgccgccgccgccatgtacgacgcagagcgcggctggagcttgtccttcgcgggctgcggcttcctgggcttctaccacgtcggggcgacccgctgcctgagcgagcacgccccgcacctcctccgcgacgcgcgcatgttgttcggcgcttcggccggggcgttgcactgcgtcggcgtcctctccgagcagactctgcaggtcctctcagatcttgtgcggaaggccaggagtcggaacattggcatcttccatccatccttcaacttaagcaagttcctccgacagggtctctgcaaatgcctcccggccaatgtccaccagctcatctccggcaaaatatgcatctctcttaccagagtgtctgatggggaaaacgttctggtgtctgactttcggtccaaagacgaagtcgtggatgccttggtatgttcctgcttcatgcctttctacagtggccttatccctccttccttcagaggcgtgcgatatgtggatggaggagtgagtgacaacgtacccttcattgatgccaaaacaaccatcaccgtgtcccccttctatggggagtacgacatctgccctaaagtcaagtccacgaactttcttcatgtggacatcaccaagctcagtctacgcctctgcacagggaacctctaccttctctcgagagcttttgtccccccggatctcaaggtgctgggagagatatgccttcgaggatatttggatgcattcaggttcttggaagagaagggcatctgcaacaggccccagccaggcctgaagtcatcctcagaagggatggatcctgaggtcgccatgcccagctgggcaaacatgagtctggattcttccccggagtcggctgccttggctgtgaggctggagggagatgagctgctagaccacctgcgtctcagcatcctgccctgggatgagagcatcctggacaccctctcgcccaggctcgctacagcactgagtgaagaaatgaaagacaaaggtggatacatgagcaagatttgcaacttgctacccattaggataatgtcttatgtaatgctgccctgtaccctgcctgtggaatctgccattgcgattgtccagagactggtgacatggcttccagatatgcccgacgatgtcctgtggttgcagtgggtgacctcacaggtgttcactcgagtgctgatgtgtctgctccccgcctccaggtcccaaatgccagtgagcagccaacaggcctccccatgcacacctgagcaggactggccctgctggactccctgctcccccgagggctgtccagcagagaccaaagcagaggccaccccgcggtccatcctcaggtccagcctgaacttcttcttgggcaataaagtacctgctggtgctgaggggctctccacctttcccagtttttcactagagaagagtctgtgagtcacttgaggaggcgagtctagcagattctttcagaggtgctaaagtttcccatctttgtgcagctacctccgcattgctgtgtagtgacccctgcctgtgacgtggaggatcccagcctctgagctgagttggttttatgaaaagctaggaagcaacctttcgcctgtgcagcggtccagcacttaactctaatacatcagcatgcgttaattcagctggttgggaaatgacaccaggaagcccagtgcagagggtcccttactgactgtttcgtggccctattaatggtcagactgttccagcatgaggttcttagaatgacaggtgtttggatgggtgggggccttgtgatggggggtaggctggcccatgtgtgatcttgtggggtggagggaagagaatagcatgatcccacttccccatgctgtgggaaggggtgcagttcgtccccaagaacgacactgcctgtcaggtggtctgcaaagatgataaccttgactactaaaaacgtctccatggcgggggtaacaagatgataatctacttaattttagaacacctttttcacctaactaaaataatgtttaaagagttttgtataaaaatgtaaggaagcgttgttacctgttgaattttgtattatgtgaatcagtgagatgttagtagaataagcctt

SEQ ID NO: 977 - DNA, 2064 bp, Homo sapiens
cccgtggccccggggctcaggggcagcccaggactctccctcgcccggctcacggccctgcctggggggcgcctccgggagcagatcacgagccctggggctcagccctcaggcgcgtctagctcggcggtcaccccagtgccgggaggaccctgaagacgcgccccaggcggccctactcagagcctcctcccaaggcccaggaatgcggcgctgtcggaggtgtgcgcggtggccacaccgctgtccgggtccccaaagcgggccccgctcccacttctcgccttggccccgaaccctgggtccagccccagcgctttgtgtgcgaacaccgctccgccccggacccagctccgccttggggcccctctctgcctgcccctccgtgcccgactacactgcttcccctccggcgggcgactcagcccggtccatcgtggcggcttccagggcggcaggctccgggagtactcccggggccggctccaaggactgttcccctcctccccactcccactccgcggcggcggcgggcgagagcggcgacatagggccagggtccggagcggtggaggctcctggccggggagcacgtcgccccacccggcaacgcgaggatggtggcggcgcagtcggctgctttggggtctcaaggcacaggggacgcgaggcacagatgtcccacagcagccactgcggctcccgcagctgctccgccgccgctgcccgcccctccctgctgcagctggcgtgatggcagcggcagctctggacgccccactgctgccaccatcagccttgtgaaatagcttgaaagatctagccacgtgagcaggacagaagtgcacaacaaccatatcttgatttctgtggaccaggtggggcccctgccagccttgctagacagacccaggtgaacagtccttctaggggatctcatcaccaggcaagcacgtggtacgagaagagcagtcattaggaaggccatttggaaaagcacatcctctctgttcacgtgagatattttacatcctcattcctcatcgcaagcttcctgggatttggagtgtcacagacaagagggttgggggaggccagtaggtatggatttgtttatatgtttatattaaaacatatatgtttgtttatattaaaatgagcatatgaatatttctgtatacttcagataaacattcttttccataaataagcttcatcatccagaagccatgttgaaagttggtaatcaaggataggaagtgtttccaagggttgtcagtgattaaatcaaccttaccttagcatacatgtatgagagaagttagataaattatacatagagagatagctagatagataatagataaataaggtagatgacagattagatacagatgataaacagatatgctatcagtctagatctattactcacagtcagtcgtatcacagtgtaattccatcaacttcatttgcagcaaaagaacagcccctgatgtacgcctgtttcctgaatatttggaaatattaatattaatatagatagagtcagcttgccagtataaagaatctatctctcactataggcagagccatgtgttggatattatggaggaatatgtattattttaatcgtttaaaagactaataaacttctaatctacttttgggagcctctgctcaagttcctgaggttcctactctaaaatccacatcaccctccaactgctccctatgtgagccattagggagcacaatgaattagagaatgaatcctattagcccactaaaaaattatctttcaaaggatgaagactgatgctaaggaaaaagagatgaggcctccctggttccgcattattactccttcctttcttgggttacggattgaacactgaccttttctttcactcttctgcaagacaaccccataagaaagctgaaacctgcttttgtgaaagcctatgattactataagacaggtgagcaaaacagaatactagataaactcagttctttccagtgtggtgtctttgatggaaaaataaaataaaagccaatgtg

SEQ ID NO: 978 - DNA, 2299 bp, Homo sapiens
agagagagcaggagaatgaacatgggggagacgcagagaagcacacagaggcatgactgataagggcagaggaggaaagaaggtctcggagaccagggcatgaatgtggttgcacagagacggggagaaggatggggagaaatgaggaacaggaagaagattccgagagaaataaagaggccgagaggagctgagccaggcagccggtggagcaggcagatggaacaacagagacaaagaacagagccacagagtgggcacacagcaaggcctggcagccaagccctgtgggtttggtgggagcagatgcttgtatgggagcagcagctgatggcccccagcacgtgcatccttgttgactccaggcccagcacagcctcctcggcagccggccttagcctggaggagcaaccctggtccagagaggcagacgaatggcagccctgccccgtgggggctccggttcttctcctccatcctcctccaggctccgcccacctgctccgtctgcctcccagggcctcgtgaatcccagggaagccatgagctgccacatcacgcccggaaggaagcgggctgcgttggaggggaaaagacgcaccagcagcctagaattcgaggcactgcagagccggaaggggcctcggcgctgctccctccgccccctcatttcacaaaccggaaactgagacccaaagcaaggaagggacttggccaagttgaagagatgaaggcgcagaggcatgaactcccgtagccagagagtgtgagctggactctacctggagcagcctcggtgcagagcccatgcccccaaccatgtccgtggtcgaggcccagcccagacagggcacaaaggggctgaggaagaggaagtaagatgccagggttgccatgcaggagggcaaccccaagtgagatgggcatcgtggcctagggcccaccttccggaagagctcatcagaacttcggacacactgcatgggcctagacccagggctcgttgagctcctccctcggattggcttcgaattttaggtgaatcctctctagcagccacattcacccttgcaagcctgcactttgtcatcttctgaaaaggtgcaggaacatgatgcccagctgactcccagggagcgggagccccagaggccagcggagcacagccgcagcaggcagatctgttgggaaaccacgggagtataggagcagggctgggggcacctgagggactgtggagcctgaattattgaaacgcttagagtaaagcagatttagatttcacaaagacagaggtgaaggtgggtgaagacggagggaaggatttaaagggaaagagaaagaggaaagataagaatgagggagaaagaggaagagagaaagaaaaagagaaatagagttatcgaagatgactgcaagtctggcctctctcaacccaaggagccaaggaggggaaggccggcctgagcagcaacgtagacaagagctcaggagggcagggacagagccctggcttcagcaagagcgtggggaacagagggcaagggggtccatgcagcccaggatggcagggtgctcatacacacagccttggtcctgtcccctctcccattgccgcttttgagctcaccttgtttaaggccaaagcacacaccatcctcccacagagccactaatgcaattaacaaaacacattcataaatcttgcatggcgtccggagctgtctcctctccctaagcacaaaggccagctccagagatgctgtgcagagagctgtctgacctctccagcgtcagggccccctgaaaagtgcagcataacccttagtaggacagaaagaccattgtcttctgccaaccattacaaagtggagtggggctggggttaggaaacacagacaaatcagaagaggctgagaaggcggagatgaaagtgcataggtgtttgcagggagctggggaatagttcgtgccttccaagctcaacaagagagcattcagcagagaccagagaatcaccacttttggagggtgattttaccttgtgagaacagagcacagggtgtgtgggacccagggcatcttcggcaatgcgggcgtgacttggcgggatgtcggtgtttgtgtttgcatgtgtgtgtgcgtgcgtgcatgctcagtctggaaaactggtgactcactaaaacaccgagctttctgatctgaagagcttatattcggctatttttagctcgtcttgtctcttggccctttttttccccttgtctgttttcaaatgtagaggagtctggagaccatg

SEQ ID NO: 979 - DNA, 1947 bp, Homo sapiens
tcaatctgcttttgaggccagaaggaaatatcagttgaaaaaaagcacacctggaatgcatcactctttaattctcaaatccatatgattgcccaaagaagagatgctatggctcatcgaatactctcagcaaggcttcataaaattaaaggactaaaaaatgaattagctgatatgcatcataaattggaagccatccttacagaaaaccaatttttgaaacaacttcagcttaggcatttgaaagctataggaaaatatgagaattcacaaaataatctacctcaaattatggctaaacatcagaatgaagtaaaaaatttaaggcaactacttaggaaatcccaggaaaaggaaagaactctatctaggaaacttagagaaactgacagccagttactgaagactaaagatatcttgcaggcactgcagaaactttctgaagacaaaaaccttgcagaaagggaagaactcactcataaattatctattatcacaacaaaaatggacgcaaatgacaaaaaaatacaggtctgtatttcaggggcccagacagtttaagattccaaagttaatagagagagggtgtgaattaatcatggatgcgccccctctgtaacaaagcattactaactgcttcacttggcgtgctgcactaaataattatgttgtctaatagagggcacagaaagggagtggtttgaaggaaaaacagaagcagctcaaactagaaatgttcatctgttgcagtgcacaagagttcactctgtggctggactggtttatctggaaatgaccattctctaagagagcacagctacagtgctaagggactttttccctgtgctgaaaagattgcattgtgttacgtgaaacctctctttgaagtcaaccctctaccttaaactgttgattaaaaggctacttccctaaaacctactcagtgcatccgttcagggcctttgtattctccctcaccattttggccaggaattaccacacagacatttgtagttattttcaaaatagcagcttttcccagataatgttcctgggtagtagggaaggaaaaggaattaaaataattaaagagatgactggattgattttcctcaacagcacttggttgtcaaaagcctggggattacattataagggatgacttgggagaaggcattgatatcatattaagaattctcctgcatatcttacattagctagtttgagtctgtatagacataaacataaatggaattaatttaggatttaattctgtaatatttgatgctgaaacacgagtattttctatgatcttgaagtaagtaaatatcaggttcgtttcctccacgttttaatctcagttatttcttctgttgttaaaattccctattttccaataaatttttttcacatgaaattaatatgtgatctacagaaaataatgagcaacctcaattttcactcttgtataccaaagtgatattattgggccttttaggtaatattgtattcatcttagcgtatgtctgtcatgtaaaagcaaatctgttttcatgtatgtatctaagttgttcatgtttttatatctatacataaaaccaaaacaaattccataactattttctttgatacaaaaagcacttaccaagtatgagaaatttctgtttggttgtaggcatttagtggaggaaaactgttttgtggaccaaaacatgttatttctttaacattaatgttttagggagtggtatttttagtgattctttccccttgtagctttccatgtcttccacttttcctgtttgggaaagtactgctgttataatggaggaggtcctactttatgttaaaacaaagaaaagtggtccttttggtaagctttctgtcaagtccagatctaacagttctccaataaaatagttctcattccagagagcagatgaatat

SEQ ID NO: 980 - DNA, 2413 bp, Homo sapiens
gagcgttctgtggagagagtgcgaggtcaggccatgaacttgggagatggtttaaagcttgaaactgaattactggatggaaaaaccaagctaatattgtctccatatgaacataaatcaaaaatttctgtgaagtgtcttaaagtctttgcttgtctgtggatagaacccagtttggatgatgtaccactttatccttcaactctaagcccttgatggctttacttgcaggtttaattaaggtgaagaagttgctggagtacccgaaatatcactcaataaatagatgggaaataaggccaagattgcaaaatgtcctttaagaacaaaaactgggcacattctaaaatcaacacaagatacttgtattgggagtgaaaaacttttgcaaaagaagccagttggttcagaaacatcacaggcaaaaggtgaaaaaaatggaatgactttttcatccactaaggatttatgtaaacaatgtatagataaagactgtcttcatatccagaaagagatttcacctgcaacccctaatatgcagaagactagaaacaccgtaaatacatctctagtaggtaaacagaagcctcacaaaaaacacatcacagctgaaaacatgaagagcagtttggtgtgtctaacacaagaccaactacaacagattttgatgactgtaaaccaaggaaatagatctctttccctgactgagaatggaaaggaggcaaaaagtcaatatagtctatatttaaacagtatttctaatcagccaaaggatgagaacattatgggattattcaaaaaaactgaaatggtttcatctgtcccagctgaaaataaatctgtcttaaatgaacatcaggagacatctaaacagtagagaatgaatggaaaccagctgatatattcagtactctgggggaaagggaatgtgatagaagttcgttggaagcaaaaaaagcccagtggaggaaagagctagttttgcagactgtacaagcatggtaccagcatctcctcggcttctggtgaggcctcaggaagcttttactcacggtggaaggcaaagggggagcaggcattttacatggcaagagagatgccaggctcttttacacaaccagctctcatgtgaactgacagagggagaactcaagcatcatcccaaggggatggcaccaagccattcatgagggattcatctcctgtgacgcaaacacctccccttaggccccacctccaacactggggaatcacatttcaacatgagatttgaaggggacaaatatccaaactgtatcatcaaggtaaaagaagaatgaagagattaaacttatgttagcagtatcagaaggtttggcggtcttgatgtgtgtttatatcacaatttcatctttaaatattttctttcagcacattccacatcaaaatgcaataccaaatgtctgaaataatatggaactacttggaaatgaccagaatattttgtgctttaatcatttttgttgttgttgttgttttgagacggagtttcattcttgttgcccaagctggagtgcggtggcgccgtctcagctcactgcaacctctgcttgctgggttcgggtggttctcctgcctcagcctcctgagtggctgggattacaggcacctgccaccatgcccaacttactttttgtatctttggaggagacagggtttcaccatgttggccaggctggtctcaaactcctggcctcaggtgatccgcctgccttggcctcccgaagtgctgtgattacagttgtgagccaccacacctggccttatgctttaattattttaaaaatcagtttactgtttttttaacttgtctcagtaaagtgcctctatttaagtcatgcttccagtaacattcttggaatttaaatttatacaacattgaattttgtatttaaagaactactgttgattggggggttagttttgactatatctctcagacacaggcttttatgttttttacttgtcagcaattaagaaataatagctaacattcattgaatatttactttgtgccaagccctatattgagataggcactattattatccccattttatagaagaaaccaaggcttagaaagcttaccagcagttggccaactgcggtgggctcatgcctgtaatcctaccacgttgggaggccgaggcaggtggatcacaaggtcgggagatggagaccatcctggccaacatggtgaaaccacatctccactaaaatacaaaaattagccgggcgtggtggtgctgcctgtggccccggctactcaggaggctgaggcaggggaatcgcttgaacctgggaggcggagattgcagtgagctgagatggcgccattgcactccaggctgctgacagaatgagactctatatt

SEQ ID NO: 981 - DNA, 2151 bp, Homo sapiens
ttttccaggaactttccaggaatcggcctcacgtgaccgcgggccccgctactgctttaaagaggctcggtcgcaatacacaggcttcagggaagaccgggtgagagcgctcgggtgcagggcgggcggtgtgcacgccggggtcggcctgcctctggccccacaccccggggtgctcgggcgcaagctagagatctccccggccaccggctacagccaaccccgtttcggcggccggagcctgccccctacccgggccagctgagcgcccgggttcagggaaggatagcgatccttggcccttggcctgccacgggggtgggttcctctaaacatcccggcggcgccccctcgatgcgaccctcctggccgcacttttgcggggggtgggcgtgcaggagcgactgtgggtcctcggaaaccagactctccggctctaagacacatcgatggcgtggggacgccgtgctcgtcccggtgcccacggccggggaccggaggcggtccccttgatcaggtcctggaaggcagcgagcgggagagcagcgcctccttaagcggcgccggccgtccttagtcccctccccctggcgctccggctccttgtcacccgcacccacccggctcctcccttcctcctcccctctgctccaacgtctccggtagacccggcggcccgcccgggtcacctgcgccggctgctaagggggcgcccttacctgcgcgcccggaaggggcttggtgactggcctcggttccctcagtccggagagtgtctctgccattccctgcagggctgacgccccagggctgggattcgaaaggatctcggcacctctaccctacctgggattctcacctccaaccccgttggaggccccctggccttagtggaaactcatctccttgtctgcgcacccgcccccgaaatatgacctacttgaaatgtgacctactttttaaaagaaacccttaacaatcacgggaaaaccggatccaaaatttcgataagcatttttctttgaaatactattctattgcatcactgctcgaaagcttgaaaggtcaatggccacttttagttgaggccgcggctatgggaagttgggcgaggaagggggaggggtgggagggaggcgcgtcttgcaaactttgcctggtgccccccctgccggctctgggaggaaacgggaaccagctcccaaccttggggtctgcagccggggaccaatggttttctcaataattttcctgcttttgagtacataattctatgcagatgataagcagatgagtcggggaggggggcatttcccagctaacaaagagctttgttaacgctggagccgtgtgcccttaatcatgtttcgttttttagaaagagcctcttatagtgtgggcggagctaactgaaccctagttaaaatcctctacaaagtagttgaataattttgcacaaggcacttaccctctttggacctctggccctttttataacatgaagggctagattcgggttctgggtgagggactgggataaaggaacaaatcagattccatgtgaagcctgtgtacagtctgaggccccaagccttttaagaaccactatgtctactagggttaactgccctctaaattgtcctaatatggcttcttattccttgatggagaatcctagaggaagggtgtacccacactttagcttaaataaaaaggtatttattcctaaaactggcggagggcggggagggagcatgaccaagtctccctctgtcgcccaggctggagtgcagggcgtgatctcggctcactgcaacctccgcctcccgggttcgggcgattctcctgcctcagcctcccgagaagctgggattgcaggcgcccaccaccagcctggccaacatggcaaaaccccatctctactaaaaatgcaaacattagctgggcatggtggcacatgcctgtaatcccagctactcgggaggctgagacaggagaatcacttgaacccaggaggtggaggttacagtgagccaagatcacaccactgtaccacagcctgagcaacgaaagaagactctgtctaaaaaaagtaaaaaataaaataaaacacacctggagctttctaaaaaaaaaaaaaaaaaaaaaaag

SEQ ID NO: 982 - DNA, 2076 bp, Homo sapiens
agaagggcggttgctgcagctttggccgaggttcgggctcgaacttggaaaatgctcctggcgcctcagggaaggtccttctcaaagaaaaggatggggctgaatcgctggaaacggttcacaaggaagccgagtcccaagcctacttttggtcctgacagtgtggaacactggataaagagagtggagaaagcctcagagtttgcagtgtcaaatgcattttttactagaaattcagatttacctagaagtccctggggccaaatcacagatttgaaaacatctgagcaaatagaggatcatgatgaaatctatgcagaagctcaggagctggtcaatgactggttagacaccaaacttaagcaagaattagcaagtgaggaagaaggtgatgctaaaaacactgtgtcaagtgtcactattatgccggaagccaatggccatttgaaatatgacaagtttgatgatttatgtggctatttggaggaagaagaggaaagtaccaccgttcaaaaatttatagaccatctgctccataaaaatgtggtagattctgcaatgatggaagatcttggaaggaaggaaaaccaagacaagaagcagcagaaggatcctcgtcttaccatggagatgagacataagcaggtaaaagaaaatcgcttaagacgtgagaaagaactggagtaccagagaatagaaaagaccctgaaaaaatcggccttcttggaggctcagtgtctggtgcaagaagagaagaaaaggaaggctctggaggccaagaaagaggaagaggagattcaaagggagatggtgaagctgcggagggagataattgagaggagacgcactgtgaaagcagcatggaaaatagagaagaaaaggcaagaagagaattctcaaaatagttcagaaaaagtcatgtttcaaagtactcacattcttccagatgaggaaaaaatggtgaaggaaagaaaaaggaaattgaaagaagtattaatccaaactttcaaagaaaatcaacagtgtcaaaaacggtatttcgctgcctggcacaagctgattcttgatcataggattaagctggggaaagctgggaccctgtctgactggaagattcagctgaaggtcctgcgggcctggagagactacacaagattccagaagttggagcgggagactcaagccttggaaaatgatcttagggaagaaaacagaaaacaacaactggccactgagtataaccggaaacaagttctccgacactgctttacagaatggcagcattggcatggcgccgagctcctgaagagagagctggctctcacaaaagaggaaactaggaagaagatggatgcactgctgcaggcagcatcactggggaaactcagtgccaatgggttatcaggcatcagtctacctgaggaggcaacagccatggtgggtccaccagtaaaaaatggacaggagactgctgtgccccctttgtgggaaaagcctcccttgggaagcagtggttgtatgctcagtcctcccctgggaagaacaacaacaggcaacttgcagggttcccttcagaatgtctctctgagtgcacctggcaataagcagcacaagaccctgggtgctgaaccctctcaacagcctggcagcaacgagacactcagaactaccagccagaaagcagaaccgctttgcttgggtcatttccacaaccgccatgtcttccagcaacagctgattgagaagcaaaagaagaaacttcaggaacagcagaaaacaattctcgagctgaagaaaaacctgcagctggcagaggctcagtgggcagcagagcatgccttagcagtcacagaagcacagagccacctgctgtcaaagcccagagaagaggaaccaagaacctgccagatgcttgtgaattcacctgttgcttcccctgggactgaaggcagaagtgactcccgaaattctctttctggactcagaaggaaaccaaagcaattgatgacaccgcatcccatactaaaagctatggaagagagagcaattcaacgagctgaatgtaggcggatcttg

SEQ ID NO: 983 - DNA, 2738 bp, Homo sapiens
tacttgctactggggattacccatggatatccttaataggcaggaagtctgggaattctggtggcctctagggcagtgttctcacagcaccgttccgacagggaccagtgaaagaaaagagacaaagttagaacgtgctggggagcggccatttctaaggccagtctggtttaagtagtcatttctgctgaaaagacagatgatcctggtggaagaaaaggttgaaggcagctgccctcgggagggctgtgatgctcggcacatcctgcctggcacatacacgtgtctgcaggccacaccgtgcatgtccccagacctgccgcctggcttctggagtgcttcaagcagagcatggtgggtcattgaggagacccaggaatctcatctgagaacccactctctgccggagaaccccatggtgacacattttcatctttctgaccagaggctgtttttttttttttttgagacagtctcattctgttgcccaggctggagtgcagtggcttgatctcggctcactgcaacctcgcctcccgggttcaggcaattctctgccgcagcctccagagtggctgggatagcaggtgcccgccaccacaccccactaatttttgtatttgtgtttttggtagagatggggtttcaccatgttggtcaggctggtcttggactcctgacctcatgctccacccgcttcggcctcccaaggttctgggattacaggtgtgagccaccgtgcacggccggcctgacctttggaaaagccttgtcactttggacgtttgcgtctttgaagaggcgatgggagcatatcatgactgcctgccaccattgcttttcagactaccacaactcaatcatgctgtccaggacttctggccctgtgttcaccactgggaaaacgtacttcagactggatagcctaaaaaggagcaatgcccttgtaggatgtggagaagggaaaatacggacattaacattaaaagacaccagtgaaattgttaggtctctaggaagttggagcacaaggcttcacgctttaagaccatctgtggttttcagtgaacaagcgctgagcaccagcagcagaaaacaacaacaaaaaaacacctcgtttttaccttgtcttctagacatgaaaaggcagttgcattccactctgcattatgttctacatgttgctttatcagtatatgcttagctgtaagtgacaagtattttttctgaacagaagtttacttagaaataccatgcacttgggggtaccaattaaccgcctgaaaattagcatattgatagttcttagagagaccagatataatctaagaatttatatgaaagatttgtatcattagagccagaaataattttatattaatatataatacagattaacattatatataatatgtacctgtgtcacttctgacatgagcctgtaaacatatattcatatatgtacctgcacatgtacccacctgatgtaggtcttattcctttagtatggacttaaagtacttattcatataccttgtaactaaaaattagaacagctccctagaattatgaacttttaagagtctgactagaaatttgcaacttataaaaaagttacttttaaaaatataagttagggctaggcacagtggctcatgcctataatctcagcacttttgggaggccaagacaggaggatcacttcaggccaggagttcaagatcaaccaacctgggtaacatggccagaccccatctctatttatatatatatatataaaacttagagtttttatcttcccctaaaagaggccgtggtatttgcagcagcctcaaattgctcttaaggggtttaggtgtgcagaagctttcctttccctacccagtaaccatgtgactactaacgtggtatattgatttattttgtttgctgtctgtctcccctgccccactgctggaacagaggctccaagaaaacagggaccttattattcattactgcatccccagtaatgaaagtacttagaaaataattattgaatgaatgaaatctaaactgtgaacctgagggtgtttgtggcagtgtttgttttactgaattgtagaaggacataaccgtgttttcagtgtttctatggaacaaacttgtacattttatttcacttgtgttttgtcttaaaccctactgctggaaacaattttatgtaataagcaatgggcccaaaagtctaggagtttttttgtacttagtgaatttgtatgcaacagagatgctgcagctgatgcctttaaaaggtattcatcatggaagagctgaggcctgtgcttggtgttccagagcccagggttgagcatcctgaaggagccactgcagccgtcactgtccccagagcctgtggagatagagcctgtttgctgctttttcttcccgctcttaagacatggctggagctcagtcttcattgaatgaagtttgctgtggtattgcatagccttgctttcttgaactaaactgtttgcccttcacaagtagttcttctttcaggattagttcgttccaaggaggctcttcagtctcacagataagtagatctctcctgctgtctggacacatttcactcggaaattgaatacaatttgtattcaggctgggaacctgaacacacacttgtgtttttaagcttcccttttttacagtggacaaggacacaaataataaataaatcatccctaatgccc

SEQ ID NO: 984 - DNA, 2210 bp, Homo sapiens
gtacactctttcttgcctgctgccatgtaagacgtgtttgcttctcctttgctttccaccatgattgtgaggcctccccagccatgtggatctatgtgtcctgggtttcttctttctggtgggctcatggtctcgctgacttcaggagtgaagctgcaggccttaacgctagatggaaaagttctccaagtccctacccggcccagaagcccagctggcttcacctctcactggcactggctgcaggacttcgccgcacctagcccgggcactcccgcagcctagaggaagctcctcccagacaatcaagaggaaaagaggggaagcgagaaagagacggagagccgccagcgtggccaaagaccccactaagagggaagggcggtccacgcacgggacccagcctccgatcaagcccagcaggtgtcgagatcgcgcccacccggaccccacgccggccggccagcgctgcgcgcagccccagctcctgcccgcgcctctctcttcacacttcccggagagcagagggagccggctcaggcctcagccagccccagagaagggccctcacagcgcagcggggggctgaagggctcctggagcgcggccagagcagacatggagaacgaggaggcgcggagagcgagcgagggctgctagcacgttgtcacctgtcatgatgttgtaaaataagaaagagtaaatgttattttagaattccttcctggccaggcacggtggctcacgcctgtaatcccagcactttcagaggctgaggcgggcggatcgtgaggtcaggagatccagacaggagatagagaccatcctggctaacacggtgaaaccccgtctctactaaaactccaaaaaattagccaggcgtggtggcgggtgcctgtagtcccagctactccagaggcagaggcaggagaatggcgtgaacaccggacgcggagcttgcagtgagccaagatggcgccactgcactccagactgggcgacagagcgagactccgtctcaaaaaaaaaaaaaaaaaaaaaaagaaaagaaaagaattccttccttgtttcctgctgtagttatttgtcaaaagatacaaaaaaatctgtaagagttaagcaaagctatatttattttgctgcaacactactatgcacagtgacatggtcaagttgctttttataatgatttctagtgatattaatttgcatcagtcgttttcatgaccccaaagccaactcaataataccagaaaatacttgtttgcttgcctacattttgtaataatccaatgtcctgaaataaaaatgaatattttcttcctggaaataaagtgagataattttcttcttccgagagactcatgaaacaagaacagaatgacattatactaaactatttcacaaatattggtcaacagtggaggcttttttgttcatttatgtaaatttcatttggctctattttcctaagttgcattttatgcttctttcacctgccttgccaaatgaaaagaaaaatcatttatttattaaaacatacactaacagaagaaaataatttcactcttcacaaactttggcattatgaagtcactggttactggagatttaatttctgtaacatatctgaagtggttatttttttctttccatgaaggaaaccttttggaattaagatatggtacattgaactaaacggggattgcatttgctgtttctgtgataacattttacatctgaaattccaataaatatttctcttcttgctttgaggtggtttagttaatcattcaggtggttggctttcataagaagtaaaggcgtgccagcatttatagtttcccagagttcgtttattgcctcaagcttgtatttattcttattacactcactagcttagataccaggtgaatacctgggagaaagaaacaattaatttcaaaagtaataaaaataaaagaacaaaaaaatacaaaactattcaacatgccagcaatcctgttctcttaagaaacctacctgttttttttcaatgtgtgtaagttttagcattttatagcaattagatgagtctgtatatcattagaacttctgtccttggaattaggacaaaactattttctgcaataaatatttggctctagaaatctattttgacctgtaccataatgcatagcagcagaattaaaatattgtgtgttatcatc

SEQ ID NO: 985 - DNA, 2637 bp, Homo sapiens
attcccgctttccccattgctgagccaaagctcgcaccaaggagggctccaagccgggaccccggttggagaaaatcctggggcatccagcggcacggagggtgggaaccagatgagcctccgcctccgcgcacggtgcccacagtcacaccccccgttggtccacctgtgccaaaaaaaaaaaaaaaaaaaaaaaaaaaggcccttcatgcgcccgcagagggctctgaggaggcacgagatgaaggcagggtccgcggagaggtggcaagctgaattctgagaagccgctctgaccctgaccctggggtcacccctccgtggtgcaggtggcaccggagttgggctcgagcggagagccgcatgcccatcccagtctcaccgagccttcctaggaggaaatgccaggcccgggcgcccctaccccaaggcggtgatcctgtgaagctcgggccacctcagggtccagcgccctcagagatggatggtgttgacaccgaggaacgaggccgttccctctctttggtgaacggagaagctcctggcgtggttccctgcgcagtctccgggtccccaggccgtgatggggtgagcagggtgcgcggcgtggcccgggacacgagaccggccaggagcaccccggcgtgagcagcgggaaggagggcccgcccggagatttatggccgcagccggccccctgtgcactgagcgcgtctcggtcctttcccagccaaacagtggagtggaggacccgaccccggctggaggaagaggccagggccggaggcggggccgagaggagctggaatccatcggggctgggcctggcgcatcagtccgaattctgcccgccttgcgccctggtctcggtggggtgtggggcgctggcgccgcgtccctggtctttcaggcaggtccgggcagctcctggctgggttggcccgacctagacttggcgctgtatcgcggctgggcctgtcgcagcgaggggacggcgaacgtggctttcccgggcacagcctctccgggttttagccgcgcccgccagacacgggacctgcggaaaccggcgcttaagacgcccagccacacggcctctcagctggcagcagaagctggcaatccctcgggggggtgcccttcaatgagatgccagcggagagtgggggctttggtccccacctggaaaggcggttggcgcgacgggtggagtggctcgggtggccgcgccaaggaaaggatcctggctttttctttccccgctgggggagggataaggggagaacgtgtccaagcggccagcaataccagaatttgggaagaaccgggttcaacgccgaattgagagagaccgtctgatcgcgggagctgcaccagcccggtgtagggggctgagcctgcgccaacaaaagcgcgacaggggtgacggccgggctcaaggttggcctgtcctttggttttaaaacaaagacggagaattttgtcagtcgggaggcgtccagggagcggaggccggagccagcggcctaggaacacagggaaggcctcggctccggtggcccaggctggccgcggagaagcacgctgggccgggcctcggctagccagggcagcttctcccgcagctgcggcttagggctacaaggaagacccccccagcccccagccgattttctacccagtcaaacacacacacacacagacacgcgcgcgcgcgcgcgcgcgcacacacacacacacacgcactttcactcaattgcgtccacagtttttggccacctatcccgctgggtaaacaaaagtatgagggggtggggagggggaggggatggaatgggggtggggcgcggaagatggcggctggacctggtggcctatggcctgtgccctatggccacagcgcccaggcctggtttttacatttcaatgtggcccgccatactggggagggcgtttccctggaccctgaagcctagttagggatgtcctagaggctcccctttacgaatgggggcacccgggctgcagccactactacttcgcttgggatcggtcctccgccccaagatggctcccagtcgctgtttactcagcgactgcagggacaccagggcgcggggccggggagcgggcgaagatcacggagcgtacagattggcccgggcaggtggcctctccgcgtggcccgcccgcgcccccaagcacgcggcagccctggaaaaccgcgtgggcaggatgcgtcctggccgccccgcctggtggccaggaactgggagccaccaccaccaccgcgtccccaggccctgctccccggccggactccggtggctgcagggccgcgcaaatatggagtgggtgccgggggcaggtatggaagggccggtgcaagggggctgggcgcacaaagcccaggcggggaggggacctcctctgccccgaaccgcggccctaatgaaataccggctgggttcgtcacaccgccgaggcgcacacttgaaaaatgcaaacgccattggcaaatccagggcaaacaggcagaatttttattagcaactaaatgatttatggcacacgtaccccgccgtcacaattacggcgtctcggagcatccagggggtgaaaacattaaacatttat

SEQ ID NO: 986 - DNA, 2196 bp, Homo sapiens
atatccccctgccaggaagttaagtctattcctagtgtgctactgtaaaggtgcaattagtttcaaggtgtaattagcagcgcacagactttagattggtggacaaaagtcctatatttaagctgtattgcatcctgctatgtacttactatagaacagggaggagaatctttgctgttttcccccctaaaaaggaaaaggataatcagcattgtcaacatcggccatatttaagctttaaaattttaatttaaacatcattttgccaaagacctgtcagtgtttttgttgtatgtttcaggtggattttctcagatgtatgcctgtgtttgtgactggcttggattttcatacagggaagaagtacaatgggatgtggatacaatttatcttacccaagacaccagggaattgaatttacaagattttagtcatcttgaccacagggacctaatacctatcattgctgctctggaatataatcagtggttcacaaaactgtcctctaaggatctaaaactgtccactgatgtctgtgaacagatcttgagggtggtgagtaggtccaatcgactggaagaattggtgttggaagatgctggacttagaacagattttgcacaaaaactggccagtgctctagcacataatcccaactcaggactccacacaattaaccttgctggcaacccactggaggatagagaaaccactaccaagatcaagagacagaatgttcccaccgttctccagacttaccttgtggtttgccccagtgattaccagccctgtcctctaccacttggaaaagataactactattctgacttctctcatgatggatgagctttgcctgttctttgcctatgtactcctttgtgtgtggcttcttttgcttctctttgtggagagattttttaataatagatttgtttccttgaatagatagagaactattgagattatttacttcttcttaaattagttttggtctgtcatgtttttcataagggatttgttcctttctattaaaatgatagttttttgacttacagatgtgtttataccctcgagttataattcaacgcctgtaagatctttacattctcttttcatttgattttgataatttgatctctgtttctcatttatttattttaccagtcttgttggagtttattaattttgttagtatttttaaagaaccaactttgttaaatttacttatttttatggctgctatctatttaactggattcttccctttttcttattttttttccttccttctgtttacagaggtgggtgaggattaatttgctgttttttgagctggataattagataattattttccagttttttatctttcttaaaatatgtatttaggtctattgatttctctctaggcatggctctagttagatcccaaagattttaataccatagtttttagatttaactcaaaatatttttaaaattcccactgtgatttttgactcttttgttatttagaaatatattgcttaagttataattatttggggattttctaattatcttattgttataattcctattttaactgcagtagtggtaacagagaacatacaaatattctgtgtatgaattcacagtactaaggaacattctgttatttgttgagactttctttatggctcagtatatgattcctttgggaaaatatttagtgtggactttgaagaaatgtattctgtagttactgggtacagcattttaaatatatcagttatatcttttttcattatgatcttgatattttctatatctttactgactttttctgttcatttattagctactaatagaagtgtgttagaaaacttccattattatatatgcgtgtgtgtttatgtaatatgtgtattttccttttgttactgtcagatttactttatatattttcagatgatgttaatcagagcatagatttagagtaattgtatcttcttaattaatgaaatattccatttatctttagtaatgtttcttaaaatttaaattgtcttattgcagctacatcagatttcttttagttagtgtttgtagcatatcttttttcgcttttacgttcacttctgaatacatgtatctctaggtgtatctcttgaaaacatttgatatttttattcaaataaatcatctttgacttgt

SEQ ID NO: 987 - DNA, 3934 bp, Homo sapiens
atgatgcggaggacgtcctccggctgcccctcgctctccatgcagaacatccgttcccagggtggcccgggccaggcctcgggggtgcaagggttggcctgacccccctgctcccgcccccgccgctccgggaagaaagggcgctgtgtctggcggcgagcaggcgccggaatcgtgcgctcgggcccagggttgcacggagcactgggcccggataccgggggcgcaaagcttcgggtgcggcccaggagaaccccgccgagggaccccagcctaccggttctcggaggggcgaaagagccaggtcaggttgagggacaggaggaggaaggggtgtccaggagactgactgaaggatgagagtgtcctccggggtagcgaccggcctcttggaaaaccagaggcggagggagcagccgcggagtggagggcgcaggccgggacctgggcctctcctcccacagcaagccccccacccacgcatcatctgcagccgagcggcacctacctccctctccctacctcatccccgctcgcgcttccgcaggtcaggccacgcgggtgccagcgcgggctgtgggcgccccagccgcggccttggggaggggtcaggactgaagttcactctctctctgcgtggtctcgaagcccctcgcccaccccgcactgtctcctccgccgccggctgcgcgcttggcggatcttctccatcagttctgcccactggagtgggaaggggctgagccgagccgcgcgggaattgggaggcggggaagcggggaggcgggggaagagacgagatgaaatcggcccgggacagcagagaggcttgggatgggatggaagggaagagggggtggcggttgcgttttccagggctgtagaggtggtgcgcctattggaaccgactcctcagcctcctcccccgtccccacctcggggactggcggaccgtgcgccccgcaggcttaacactccccccgacaccctcgctccgagaaggggtgttctcagtgggcaccgactagggctccagatcccccgagacccagaccagggctccggtagtctgtcctcgcagcttccaacttttccgctccttcggaaaagcgggcagttcagagatggttcccagggcggcagctgcaagcccccccgcgcccccctcaaaggttcagactacactcaaaggctccgaaagaagcaaaaccaccagctctaccctccttctgcggcttgcctcacccttcccacccgcctcgaaacccacacacacgggaaaggggtgcatggagcccgctccccggtttacagaagcagcccggagctaccgtcatttcatcttcacgcggggtctccagcgcgcctggatcgttccctagccaagccaagccaggtctaatcaatcacgtgcgttatttcgtgcatcacccaagccgtcatcttatccgaggcccggagatgaaggagggaaaaaaaatcgcttaaatgcgaccccaaccaagccggttttccctttttctttctggttaacagcacccccccaacccctcaaaaaagcaccccaggcggtggtagctgacagttttcttaaagaataaggggggggggtggggggggagagaaaaagaaaagaaaagcctcccatgcctcacagtttgcagaagtcttcctgccttcaccatctccagccctggccgcttctctccttcttctccctgtactgcagatacatatatatttttttcctcctctccccgccacagtcttctgtttatttgtgtggaaggcagcgctactttgtaaacacatcacacacggccccagagccgttcaaatagctgattgcagcaaaacgcttccaaacaacggtggtctggatttttctctttaagtgaaaataaaaccaaatatttctgtggagaggttgcatgtaaaaaccgtatgaaggtctacactcccacccacacctaagaaatgcagcgagacagatgggagaaagtcctgtccaaattttccaaaaataatattaataatcataaaaggaaaaaataaagatcagatgaagtgaagctcaagtatctgcagtgaggctttccatcctttgctgcaagtcaaaatgtttaaacggctttttaaaatgagaataatgtcccagagacaggtcttaaaactgcacctaccttagctttggaagagctgcatcggccgttaagagttctttttacacgtccagatttttctagggaacccgaaacgaggtatgattcaggaggatgtattgaaagcccaggagccttccccttctggaaccccccaactagatttcctcatccagaggaatgcaagagccaccaacaccgcctagtttggaggaaattcgttgtttctgccgccaatagtctgtggacgggcagaacaagcattacaattgaagcaggaagggccaagctagtggctgaataagagctctgtgctaagagacagagaagggagagagacggttctgcaagaaaaagagagattgaggagagaggtcctgctgtctccggggctctccctctgccattggaccaaactgaatgaaatttacaaagccagcagccaatagatctccggagtcggccccatcactacagaaaccacatccacagctacaacctcatgcaaagagctgctaatcccaatgcaaaccagctgtaacggagagatcccgggtactcgggagatagagcaggtgggcatggcaaacggtgccaccgcaccagacgcgtacagcaaaccttcttcctctttgcttttttaggactctctagataccctccacaccaaacatgctgcagtatatgcaaacatctttaactgtttaaggtcacgatctccagcagtctctatgtctgcgttattgtaattcatttgggaagcaatgatataaaaaaaatttttaagagcagcaaactttggaatacagttctgtaaagtacaggacctgttttatgctcagggtatggttgagaggggatcgatgaaagctttttgtttacttctattcttatactttcatgattttgataaaatgttggaattgtgcccaggatgaggcatttgtttttaaatacgcctcttcatttccagggtccaggaggttatctttcccagggagtttcaagttgcggggggcgaggacgggggtatgacccctgtacttaaagttgagttggagaaagttggatttaaattggcaatgcaaagatcagagggcataatagagtgttgtgacaatgaacacggattttaaaatgagattgcttgggttcaagatgcatgtgaccttaggtgtgtattttaatcgtttgcctccatttctgtatctgtaaaatggaacagataatcaccgtgtaatactgtaatgattagctgagttaatgtgtggggccaggtagtcttcacaacaatattacatggtgattacttttattcttctgcttggccagaaaagttagcttttcttaaaattatttcatggcccattaattcatttatggaaggaaaaagatagtgtccgcaacacataggatatcctcctaattgcttcggctttaggcagtaaaccaaagcatgaagcctgccatggtgatgtgaaggatatttgggcagcctgaccaataatggggaaggtgatagacaccaatttggggacctggtttcatgttaagactctatcctcacaaactttgccttgttgtaaagtcagttatgttctgtgaatctgttaaactgagattaaaattacctttcctgtggatttcttgtggagactaaatgaaataatatgtataaaagcaccttttaccaacaagataggtacataaatatacacttatctattaatagatatctatacccaataataaaaaaacatatatccatccat

SEQ ID NO: 988 - DNA, 2942 bp, Homo sapiens
tggtcacactgctggccctatctgtataaaagtccagacagttgggctgtgaggggaaatgcctacctcagagtagcttaagaaagaaagatattggtttacttctgaaaagctcaagaccagctgagtttaatggcatcattaaactcattagacatggggctgggaagtggctgccagcagtttggtgcacagcctgtcctctcagcagcccaggtggcaggtgtcttgggagtggcaatgatgagaccagctgctcatcctgggctggtcattgtgactcagatgtggagtgggctggttagtggttctgggccacttgtccatctctggatctggcagctccatctacacagtgtcgggctaggcatgggagcattctgggccaggagaaaggggattggatcctggatggtgggaaccgcaggtgtccccctccacgtgcctgggtccaagactgctctgctctggaccttctacgccttcagaggtacaagttgcagtgctacccttgctgaacctacaaccctgttcaagtgacaacttctctgagtctcatacgaggatatagaaagaaccttctgcacagggctgttgtgaggattaaccgtaataatacaagaatatctggcacttgcattcagcaactcaccgcttacttgttcaaccaggtaaaaaggttctgatcccagtgttgcaggacagaaagacctccccctctgtggctgcagatgtgacccagcacagaaaaaatggcaggtgaaagacaggcaggaagagcaactaagaaggtgggaggcacctccataagatgcctgaggccatggggatgaccgttcacagagctagtccctcgagcaatgtgttaaatctactgaactgtgataaagcaacttctgggtgaattttgtcctgctacaaggtgtcatggaatggcaaggtggcagatctcagaagtggatccaatggtttttttttaggtaaagcagaacattcctggggatggtgtcaaactcccttccatactgttgagtctgctgatgattacactggcttctcctctttgccccatcatttcacaggttcccatcttaaagaggaagagaaaggaaggagggaacgaaggaagggagggaggaaggaaggaaggaaggatggaaggaaggaaggaaggaaagggagagagggagggaagaagagagggaaggaagttatcaaacccaagctctgtgcagagcaggagacgtttccatgggacccctagaatagataggttcttgctgctctcctggtggatggagatgcccaccagtagctgtgagagtctccccgaaggcctgattgtggctccaagttccgtaggactcactagtcttttttccctagagggtcttgccattgagaggcaggtgatgtgctgtttcagaaaacaaaattgggacatgtcctgatatgacatccatcaaatatatacagataggtgtcacagcccccgaaaaagcttatctcttctaggccacacatagctatttcctccaactgtgtcagacattacaaagtttctagcaatcaaaacaagtcaaatgccattctcaggacccgttggaggattttttgctttgttttggctttgtacggtatccataccattttccaaattcttttgtccttacatattttgtttttcttaaaaaaaaaaatcacctataatcccatcaccagacaaaaccactagaaagaaaccaacattttagccatgtttttctgtatataaaaaaagtgtgtgtggaatttttcataacactattgggaccatgacatctatcacattttttattaggaaatggccttcaacaatatgcatttaacaatatgcttgatgtctgtgtaatatttcatcttacaaatatatcatgatttatttaagtattccctgattgcttgcttctaactagaaaaaacaatttttctaagtgtcaccactgggttagagtaatctcagccaatcctcctaatagcactgtgagaccagagttatgataatcttcagttaatggacaagggacatgatggtgtggaaagataaataaactacccaaagacaactagctagtgagaccagcatggacagtcaagcccagtgcatgtaatctgtgctcccctgcactgttgctcatatacttggacccttgcatacatgattttcttattcatcttgaaagagaaatgttagcttactgtttttatttgcatttatttcgttgcttttgagtttgagcatctttccatttcttatagaccatttgcatttgttttcctacaaaatgcctgttcatggcttttgcccatttttctgttagccttgtcctatgtatacacacatgtatattattagttcactatctgtcaggtaaattccccagttttcttcttgccttttaatgttgttatggtcatttaggactagaaagttttaaatcttgtatgcctatcagtattttactgtgtgactattcccattatttttatgcttagaaagttttcattcctatcaagtatagataaatgttcagttctactattttattttaactgtgcagtgggttcatttttggcattgaattaattaatctatctggatgttatcattagtttccttctgaaaaagtcagtccaggctgggtgtggtgactcacacctgtaatcccagcactttggaaggcctgagtccaggagttcaagaaccagcctgagcaacatggcaaaactgtgtctctatcaaaaatacaaaaattagctgggagtggtggcacatgcctgtgttcttagctactcaggaggataaagtgggaggattgctggggactaggaagttgaggctgcagtgagccatgattgcacccctgcactccagcctcggtgacagagcaagaccctgtctc

SEQ ID NO: 989 - DNA, 2284 bp, Homo sapiens
gagtcagctgccgccgagggaccagcgcgggtctagctgctgccgccatccccaccatccctgaccgcgcctgcccgggctccgcgccaggaggagcggccaggccgagccccggcaccgcgcgctcggggaccccgacggcgcccagcccggcgaggggcctcggggaggacgaggaggaaaggcggcctcgccggggacccggccatggcgctggacttcttggctggatgcgcggggggtgtggcaggcgtgcttgtgggacacccgtttgacacggtcaaggtacggcttcaggtccagagcgtggagaagcctcagtaccgcgggacgttgcactgcttcaagtccatcatcaagcaagagagcgtgctgggcctgtacaagggcctgggctcgccgctcatggggctcaccttcatcaacgcgctggtgttcggggtgcagggcaacaccctccgggccctgggccacgactcgcccctcaaccagttcctggcaggtgcggcggcgggcgccatccagtgcgtcatctgctgccccatggagctggccaagacgcggctgcagctgcaggacgcgggcccagcgcgcacctacaagggctcgctggactgcctcgcgcagatctacgggcacgagggtctgcgtggcgtcaaccggggcatggtgtccacgttgctgcgtgagacgcccagcttcggcgtctacttcctcacctatgacgctctcacgcgggcgctgggctgcgagccgggcgaccgcctgctggtgcccaagctgctgttggcgggcggtacgtcaggcatcgtgtcctggctctctacctatcctgtggacgtggtcaagtcgcggctgcaggcggacggactgcggggcgccccgcgctaccgcggcatcctggactgcgtgcaccagagctaccgcgccgagggctggcgcgtcttcacacgggggctggcgtccacgctgctgcgcgccttccccgtcaacgctgccaccttcgccaccgtcacggtggtgctcacctacgcgcgcggcgaggaggccgggcccgagggcgaggctgtgcccgccgcccctgcggggcctgccctggcgcagccctccagcctgtgacgctcaccccgccctccttccccagggctccttctcagaaacctgggacataaattggcccctgagtcgattgccctgcttcctgctgggatgctgcgagctgtggagtctatcagacgtgggctgaattttgctgatcagctgggtagttttggccgagaactgcacttgcctcagtgttctcatctatgaaataaggaccctcatgcccacactgtagagtcacgaagctcagagattattcccagcagcagccagcacctggcctggctgaggccattgcaccgttatcctggaaactgaggcagacactccagcccctttctgggatcctggccacgtcattgtgctcctgccctgcaggctggctcccgggggtctctgatggccaaccaaggggccacccagggacctctaactccacacatcctccacccgggggggtggtgggccacccctctggtctgtgttagggacagaggaaaacttggtgtgcctcctggtgtcacagaactggatcctctgcataccccagcttctccacatgccactgctaggggtaccccagctgctgccactcctgctggagggtgaactggggaccctgcaccctccgggaagccatggagtctgctggaggcaccatatcagcctgcgggactagggtggggagcaaacaggccagcggtggaggtctggacagttcaagtgtgatgcagctgtggcaaggagaaatccttccgcctctgggcctcaggctgcctgtccataaaatggggacatggccagctgacggacaactgagtctccggcccacctaccaccgccagccaggatcccccaaagtgtgcagagggctcagcagagaacagtatgggaccccctcaccaggcctggaacacctccagccacaaagaagccaaaggtcagtccctctgctccccagcaaacggtgcctcccaggcattctcagtgccagggcttcatccctgtgaaggcacagggcctgctagtgggcacaggggtggctagttggggcctggggcagaggagggctgcaccaggcgtcctggggaatgtgctcagtgaagacgacactgggctttgcacagcctggtgtcgctgtacagaaactgtcaagggaataaagtgttctttgtttttt

SEQ ID NO: 990 - DNA, 3614 bp, Homo sapiens
gtgcggggggcgccgaatctagatcccggcgggcctggagcgtgggagtgcgtgggcgtccccgggcgcggtccaagtccgtccgggggctgggtgcccaccccgacacccactcccgcctggccctgcccgaacgatgggctcccgggccttaggcgtctcgggtgaacgggaaggagctctccaagctgtctcaggagcaaactctgcaggccctgcgctcctccaaggagcccctggtgatccaggtgctgagacgcagcccccgcctccggggggacagctcctgtcacgacctgcagctggtggacagtggcactcagaccgacatcaccttcgagcatatcatggcgctgggcaagctgcgtccgcccaccccgcccatggtcatcctggagccgtacgtcctctctgagctccccccaatcagccatgagtattatgacccggcggagtttatggagggcggcccgcaggaggcagaccgcttggatgagctggagtatgaggaggtggagctgtataaaagcagccaccgggacaagctgggcctgatggtttgctaccgcacggacgacgaggaggacctgggcatttatgtcggagaggtaaatcccaacagcattgcagccaaagacggccggatccgtgagggagaccgcatcatccagattaacggtgtagacgtccagaaccgggaagaggcggtggccatcctgagccaggaagagaacaccaacatctccctgctggtggcccgacctgagagtcagctggcgaaaaggtggaaggacagcgaccgggatgacttcctggatgactttggctctgagaatgagggggagctgcgtgctcgtaaactgaaatcaccccctgcccagcagcccggaaacgaagaggagaagggggctcccgatgccggcccaggcctgagcaacagccaggagctggacagcggggtgggccggactgacgagagcacccggaacgaagagagctctgagcacgacctgctgggggacgaacccccgagctccaccaacaccccgggaagcctgcgcaagtttggcctgcaaggggacgccctgcagagccgggacttccatttcagcatggactctctgctggccgagggggcggggctgggagggggcgacgtcccgggcctcacggatgaggagtatgagcgttaccgtgagctcctggagatcaagtgccacctggagaacggcaaccagctgggcctcctctttccccgggcctccggaggcaacagcgccctggacgtcaaccgcaacgagagcctgggccacgagatggccatgctggaggaggagctaaggcacctggaattcaagtgccgcaacatactgcgggcgcagaagatgcagcagctgcgtgagcgctgcatgaaggcctggctgctggaggaggagagcctctacgacctggcggccagcgagcccaagaagcacgagctgtccgacatctccgagctgcccgagaagtcggacaaggacagcaccagcacctacaacactggggagagctgccgcagcaccccgctgcttgtggagcccctgcccgagagccccctgcggcgggccacggccggcaactccaacttgaaccggacccctcccggccccgctgttgccacccccgccaaggcagctcctccaccggggagccccgccaagttccggtccctctcccgggatcctgaggccggccggaggcagcacgcggaggagcgcggccgccgcaaccccaagacggggttgaccctggagcgtgtgggccctgaaagcagcccttacctctcgcggcgccaccgcggccagggccaggagggcgagcactaccacagctgcgtgcagctggccccgacgcgaggcctggaggagctgggccacggccccctgagcttggccggtggccctcgggtgggcggggtggcggccgcggccactgaagcaccgcgcatggagtggaaagtgaaggtgcgcagcgacggaacccgctacgtggccaagcggcccgtgcgagatcggctgctgaaagcccgtgccctgaagatccgggaggagcgcagcggtatgacgaccgacgacgacgcggtgagcgagatgaagatgggccgctactggagcaaggaggagcggaagcagcacctgatccgggcccgtgagcagcggaagcggcgcgagttcatgatgcagagccggctggagtgcctgcgggagcagcagaatggcgacagcaagcccgagctcaacatcattgccctgagccaccgcaaaaccatgaagaagcggaacaagaagatcctggacaactggatcaccatccaggagatgctggcccacggcgcgcgctccgccgatggcaagcgggtctacaaccctcttctctcagtcaccaccgtgtgagctgcccgggcgggtacacggcccaggcccagggaaccccctggggccccggccctcactctcctatagagattgtgtgtgtgtgtgtgtgcgcgcgcgcgtgctcgctgtgcgcacgcacacatctcgtctgggtgtgcgcacagggctttgttagcagagagaagcccctgaggagaagggacgcttttcttccttctgcccaagtaaagtgaccatgccagtggccagcactgggggcacacctgtgatgggcaccccttcagctgtgcgtgtgcattccccatcccccatgctcttgcgtgtgcttgcacgtgcacgcacacacacacccagtgctctctccacccgacccgtgtacttgcagacagggaagctgagctgaaaggagcacaagagagtgtccggcttcgctgctgagcgcggcctctccccgccgctgcgcactgcagttatttgtagacaaaggcacccctgatttttgtggtttttctccctttctgtgcttgccaatagttgttttgttttgtggacctgccctgggggctggcagctccttcaggcagcctggcagaagtggaactcccctctccactgatggctgggaagggagttggggaggaagagtgggagggagggctggggatggatgggagggaaggggagggaaaggtgggaggaatgggaagcagctgttctggtggcttccactctgaggtgtgggaacggggagcctctggggggcacctgtttccccagtgactcagagagagcaagactgcaggaacggaggggtcctgcagggtgtccaccaagaagtcacagagcccgttctgcgccccacaccatctggagcaggggcttctcttctgagtgaactgaggaaggtgcttagatggtgagggctctagaaaccaagccccatgagcagcagtggaagacctcgggccatgcggcctggggaggacttggtggcgatccgcaacctggaccccagtgagaggcggtgggctgactgggaaggagaggcccccaacctcctcaggatttgcacgtgtgaactaggctgcctgtggggtgccccttaggcttggagagccccagattggaggcagacagactgcaccaccccttccccccctgcatctcaagaataaagcaagctgcctttgtacttggttg

SEQ ID NO: 991 - DNA, 1842 bp, Homo sapiens
gatcaatattctttcttatgctgttactattaattaacacattttttaaccatgccattgaacttttgggtgcattaaagtggaacccaagctcctcattagataataatggcatttggactgagtgccatattcctaaatttccaataaagtggttgatatagagaggacaggataaagccctatagtgtgcagttatatcaaaacagctagtctccactttagggaatgcctttactagagattacatgaaatgtctgcttataaaataagcagagatggcaccactaagcagccacctgaattgttttcctacaggaatgattacttttcagatccatttatgttttcatgctcaatacttactccccttccctgcaacacccaaagagtttacttttgcaagtcatttggtcttcagtctactactgaggaatagagaggcactaactgctttacccaggatcagaactcatgttcttaccttctattaatagagtacttgagcccgatggactaactggtctcacattttctctatcttggttttacttccataaacatcaatatctttacccacatgatttttccatcctcccatttttttccatatgtattagggttcaggaactatgatgctaatgatcacatttcttcctagttcctaatttcattagtgccatttcctgatatctacagaaacaattatcaatacatgtagctgcttgagccttatttagaaggctagcctttcttttccaagtgctgtcagaatgtatacatttagtctgtctttttcccttttaggagtctttgttctgggttgatggcaaaattcctctttttacatgtgagatttttgatttcactgaattctacctagatttttatggacattggattttaaagaggaaaacactcattttcttagtaagatattggtgatacatagctatgccattgatttccatactcctgagctttggggagggagacagtggccaagtagcaggcagaataagatcatcactcatgtcctgaatcaatcacactttccctctcggattgtgtatatgctctgccacttcctacatattacatcctgagtttttaagtaaagtggatcttagccagatttgagtctaatggctgattcatcggcatagttcttggcgttaacatctcagtgtcctctttagttctctttgaggattcatgtcattgagggcctttgtgcctccacttgtctcagtatgaggaagaactttggtgtgagggcggagctatgtgaagggttgctgggttgggggattagttcatatggtccccatgccatctatttacttttggagagaggggactttgagtgggtgggtatggatagatgttcctcaaggaaaccctgctggctaatgggcactacatctgtgtattactgtgattctctctgtaagctccccatgtggccaaggacccccctcctaccagggcacttcctgccacctcattgcactggtctcaaccattcagcctgctgctgctgcaccatgttgggctgcggtaggatagggaaggggttctgttgattgctaaatgttgcctaactttatttccctctcccacatttcatgcaagggagtggacctaacacatgacttgcattctcttcctatgttcagaaactccagggcttgcccacgtgtatgtatgagtgaccaatggagcttggaattctttatctatatgatctgtccgaaaatgagatcttttgtactggaatttgtgatgtagttgatcattcagagccaaacgcatataccaataaagacaagactgtcatat

SEQ ID NO: 992 - DNA, 1947 bp, Homo sapiens
aggtattttaacatatcatgaaaggcaggcctcctggtgacaaattctctcaacttttatctgaaaacatctttatttcttcatttctgaaggataattttactggatatggaatttcaaactctgttgttaggtacagagcagaattttgaagatgcattaattctttcaagtcatgaaggcagtgtacaagagcaagttacaaaatggcggcctgagaccaaaagaaccaatgaattatcttacagagacttgcttgctttgcttcctcttttcacaacaagaagacagacatcattaatttttaaaaaattactatttgacctttcggagagccagccaaggaatcatggatgtatgatatttgacctagattttgaagacagtttctacaaagagaaaagtgagcaatggccacgcaggtgatgaagacagtcttcgagaagatggggaaacatagaaacatatgacctgctcaaaagtacaagagattttgcgtgactaaaaatggtatgggaggggcatcccagagaaagaagatgcaaagttgagctgacagcagaccttcaagcacctcaaattccaggacaaccagaagtctttccttaagcgagaagcagaaatgcattttggatattttgcaagagttcatgtaagctatattagttaccagaattagcaaataaaaatacaagatacccagttaaatttgaatttcagctaaagatatatttttctagtgaaagtgtgttccgtgcaatatttatgacatagttatgttaaacttatttgttgttcatttgaaattcaaatattattgggcatctttgcaacccttagcataatcagggcctttcacttggatttcctaataccaggggctaacagaatctttaagagccagctgtcattatatatcatgttcatcagtcattttgggcctttcaaccttttctccatagacctaaagttaagaaaaaagacatatttgcaggtttgtgtggaaagcactcgctagaactgaagctccctgcaataacttttgaagtagcagaaatggacttagggctcatctgcaggcacattgcatctttacctaatcttcagacactgcttatggcttggattgcttaggccgtagattgatcattaatctttaggacggtccggtgtggtggctcatacctgtagtcccagctactctggtggctgcccaagaccttgggagccccccactgttgcatcagcattcctggatatgagacatggagtcaaaggagattgttttggagctttaagacttaatgactgccctgctgggtttcggacttgcatggagcctgtagcccctttgttttggccagtttctcacatttggaatgggaacatttccccaatgcctatacccccattgtatcttggaagtaattaacttgttttttattttacagaatcataggcagaaaggactttccttgtctcagatgagactttggacttggacttttcagttaacgctggaatgagttaagactctgggggactgttgagaaggcatgactgattttgaaatgtgagaagggcatgagatttgtgaagggcaaggagtgggatgatatgatttgtctctgtgtccccatccaaatctcatgtcaaattgtaatccccacatgtcaggggagggacccgaagggaggagattagatcatgggagtggatttcccccatgctgttctcatgatagtgagtgagttctcacgagatctgatggtttaaaagtgtgtggcagttccccccttgcttgctctctctcttctgctccaccatggtaatatgtgcttgcttctcctttgccttccaccatgattgtaagtttcctgaggcttcccagccatgcttcctgttaaacctgtggaaccgtgaatcaattaaaacttttttattcat

SEQ ID NO: 993 - DNA, 3511 bp, Homo sapiens
agaggcgcaggcggcggaggcggctggggggtccggaagtcaacaccatgtcaagtctgcacaagagccgaattgcagatttccaggatgtcctgaaggagccctcaattgcattggaaaagctgcgggaactcagctttagtggaggttgtgcccagacatttccttcttccagagggccactgactacccttgcctcctcatcctggacccccagaatgagtttgaaacccttcgtaagagagtggaacagacgacactgaaatctcagacggtggcccggaaccggagtggggtcacaaatatgagctccccacacaagaactctgtgccatcatccctaaatgagtatgaggtgctgcccaatggctgtgaggcccactgggaggtggtggagcggatcctgttcatctacgccaagctcaaccctggcatcgcttatgtgcaaggcatgaatgaaatcgtggggcccctctactacacctttgccaccgaccccaatagtgagtggaaagagcacgccgaggcagacacctttttctgcttcaccaacctcatggccgagatccgggacaactttatcaagagcctggatgactcgcagtgtggcatcacctacaagatggagaaggtttactccaccttgaaagataaggatgtggagctctacctgaaactgcaagagcagaacatcaagcctcagttctttgccttccgctggctgacactgctgctgtcccaggagttcttgctgcctgacgtcatccgcatctgggactccctcttcgccgatgacaaccgctttgacttcctcctcctcgtctgctgcgccatgctcatgctgatccgggagcagttgctggaaggggacttcactgtgaatatgcggctgctgcaggactaccccatcacagatgtctgccagatcctgcagaaagccaaggagctccaagactcaaagtagcccggcggcaagaggcccacgttcgggagagaagcctcccgaccctgtgccctggctcccgggacacatagaaacctgtaggaacccagcctgaggggaagccacaggatcggcccgagacccaggccatgcccactggggacacactgtgccgtgctccttctgccgccacgcccagctccccacctgccctgcactctgccctctttgcccaggatactgaggagggctggagctcgggaagttgtccttcctgggccagggccgtttctggcactgggaggctggcaggggcccctccctgcctcggctctgccgccccagcctcagttcctgcttctggtcttctcctgggctccactcaggggaggtgcttggccaatgggccagaaaccgcttctgagcggggcacttcggctgctccacagggaaggcgacactgaaagctgagtcctgccgtctgtctcacccacagatgtctgtagtcggtcggtgtgaatgtgggcccaagtccccaggcatcttctccgtgtgtgtgtgtgtgtgtgtgtgtgtgtgtgtgtgtgtgtgtgtgtgtgttagggagtgagggtctctcaggcctccaggtctcccagcccctccttctctgtctctacctctctgcctgtctccttccacctccttcccagagtgggactgtgtcttgcttcatgattcctctctccattactctccctgcccttctctgttggggtgccttatcctgagccacctcctctccccgcttgcctctgctcccctgaacctgggagacagatgaggagactggctcagcaaggcccctggaggtcaagcttggcctttgcctcctgttcccatcccccagccctggctcctaggtcctcccaactgggagggagtcctccgtgcctcacttagagggttctgaacccgttccctacacagaaatcttggaaaccaaatgctgctgagtaaggatgaagctttgagcctcctgcccctgctttctgcccagggagggagaaggaagagggggagctggtttttctggaggttcccccagaggccctcctgtccgaaaagaaaaggaccttgattctgagcccagggtcggaacccattgcttcagaagagttgtcattccctcggcttccaggtcccaacccagggttgggttgagtgagtcccacaaagggcaagtggggcccgaggaagcctctctggggccaggggtagctgagcttaaaggccctgggtcctgccagttccaggagggccatgtctgtgcctctgtgtacccctccacccgctgcgggctgagggaggtgcagggccttctctgacccctgcctgagctgttcccagggctggagcaggtgtaccctgagcaggggcagctggccactcccagttctcaccaagtcacctccctccttgtacaaggtttgcgtccggaagccgggtgccatagtgaggaccctcgtcctccagactggctggcaggagtcaggccccagcagccctcctgcccccaaagctttccgagtctggtgggcaggacttctcgctgcccttccaagcccggctttgggccagaaaaggcttccccaggtggctcttctaccaggcttttcctttgatgccgcctggatttccgcacctgcctgtctcctctcccagagcacagtgtttgggagactttgactatttattcagactcctggctatgtattgcacattggcaagtgctctggggatgaggcatgggtataggaagggagaaaggagttggagacaagatcctcttcattttccaagatcaaagtcagcctcttctccccatgcttctaggaactgcctggttttcaagcaggtcctggctgagcgggctctgagttctgtactggaattgagtgtaaagatgggaagagaactgggctgactccaggacctccaggatgaggcagaggcatgatgcttcctgctcacctgggccaccctctctccaggacttgtcagctggtggttcagccccttctccaaccccttcataagcttgggccactgcctgggacccagcagacactgcccaggactctttagtgcactcactcttgtctgccccctaccttccctcctggaaccacactacttgaatcaccattactttgcctcgctggcagagttgggtcaagtgccctctccttgaccttgagatgaaggtcaagagcacagggaccaggccttggttaggctgagctcccagcaggacaccgcctgcagaaaggacctgccctgataatgtcccttccccagattctcaagcagatgcccaagggaggtccccacagagccagagtgcctgaggcttcctgcttgagaacctgccccctggatcttggacacttacagattgagctgtatgaattcagcgggtctcactccagagggtcagaacgtttgctttagttttttcatctgttttgttccttgagtcagtgctgttgatgacgagttgtcttgaataaatcatgtgttctttgc

SEQ ID NO: 994 - DNA, 4173 bp, Homo sapiens
atttcagagtatttcctcatactaaagtaaaaaggaagtaacaatctagtaaaccctgtggcctgtacccttaggcatggtgcctgacacttgattccaaaatggtcttgcttcctgccattttgtccaaggattttggttgccgtggctgactacgttaggacagtactatttctggaatattgccaagcctgccttaagtggacctttaatgcagtggtgggtgaacttaccaaatcagcaggtagtacgtcattgaacatacagaacaggttacataaactttttttttttttttgagatggagtcccactctgttgccaggctggagtgcagtgatgcggtctcggttcactgcagcctccacctcccgggttcgggcggttctcctgcctcggcctcccgagtggttgggactgcaggtgcatgccaccacgtcgagctaataattgtatttttagtggagatggggtttcgccatgttggccaggaggaccattttagcccaggagttttgagactagtctggccaacatggcgagactccatctctaaaaaaaattttttttttaattagccaggtgtggagtatgcatgtagtcccagctgctccagaggctgaggcgggaggattgcttgagcccgggagttcaaggctgcagtgagctatggtcatgccactgcactccagtctggcaggagagtgggaccctgtctcaacaaaaaataaaataaaaataacaatatttattgaaatctgtatgtgagacagcttgatctgggcttgaattatttttttttccaacttggtacagagattgttggaaaatagctaatcctcatccacctcaaaaatgtcagtgcttgttagctaattcagaagaattgtaagagctctgtatgttagctcagatctgttagaaatgtcaggtgtttgattggattgggttatccagattggttgaatttagaaagtagcttctgtggttttgcagtgagaatgcaactttatatttctaatgtggcttgttaagactttgggatttcaccaaaatagtaaaattttaaaacttttgggcagagcacagaggatttttagggcagtgaaactaatatgtatgatactataatggtggatatatgtcattataatttttccaaacccacagaatgtataccaccaagagtgaaccctcatgtaaactatggacttgggtaataatgctgtgtcagtgtgggttcatcagttgtcacaaatgtaccgctctggtgggagatgttgataagggagaagctaggcatgtgtgcgggtagggggtaaatgggaaatctctagctttcccttaattttttttatgaacctaaaactgctctaaaaatgcctttgggaaaaactttggggaccaacataggtgccaacttattttactaggtataaggatgttaaaattatatgattcagtatcaccaccattttataaaacattttaatatcaaaacctcagacaatggcaaccttacactgacaataaagaaaaactttaaacattaaaaacaatccaaatgcaggaacaggtacaccataaaattttatttcacagtgttatgctactgtttattgatataggtttgtcagtttggagatcttaggattgcaaaatagtaacattttataaattttggtgccacccaaaatggagtctgaatggccatttctttctggtatttttttttttttaatgtcagtcattgttgaagagctattttcaactacgtatgtgaaaatggaagcaactcttctgatgctactgtaatcaattcagaatattctggggaagaacagcagccccatctccagaaagggctaaaatgaacaatgataggccaagtgaccagttaataagcaccacagagaagggcaatggaatatatagctgctttcagccaggtctgcaatgtgggaccttgatcctgagtgccaaccctaaagcatcctgggagttagtcggcaactgccaggagaaggcctaccagtcagtggacaaggctttggcttagttagtatatgtgtgcttctgccacagcagaacacaactcactataccttgggtactggttgattcttagattttacaggctgaacaaatgactgaaataatttcctgaatgaagaaccaaaatgtggttctgtaagcactgagtgcgttgatatagatgttgatagtgatacacttggatccccaaagacacagggtctttgagctgtattattattaatttattttttggagggagttttgctcttgtcacccagtctggactgcaatggcacaatcttggctcactgcaacctccacctcccaggttcaagtgattctcctgtctcagcctcccaagcacctgggattacaggcacccaccaccatgcccagctaatttttgtatttttggtagagagccgtgttggccaggctggtcttggaactcgtgacctcaggtgatccccctgcctcagcctcccaaagtgctgggattacaggcttaagccaccgcgcccggccatttgagctgtattaaatcaagttagacaactgggaaaagatgaagagagaaaaattaaagttatttatagtgcaaacccaaatgagatttctctgtcgctaaattcacaagaaagtaaggaatattattcaagattgcaaattctttcgctagatatacacttgctcagagtctaaggattttcttcataaacaaccacagtgagtattctgttcctaaaacaagcctttttaatccagtttggtggaggcagcagagtgggatggaaagagtaatcatctgtgatccaggaagtctgctttataattaccaagctgaccttgaacaaatcactctcttgtccctagtttcttttgttgttgttttgtttttgtttttgaggtggagttttgctcttgttgcccaagctggagtgcaattgcatgatctcagctcaccgcaacctccacctcccaggttcaagcaattctcctgccccagcctcccgagtagctgggattacaggcatgcgccaccacacccagctaattctgtatttttagtagagacagggtttctccatgttggtcaggctggtctcaaactcctgacctcagatgatccgcctgcctcggcctcccaaagtgctgggattacaggcttgagccaccatgcccggccgtccccagtttctttataaaataaaatggtcctttctgactttgaacatgttatgacgagttcagtaaatcagatcagggtaagtgtttcagaaggttcaaactattcctcccaaggcagttttggtgacctcaaacaggctatgactaaaaacacctccaaatacagttgacccttgaacaacatgggtttgaactgtgtaaatccacttatacacagatttttttcaataaatacattggaagtttttttttttggagttttttgacaatttgaaaaaacacaaactgcgttgcctagaaatatttttaaacattttaaaaggtatgaatgcataaaatatatgtatatactagtctattttatcatttgctactacaaaatatgcacaaatctattataaaaagctaaattttctcaaaatttacacacatatacagtacatggtgccattcacagtccagagaaatgtaaacaaatgtaaagatgcaaggttaaatcatagccacataaaaccaactggagtacgtactgtactgcaatcattttgtagctgcctcctactgctgcggcagtgcgcgcagatgttgtgaatatccactcaaaacgctatgtgatgctaatcatctctgcatgagcagttcaactctccagtaaatttcatgtggcagaaaaaagtactctctcgagattcttaagtatttttcatcatgtttagtgcaccataaacctcatataataccatgggacccatatgaagtgccactagtgatgctggaagtgttctcaagaagtagaagtcatgacattacaagaaaaagctgaattgcttgatatgtatcaaagattgaggtctgtggctgtggatgcccctcatttcagtcccaggattctttctgtaaacagacaatgtaaacttaacggaatcaataaatacagtaatgtaaatgt

SEQ ID NO: 995 - DNA, 3719 bp, Homo sapiens
agcagcgacagaaatatggtagtggtcgccacgttagggtccgtgggggcctcctgaggcagcctggtgccaacccgcacgcccaggctggggctcatcctggccctgcccacctcggggtcggaactacggtgggcctgggatgggggcgtcaagcactttcgcgccgtatccctccgccccccttcccgacaccctcgcggcgagcggttcttgccgcatcctgcgcagcccctgcctactttggtgcagaggcgtggggggcgggacgcgtctttcccgttcggatcgcggggaaagcagtggctccaagtgagccagaggagagctgaggagaggagggggaggccgacgacctgggccctgggcctctgaaggcctactttaaggctggccaattctgcaagaaaggcaaggaggaggagactggctcacagctctggaggacccccttctgtcagctgtggggcttgacaccacttgaacaagaaaaggagggggaaactgcaccacatcagtgaagatccacctccagtggctgctctgctggtggtggagttgctgctgacaaccaccctcaacgggtctgcacccatccaggaaatatctgtcttcctttagcttggttgtacctgttctcactctatctgtattattgaattattgactgagactgtgtttgggaaggaggctgagtgactactggactggatattgactctaactcttattcccaagcttatatccttaatcacctaaagatcagagtgtgaagaaacaaacctgtgacagatctgtggttgaggtttagactacgggaggagtatattacctgactttctttgtaacttgtaccatgactggggcagagattgagcctagtgcccaggccaagcctgaaaagaaggctggggaagaggttatcgctgggcctgagagagagaatgatgtccctctggtggtcagacccaaggttaggacccaggcaactactggggcaaggcccaaaactgagaccaagtctgtgcctgcggcaaggcccaaaactgaggcccaagcaatgtctggggcaaggcccaaaactgaggtccaagtaatgggtggtgcaagacccaaaacggaggctcaaagaatcacaggggccaggcccaaaaccgatgccagggcagtaggtggcgctcgttctaaaactgatgccaaggcaatccctggagcaaggcccaaggatgaggcccaggcatgggcccagagtgaatttgggactgaagcagtgtcacaggcagaaggagtgtcccagactaatgccgttgcttggccactggccactgctgagtctggatcagttactaaatctaagggcctgtctatggatagagaactagtcaatgtggatgctgaaacctttcctggcacccagggtcagaaaggaatccagccctggtttggaccaggggaggagactaatatggggtcttggtgctattccaggcccagggccagagaggaggcctctaatgagtctgggttctggtcagcagatgagacctctacagcgtcttctttctggactggagaagagacaagtgtcagatcatggcccagggaagagtccaataccaggtccaggcacagggctaaacatcagactaatcccaggtccaggcccagatccaagcaagaagcctatgttgattcctggtctggatctgaggatgaggccagcaacccattctccttctgggttggagaaaataccaataacttgttcaggcccagagtcagggaggaggcaaatatcaggtccaagctcaggacaaatagagaagattgttttgaatctgagtctgaagatgagttctataagcagtcctgggttttgcctggagaagaggccaatagtagattcaggcacagagacaaagaagatcctaatactgccttgaaactcagggcccagaaagatgtcgacagtgatagggtcaaacaagaacccaggtttgaggaggaagtcattattgggtcctggttctgggcagaaaaagaggccagtttggagggtggagcttcagcaatctgtgaatctgagccaggaactgaggagggggccattggcggatccgcgtactgggctgaggaaaagtccagtttgggggctgtggccagagaagaggccaagccggagtctgaagaagaggccatatttgggtcctggttctgggacagagatgaggcctgctttgacctaaatccctgtcctgtgtacaaggtcagtgataggttcagagatgcagctgaggagcttaatgcatcctccaggccccaaacctgggacgaggtcactgttgaattcaaacctggtctttttcatggggttggcttccgatccacaagcccctttggaattcccgaagaggcttctgaaatgcttgaggcaaagcccaagaacctggaacttagcccagaaggagaagagcaggaatctttgcttcagcctgatcagcctagtcctgagttcacatttcagtatgatccttcctaccggtcagtccgggaaattcgagagcatcttagggccagggagagtgcagagtctgagagttggtcctgcagctgcatacaatgtgagctgaaaattggttctgaagagtttgaagaattccttttattaatggacaaaattcgggatccttttattcatgaaatatctaaaattgcaatgggtatgagaagtgcttctcaatttacccgagatttcattcgagattcaggtgttgtctcacttattggaaccttgcttaattatccatcctctagagttaggacaagttttttggaaaatatgattcacatggctccaccttatccaaatctaaacatgattgagacattcatatgtcaagtgtgtgaggaaacccttgcacatagtgtggattcccttgagcagctgactggaataaggatgcttagacacctcactatgactattgactatcacacactgattgccaactatatgtccgggtttctctccttattaaccacagccaatgcgagaacgaagtttcacgttctgaaaatgctattgaatttgtctgaaaatcctgctgtggcaaaaaaactattcagtgccaaagctctttcaatatttgtgggtctctttaacatagaagagacaaatgataatattcaaattgttattaaaatgtttcagaatatcagtaacattataaaaagtggaaagatgtccttaattgatgatgatttcagtcttgagccgcttatttctgcatttcgtgaatttgaggagttagctaagcaactacaagcccaaatagacaaccaaaatgatcctgaggtgggacaacaaagttaatatgattaaccacctgccgctgatcagccttatgttcccaaagagccctgagtagtgctttggtgttcacagtctgtttttttgttgtaacttatattttttaatgctgatgttaactttgtcaaactcttgttttgagctggatcattttgtggatgccaaatgaatatcaaaactgaaaacacatttgttgatatttgtcttgctgtccagattgcggtatttttcagtattaagttttcaatgaactgtgtcacctaagtaagctaccctgctattcgttgtttaaatatatggttctctatttgagtctgtgttttcaataaagttctatgttaaaattggc

SEQ ID NO: 996 - DNA, 3532 bp, Homo sapiens
ctgtcacctgaagagggctgctgaagtgaagcaaacatttgttaccctggagctgtacaagtcacacacagctccattggagagaaaactggatggaaccatttgactgaaaatccatgtcaaaaggccaacaagaaagagctgagacactgcagaaagagcaggaataaataagaggtgaagacagacagagaccagacaaggaggactcaattacagactgacagaagactcaaggaagaaaatgaagctggacctgtgaagaactgtcgaaacagctgtagaggaattgtggtggaggcagtaatggctcctttagtagcagagaatagaaagatctcgaaaataaagcctattgtcaggagacttgcacccatcctggcctacttccaagtagaaacaaaaacagaaacgaagatatccatgatacctaatgttacaaggagaagaaagcacttgtaatcacaagggtactgagaaaaggtaacagacacatttatatatgtggaaccaggaatctttctgatgactttcagaaagggtggacatacaaataaaaatcaaccttcttcttggtgaggatttgaccctggttccatattaacccaagagctgataagcacaaacctggagtccagtttttatgcaaatataacaactctgcttataccttgaattacttgtatgaagcggggaaaattttttactctctctgaacccataattaaaaaaaatctgtatgacttggataataaacccacttcctagaatttttatgaatatgaaatattgtgtgaactacctagtatgttatggagcacatggtttgtgtttaatatgtggaagctagtattgctattattgttgttgttataaacaatagcacttctatctacataattctcaaactttccccctgaagctcaagatactttagtacatgaattattattaacttcaatgcacagattgagaaactgggaaaaaatatgcaagccgcagagtggagaaagaaaattccaggtgtccatattccttgtcatgtaattgccactgtaattagatctacgtgatgatgacctttaggggactgcctcagagtgctgaattgttcaattcactagagtggcaccatcaaaatgacctgataatgttagcacaattgtccttgtaccaagcagaagagtcctttcattccttttcttcctgtagttccagggctacacaagcccagcaaaaagcagaagcagtgaatgaacaaattatttgggatgatgctagtggctgatgtctcagaggaggcaagcaccctttctcagacaacccagtttcttgactctcagccttctttggtttaactttggattgttaaccctttactgcctgaaactttgtctaactccctgtgcctttggagtatgaagttcccagtatatcatctgcattgattttggttcctgattcacaagctgtgcatcacagacctttatcttgcaattatccatggtccggatgaccaacttcagccttaaaaccaggagcagacttttccaatcaacttttgcaaattcaaggggaaagaaagaaaagaaccatgtaggctcttggatgttacttctcttagggaaaaaggaaggatatagcttgatatttttactgcagtctccccaaactttccactcatcatgctgccaacatcattattaatctgtaccttctctggaattttatgggcatgttgaattcattgtcatctccagaaaagagcaaagcatggtgtggacaattttaaaccacattcagttgctttattttggccaaaagtttaaacatttttgttctttattttttttttagcttgttaagccgtttgcagaactactgctatagattaaacctgacaggtctaagcacatagtataactgtataactgtgtgatgcacacatgtgtgtattcccttccctacacacacacacacacacacacacacacacacacacattccatcagcatgtcagatttatggaatttgaaatgtttctttctctagagaatggtataacatttacataaaatatcagcttacattttgtgaaatttgacaaattactcataaatctctctttctcccttaatctgttcttgacatgtccccaaaagttttgagatggccttagtgatacatcttatactcatgtcaagtattttgttgacatcaataggagttttactcatgtaagaagccctggattgggttaccagacacatgaagcagacaagaagcattcaaaagttgccagcgaataagaagtgtcaaataagtgtccaccacaagagcaaatatccctgggtatccattaacttcaataaacagaacatatttggcagtgtgctgtttgacatggatttacaaaggagtttgccaaatcatttttttctttctctctgtgaaatgtcagtgaaagaaaaaataggggaatggtggtcccattactggataatttctataatattgtataagaaagataagttatttgatattcaagatatgtatagtgcacagaggcaccaatttggtggggaattgatgactctttcaccaatcttctaagcactggcttttacaaagccagtcctatgacttacggccccattctgagtaaaacacatagttcaatatctcttgactggtatcttaaaaaattgtttaaaacaaatgttcttctatttctgttttagcatttatttttgtttgcacatgactaaggctgtttctttttggtaaatttaatttgctatagtctggaccccaacactgaaagaatgcatcctctgagatagggctgccaactatggcaagtagcattgcaaagtatataaatttgctctatatacttttcaaacttctcggatgcagtcactgacatttggcctgatctaggaaaccctggggattggaaaaacacaaagcatactactgtactgacatgcaaaatgtcttataatctgtctttatctttcatggctgcagtggtctggataaattagaccaaattgggctaaacactgtccttggctacactcacgtagctgttttcaacggctaataggagctgtgtgtgcacatccaaggacaggatttggccccctttgtctttgcacaagcagttgctttagttgatatgattattcctgaatgactgttttataagcagtatttttgcccagttttaatcttttttcactttattcttcatagtcaagacatttatgaatatggaaacgtgtaacctaaaatcttcggtttctggaaaaataaaaatctccctaataaaacctgtgaaaattgcaaatgaactgggaaagaggtaaagcaagtcatataaacgttggcaaaaacacaagtaacactgagaaaacgtgttaacactcattaatggttaacaatctgattaaaatttttacagcacattgatccttggcctttcaaaagggaatctgtcattaaataatattttcaaggaaaatac

SEQ ID NO: 997 - DNA, 3230 bp, Homo sapiens
gtgctttttaagacggccgggagcgcctgcgagctggatctggtggaggatgctgcggcaggtgcttcgcagagggctccagtcgttctgccacaggctgggtttgtgcgtgagccggcacccggtctttttcctcaccgtgcccgcagtcctgacaatcaccttcggcctcagcgcgctcaaccgcttccagcccgagggcgacctggagcgcctggtcgctcccagccacagcctggccaagatcgagcgcagcctggccagcagccttttccccctggaccagtccaaaagccagctctattcggacttacacacccctgggaggtatggcagggtgatcctcctctccccaaccggggacaatattttgctccaggctgaggggatcctgcagacccaccgagccgtgctggaaatgaaggatgggaggaacagttttattggacaccaactgggcggggtagtggaagtgccaaacagcaaagatcagcgggtcaagtcagccagagccattcaaatcacctactacctccagacctatggctctgccacccaagacctcataggggagaagtgggagaatgagttctgtaagcttataaggaagctccaggaggagcatcaagaactccagctctactctttagcatcctttagcctctggagggactttcataagaccagcatcctggccagaagcaaggtcctggtgagcctcgtgctgatcctgaccacagccaccctctccagctccatgaaggactgcttgcgcagtaagcccttcctgggcctcctgggggtgctcacagtatgcatctccatcatcacagcagcagggatcttcttcatcaccgatggaaagtacaactccaccctgctgggaatcccgttcttcgccatgggcatctccactgaatttacctcaagctagaaacaaatttagtttggaagaaagaaaggagagaaggaaggagagaaaaaactggagaggagaaaaatatcacatttggaagattatatgtgaagactcctaggatacaataaaatcatcatcatcgtcatcatcatcatcatcaccaccaataccatcagagcaatctgagagttcattctagtctaagaacctagccctctattttttggaggtcaagtatcctccaggtatttctttcctccctgtgcttaacagctgtgtgtctgtaacccatactgtcttttctatctcccacctgactcctctcatgggaaactaaattggtttaaatcatatggaagcattataagtactgtttagtgatgaaaataaattgattccaatcatataggtactttcctaaatactgactgatgaagtttagatgtgctgtaatttataaataaaatgaaggaggttacctggcaatatgtgagagggaggaacaattatcgtatttgagatttaaaggaaagagtaatgaacacttcccaaataattctatgagataaatattaccctgatactaaaaccagacaaaaacatcacaaggaaggaaaactacaggttaataactttatgaacttgagtgtaaaaattctcaataaaatactagcaagccaaattcaatgaacaaatgaggtttatttttatttatttttattttttttatttttattttattttattatttttttttttgagacggagtctcgctctgtcgcccaggccggactgcggactgcagtggcgcaatctcggctcactgcaagctccgcctcccaggttcacgccattctcctgcctcagcctcccgagtagctgggactacaggcgcccgccaccgcgcccggctaattttttgtatttttagtagagacggggtttcaccttgttagccaggatggtctcgatctcctgacctcatgatccacccgcctcggcctcccaaagtgctgggattacaggcgtgagccaccacgcccggcccaaatgaggtttattttataaatgcaagagtggtttaacatttgaaaatcattaacataatataccatcaatagaattaaggtcaaaaaccacatggtcatctcaatagacaaagaaagggcatttgacaaactctaacaacattttatgacaacaaaataactctcaacaaactagtaatagaagggaacttgcttaatctgatacagatatccataaaaacccaaagctaatatcatatttaatggagaaagaatgaacttaaaagttgtacttcaatgaataccatcaagaaagtgaaaaacaaactcacagaatgggagaaaatattttcaaattatctatcttataagagacttgtatacagaatatttaaaggactattacagcttaataataaaaacacaacccaatttcaaagtggacagaagattcgaatagacatttattctaagaagataaacaagtggccaaaagtatatttaaaatgctcaaaataattagttattagagaaatgcaaatcaaaaccacattgagcacatcatatccattaggatgactaaaatcaagaagtaaggcaataacaagtattgatgaggtaggttaggaactctttacacattgctgatgaaaatgtaaatgatgcagctcttttggaaaatagtctgacagttcctaaaaatgctaaacttagtattagcattttgattcagtaattccactgctaggtatatactcaagagaaatgaaaatatttatccacacaaaactgtacaaatgttcatagcaatattattcataatggcaaaaggtagacacaatccaaatgtccatcaactgatgaatggaaacataaaaagtggtatatgcatacaatggaatattattcagccattaaaaaggaaacaagtactgatacatgctccaatatggatgagcattgaaaatattttgataagtgaaagaagtcatgaaagtgtacataattgcatgattctatatatatgaaatgttcagagtaggcaaatatgtagagacaggaagtagatgagtagttgctgaggattggtgggttaggggatgaagccagggaatggagtcactgctaatgatacagaagttctttcagggtgatgaaatgttctgaaattgattatggcaatcattgcacaactttgtagtatactagaaacttttaaattgtacacttttaatcaatgaattgcttggcattatatcacaataaagctgttaaaaacaaac

SEQ ID NO: 998 - DNA, 3596 bp, Homo sapiens
taatgagtgtgacaatgagtttcctcatttgtgctcctggagaaggcggatgtggtgaagaccctgtctgcagacattgtgtgccatggcaaagccgtggagctccctgtgggtggcctgcaaaggtgtatgtgcccctcagggcagaaggcaaacggcagccaagaagctgtgcaagtagacacttaatgggacatgttagccaaatctgtaagagcaaaatattggccagttatttattgtgtagaattaataattttaataataatggaaattgggtaatggatgggactgcagcaataaggttgtagtaatccaccatgaggcacacttgtttttttccaggtttaaggataggaaagattgggctgttcaatggagaaacaagggtataatcacccctttattaattagtaagttttaatccttgaatacctcatattaactgttttaactggaggtccatggggcatcattttatcaagctagtttataactgccaaagactgactttaattttaatttattatttgttttattagagtgtctgtgttcaatatgggatattaaggcgttgggtactatgaccacaggaaatttagacaggctacagttaaagtgaagcataccttacccatccaccccccattttatatttagttgcctttttaaaaagattataggggtacaatgtttagatttagtgggatctccaggtataactgtaatttgagccccagtgttaagactatgaagctttgtcaatgggtacattttagcaaattttacaattaatttagaacctaagttatggagacacaaaagccaataggcacccttttatgttttggttaaatgtttcagtatatacatcttatttatttgtaatattagtatataatttgttgtatacatttttagtgtataagcgttggatttctaattggatcagattagggaccttccgtttagctgcatatgtacatatacatgtacaatttattatatatttgcgttaaaatagcctatctgcatgtgtatatatgtgtgtatgtgtatgtatatgcactcacacgcataaatacacagtctatttagttacctttaatgttttttcccttgtacctaggctttttctcgctttttcctttttttctgattttgtggcaatttagttggaaggaggcggtcccagcatgttgacaggcagggtgttcagagtgcccaggcacactggtggggggtggttacaggctcacgtagctcaggggcttctgcaggtctcaggggagtgggaacaaagtgtcccaccccttccccttttcctcaaacctcaagccactggtctctatggatagatcctttgcatcccaccggattgaggaatgagtcacaacagctgcaaggctcttaaagcaacatttaaaccttttggcggctgtcatttctgtgaggagggtgcctctcaccagccgcatggccggaggatccctgcagcgctttggagaccaacacccagatcctttgccctggagtgcgattaattcctcactggatgctgggggagggcccctcaggtgagcagcccaccactgacttcagcgttgctggctcggttatcagactctcatccaacacaagctcacagggaaagccgttccttgctccttgtggagggagctaccgtcattgccctgagaccaccagccaagaaagtaggtatgtccaggtagggaattcagagggacccagtgcatccaattatacaattatacccagaaggtcctgtgtaggggactgcgattgacatcaccctagtctgcagcaccaaggactgaatgagctcagtcctcttataatttaggctggactgtcacagacactggcagacacagcatacgtggtgcagccaaagtgcaaacatgccagcagcggccatgctccccagggtgggggtccagttagtaagccacgcgcagccaagaggcgaggcatgccctgtgccacacacggactcaccctgctcactgtgcccgtggtatcgaaatgtacccacgtttaattcataaaggagaggctgctgtcattgaaagaaaagtttgttacttgcatttctggagaaaaggagcgcaccaggccacgcagggccacaggaggaggacgcaccagagtggtcaggaggcagaactaggcgagcagctttccactgtgtctccatggcaaaggcgaagatgggcgggggcagagtgtaggattggcaggtttgaatgtcttgggcagtagctacaggggtggtctccagctgcctggtgcctggccctgggtgatcagggtgaggggatactgccttctgcagtggaagagtcaaatcgaggagatggactctgagttggttagtgtgcaaaggtgcactcccaagggacccctttgctatctctaagaattggcctgccctgggaagggcagtctctccccagtcagtgaggtccccaagatgtgaaaacattatacattataaaaaagcatgattaatataagctcattctagcatttcaggttacagcttctagaagaggtttgtagtctcaaatgagtaggtttttcctctagagaggggcgggcctggaccttcaagcaccccttggtgtgtttaggagctcaggagcagaagcacctgcctgcagccctgcagctaaggaagttctctcagtcactcagagcagggaggggctgagagagtcatgtgaggctcccggggtactacgacagccctcgaggtgaaggattggccctgatcataatagagaaccctgaggaagtttactgtcatgagtctcggctggttggcgcatgtgacctttgaaggatgaagatggagtttgcaacatgagtatctctaaccttttgcttttcagggatcattttcaaaaattgcattggggccttcgttatttaccatagtattttcactttcatagttttgtcacctttttgtactgtgaacagttcaaccagtgaccgacttctctctcatgctgtttaccccacacacaatttcccactcaattctgaaaataagaacctgttaataggttggaaagctgtgtactctattcatatattgttctttcatgctagtggagagtggtgtcattagcatcttaattttagagttgtgaaatgattttaccaattaggaattgaatgtgtattttttttctgtttaataagaagagcaaatttgaataaataagctggtgtagataaacttaataatcatgctttttcttgtttggagataggtgatgtgttgtcatatcctgtgatacaggtcactcatctggccttctgtttctgaagtttaagtctggtttgaatatgtaataatactactcagcatttcttgttgcctaagtgagacgaaacttaaatgttatgatatttacttcatgtattcttgtactgttcatttcaattaattggtattgtatatctaatatgtgatatttgaactgaataaaacttacagtgttgtaaatgttctttaataaataatcacacctaagtaataggctagactgatgagaaattagatc

SEQ ID NO: 999 - DNA, 3668 bp, Homo sapiens
tttgaacaccgcctcccaccccgcgggaagtgcgggcttggtttgtaccgcggtgacccccgccccctccgaagccgcagagccggggcctcgcgccagcagggctggagatgccttcttggcggctgagtttatttattataggaagtcattcgctcgtggggtatttatgtgatttggcgagtgatgtgcccggccagcgccctccttggctgcagccccgcaggaggacccggagtagggtgggatggagtgggtcgtgggaggagcgcgtcagcgcctgcccggggacccccagctcccgcgaggacacggaggcgcgcacgccgctcggttttcctggaaagtggagaaggagcgtcctgggcaggtcctctgagctcatcccccctcggattggggcgggtctgtgacggggtcacttaggacacgacgtccccccgccattcccttcccccgcccagggcgttcgcggtgggcgcccaccgccaagccccactgttcccaaggatgcgccaggtgcttcccgtagcgtcctgggttgacccttaaaaaaacagcacccctaggaggtggccggccctctcctcccagggtctctccgggtcacgatcttccaaagttcggaaactcgcaggatcgcgtgtgcaatctcccgctacctcccggggggccggggagaggtcagaggagcgagtcccgcgtccaccggcctcgcttgccccctgcccgtttgaggatagttccagggagcagggtggagtgtgcggacatctttggaggcagtgctggggcttcccgcgttggcggcgctccacccggcgtggggggcggctgcacgggcccccgcggtggggacgctgcgcacggggcaaggtctccctaggaagcgcccgggaaggagatggggcccgccaggaacccccctcactgaccagctttctgcacgccgtgcaggagggggccacttcctcggagagtattggcttttaattaaaacaagccctacaatttttacatcgggctgccacacttgtgtatcccttcttccttgaatttaaccaggagtgagcagtggacagcttcttccctatgagaaggaggtgaagcaggacctgaaatcccgtgctcagctcccacatgccccgtgtccaggacaagtcctttgctgaatcagcggcagacaccacccggagccctgcgggagcctttccctgttcttccagcatggatctgaaactcccttcccactttctgcagcctcccagagatagttcaggctccagcctcatgtgatagcatgaagagaaactggttccaacagctgtgtgctctgctgccctcatcccaaacaacagtttaaatgcacaattacgcttttctctaaggcccaaaataggataggaaagatcgttttgctatccctgaatgcctgtcacccttgtttcgtaagcaggaagtcagtcccagaatagttgttctgctccctcccttctaataagtgctgcgctgagtgtgcttgctttgccagatggttaaaacagagcaggggatagaaggacagatgtcttcaccctcatggagttcaccttccagtaggaggaggcgataggccggggtctgcacatgtgcgtgctacagcctgttccacggtgcgtggcgtgcggggcagtagagacaggatttcaccatgttggctaggatggtctcgatctcctgaccttgtgatccgcccctccctcagcctcccaaagtgctgggattacaggcgtgagccactgcaccctgccagaaaactcattcttctactccatcctacagttttccctaagagagaaacaataaaacgccaccacgaccaatggcaaaaagctggcacccactccacgacttttcatatctacacgtttgtacagctttatttttaagcattctgaaattctatgcaggagagaccccagctaggtttagggagtcctagggtttgtggagtaaatgaagtttctccctagaattagggagggtagagacaggcagagaactgacaatcctaacagctgctgtcctcagagccactgtttctgagagctgctcgctgagtgcttctagcgagttaaatggtgttcgcccaaaagacctgttcacgtcctgatcctgggaacctgtggctgtgatcttatttggaaaaagctctacattacgtctctgcagaagtaatcatgttaaggatcttgagaggacgtgaccctgaattatccggctgtgcttgacatccaatgactggtgatgttgtaagagaaagacggagggagatgtaagatatgagagaaggccacgccgagactggagtgatgtggccgtgagccgaggaatgcctggagccaccagaagctggcaaaggcagaaggagcctcctctggaccctgtggtgggtacgcagcctggcagatatattcattttggacttctggcctccagggctgtgagagaatacatttctgcagttttaagccacgcaatctgtgtccctgggaagcccaaatagggcgagaccttttgccaagtggtctccaagtgtcacgtcatcgaatccttctcccgggcttgtgccatagtctttccactttagagaggaggaaacggaggctctggggcacaaagccagtcagtggcggggcctgactttcaacccagcctgcatggggtcagagaacccactttccccgtggggcctgcggcctatgctaaggatgcttgttcatctctcctgggcccgggagtggttcttctggcctagaaggcaagagaagccagtctttcggtttcaaggtttcccattagtggagtcaggcaaaaatggtgtgttgcgcttcttcctgagctcagcctgtgagcacggccttaacatgctcagtggatcccaagacggcagcatggcggtgccagcctggcagccttagctccttgcagctgtgcttgtgaagggagcagtgagtggcttccctctgtgaccaccttgggtcctaagtttcactggggctgggatccatgcgtcttgcaattggctaggaatttcccgggctttccctcccttccctgttcagggcactgggtgtgaggcattgcatccgttcttctgctcacctgcttccccctaagagtgtgagctgtataaaggcaggaaccaaacaggagcctccacgtgttcccagttcaagggcagtgtccccttcaataattcagtggatgacttattctgcacggacactgcacacactcggccctgccgtctccggagctgggaggtgtggagctggctcctgacctatttacacaccgaggagggatgtggaaaacaggaggagtcccagggctccaatgcaaagaggagcctcttcattccctctgccgtggccgtgcaagggacagcgccttgtgggattgtgtcctccacccaattatccttagcattagtttgctaaggataatggcctccagctccacccatgtccctgcaaaggacatgatctcattcctttctgtgtctgcatagtattccatggtgtatatgtaccgcgttttctttatcgagtctatcattgatgggcgcttcagttgattccatgtctttgctactgtgactcgtgctgcaatgagcattcgcgtgc

SEQ ID NO: 1000 - DNA, 3819 bp, Homo sapiens
ctatttcttaggtaatatcatctcctaaaaaattctttttaaaacttccatgattcagatggtgctctgttttctcaggggattctcaactttcttgaattctgaatttttctttctcatgttttaaaaacattctcaactgattttttttaaaaataacattccgttgtttgatgttctgtgattttatttttctctagaattactttattttggtcttgttctttactcggattcttcttgtcgtatttctggttgttttttgtttttttgtttttgagatggagtcttgctctcttgtccaggctggagtgcagtggcgctatctcggctcactgcaacctccgcctcccaggtccaagcagcccttctgcctcggcctccagaggaactgggactataggcacgtgccaccacgcctgtctgattttttgtatttttagcagagacggggtttcaccttgttagccaggatggtcttgatctcctgacctcgtgatctgcctgccttgacctcccaaagtgctgggattacaggcatgagccaccacgcccgacttgattgttactattattttaattttatttttttgagatggagtctcattctgtctcctaagctggagtgcaatggtgtgatctgagctcactgcaacctccaccacccgggttcaagcgtttctcctgcctcagcctcccaagtagctgggactataagtgcgtgccaccatgcccggctaatttttgtatttttaatagagacggggtttcaccatgttggtcaggctggtctcgaactccttacctcaggtgatccactggcctcggcctcccaaagtgctgggattacagacaggcatgagccaccacacctggcctgtctagacgtattttaatgtgagagaatagatagactgattggaaatgttgtatataggtagagcttgttgactggtggtccttgctcattcaataaatactttagtatgtaatgtgtataggtgtcagataattcgctttatgataactggatggggaatttttggaagggaaggcaaccattcctaaaattccagaatgaaaaggatgttatacttattttgacaggtagtttattcattttccttaaaaaggaatctttcttgttgtcccattttcagctctttttctcacttttgtttttcttctccttcctgtctccccttctcctttttctttttccctccccccccccttttttttttttttactgctccttgcagagcagggctacacccataggcagtgtgaccaaagtaaccccttcttctcatttctgtccggattttttctcacttttccaggcagttagactctcctgttgtttatgtagttgggctataatcccttcttttgcatattgtaggctgtgaactttttctgctgtattttatcttattttgagcttccctgagacttagtgaaacatctggtccatttatagcctctctctcatttttcctactgttagagatttattctctgttaaaatacctagccgagtgctctggttgtgtcaggaggattgcttgatcccaggagttccgggctgctgtgcactatgccgattaagtgtctgcatcaagttcagcatcagtatggtgacctccaggttgcctgacgactggtgaaccagcctaggatggaaatgggcaggtcaaaactcctatgctgatagtggtgggattgcacctgtgaatagccactgtactccagcctgggcagcagtgagaccctgtctcttaaaaaataatagtaaattaaaatgcttttatcgtcattttagcagataagtcctgtgcttcatctggccctttgaatctaaaagtattttagtatgattttattttgttttattttattttatttattttgagacagagtcttactgtgtcattcaggctggagcgcattggcgcagtctcggctcactgcaacttccgcctcccaggttcacgcgattcttgtgcctcaacctccagaatagctgggattacaggcgtgcaccaccacgatcagataatttttgtatttttagtagagatcaggtttcaccatgttggcgaggctggtcttgaactcctgatctcaagtgatcagtctgtgtcagcctccccaagtgctgggattacagacacgagccactctgcccatctatgattttatttttaattaaaattaatctggattgttaattaagagatatcagtatactcttagggattgtggaagacagtgagcttatttaatagtcagcaggtctcttgaaagtaaatgatatcttagggctgggcgtggtgggtcacgcctgtaatcccagcactttgggaggccacgcgggtggatcacctgaagtcaggagttccagaccagcctggccaacatggtgaaaccctgtctctactaaaaatacaaaaattagctgggtgtggtggcgtgcgcctgtaatcccagatacttggaggctaaggagagtcgtttgaacaaggaggcggaggttaacagtgagcagagatcactccactgcactccagcctgggcgacagagcgagactccgtctcaaaaaaaaaaaaaaaaaaaagtaaatgatgtcttagaaacaagccttaaaagatcttaatcttactcttgctaaatgtagtataagtctaagccagcctcagctcttggcctgagattactagtctccttgtttctattctacatgtattctctacacagcagtgagggtaatcattgcaagtaaaatattgtcttacttatttgcttaaatctctcccatagtttccctttacacttagagtaaaatccagaccctttctcctgatctgtaagattgtatgcagtctcttgcctccctagttcttcacccatgttacccactggtatcctacttgtctcctgatttagctacaccagcatccttgataaattattcaaaaagccaagctcattcctcatggccttttagaattggattataaagagggtgaactgcttatcccttcttatcattcagtgctgctcaaaagttatcttctcagggaagattttcctcaccattttatctaaactatggtctttctctcccaaatcactgcctatcctgtatgctgcttttaatttcttcttagcatatatctgaaattatattatgtatttgctaatggtcttttccctattagaatgtaagctctatgagggcaaggactcttgtcttgtttactgctgtattcttctagcataaacacacacacccccttagaacaattctggatacacaatagaaattcagcaaatgtttgggtgaatgaaatggccctaaaatactattttaaaacttgttttctttccaggttatattttcttatttaatgtgtgtaaaaatgtggtggtatgaagttttttggttttaaaaccttcaatagtgagtttttgtgggcacattgtattcataagagctgttaattctagccataactttaaataaatgtattggttgcttgtgtacatgactatctgtaagtaaaatgaaggtctcttagaagttaatacagtttaaccttaaaatctgttctaaaattatttgacatttttctcactgaataagaatgagaaggaggaagcatagtgtagaaaagtagcgtgcagggtagagtggtactggattgtaattatgtaagttaaggaaataacatgctttgcctattccttgtcaccctttttttctgccttatagacaagggaaaaaaaagattgaataaaagagttttaatttt

SEQ ID NO: 1001 - DNA, 3788 bp, Homo sapiens
gtcacggggtgggagagacactctctcctcactcgctctcactggctcttcttcattcattcattcattctgtttattcagccatccaacaaatgtttacaaagcccacgctggagagtggatcgctgacatttgagctggggagagtgaagatcgattgatcccggctcgggggacggataagcgcaggcaggctccggagagttccgcacgctgcggaaaggcttctcgccctaccactcggagtcccagcttgcgtccctgccgccctcctaccaggactccctgcagaacggcccggcctgccccgcacctgagctgccctcgcccccctctgctggctacagccctgcaggacagaagcccgaggctgtcgtgcatgccatgaaggtcctggaggtacacgagaatctggaccggcagctccaggacagctgtgaggaggacctgagtgagaaggagaaggccatcgttcgcgagatgtgcaacgtggtctggagaaagctgggagatgcagccagctccaagccctccatacggcagcacctgtctgggaaccagttcaaggggcctttgtagggccactcttctgtggacgtggactggccctgctgggggtccccagggggagtttcaggccccagacacgggcaggacctccagcccagcccctgtcttcttcctctgtggtgaactgtacataggacgctgcccgccctggcccagctgccatgggtccgatgcactggcccaagccgccatctcccgcctcatacaccagcaacctgggaagacgagacgctgcgactgttcctgcagcagagcggcccggacgcctcattccccctctgggccctgggctccatgagcaagaggctgcaggctgcttctgagatccagcctgggaactgtccaggctcctctgtcctgcctgggatggaggggccactcatcaaaccctctactccccggctgccacccacactggacagagaccaccactacctgggtcttgacgcaggtggcaccacttcttgcccaaatgccgtggcctgggcccaggccccccaagcactgggtccccggcatgtggacaaggccactcaccacatctgtggctggctggaggctgccctgggcccttcctgtgaccctcagccttggaggtcagggtgccctcacacctggggatctgtgctcagccacccgatgcccgctgctccttgcttttggaggtcatccccctcccccccagtctctgcaatgtccccctgccaccctgtccaggctatgcccttcttgggctcctcctgccccatgcctgaggcacgtcccttttcgtggtttacatgacaggccagtaacaggaagggcctggggagagtttctgggctgagccacatgtgattttcctgatgggcagcactgggccacagctggggctctggttggctgtgacctcccccagggcctggctgcatcttgggtccctgtggacagagctgtgtaggctgcagatgagagttctgttctttttgggaaggagcgtgtctggccaggttctgcctttagtttgtggtgtgacctttagcagttcactcagcctgtctgggctcttggtggaaacaggtctctgaggttccttttcggccatgcttatggctccaggtcatccagcgccacagggcaggggtcctcactgagggggcgtgagccaacagccgacggctgagggcgggccgggtggagctgagttctgctgccttgcagtcgctgcgggtggagagttgcctccccactctgagcccgtgtcctcagtagtaaaatgggcagcataaggccctcctcacaggattctggcatcaagtgagatcttcagtgtaaatgaccatgtataaactgtaaagtgcaatagaaaactgtgtgtgtgaggaaagtaaggcctagagggggtgatgtgtggcacatgacaggggagatcccacagctgcagcacggggacaggccgcttccccacatccgctcatgccactgtaagcagccctagctcttgggtccaggacctcaccaggtcctcgtcagactcctgtgctcttccaggggctgctcagccccacctgaagagcccagagaggctgtcttcctacccagcaggtctcatgcaggcccagggctggggatgcaggcaagaggagggagatggccgccctgtccctctccctagctggcggctctattctgagcagttcttgctgcccgtttgctctcaggggaaaggctcacgccccccatcttagccccaggggggtaagtgggtgctggtgatgggatggtgtggcgctcctgccgtgggtgttgccaggaggctctttgggaaggagtgtcgcccggtcaggtggtgcgctcccggtcactaggggtgtacacgtgaagttgggtgaacacctgctgctcatggtacccagtgattcttgcccgagtgggcagctgagcagaggcccctctgggtcttgcagtccaaagaaccgcagagtagcccaagggctgtgggtccattttgagtggcagccaagtctgggagcccgtgtgcatcatgtttgggtcaggttggcgtggccaccactgaaataagcaataagtacgggctcctggtacctgcggatctcctgcaaacaggcccagagaacagccttgaagccacctttcccctcaaggggactgaccctgtctttaatgctgcagtggcatccagggatcagtggaacattgctttgagaaccctcctgctgttacggaggcagcacaaagctggtgacccctgagccaacacggcactgggatggctttctaggacagaaccctgtcggcgactgtcacatctcaaactaatagctgattttaaaagccagcagcagcgacgccatgtacctgagtacaggtggcagttgcagagccgtgggctgtagaaggtcagatggggcttcccacaggggaaatctgggcgtgctgtagctcggggtgactcccagctccgtcactagcagggcgacccccttccttctggagccttagctctgaaagcccccagtgggggtgcccttttagatgccccctttccatttcaaaggctctgactcttgatcttgaagccggacgcggcactggcactcggcttcagtttccactgtgacagatggaggtctcctttcgccccagcccaggtggccaagcccatcctggcctcagaacatgctgagcacattttgtagggtggcacctttttatccaagttactagctacacatcagtgtttaaagagaaaaaagtgacctttcattttttttttcttgaaacttgaggaaacaagatacatactactgatttttttttttttcttaaaactaaacgcatgactgcagagcggtagaggtgtatatttttcatactgtggggcaaagtatttgtgctgctttttggagatggactggaacgtctggtttctgtccccgggcccggcagctacgtctattttctgtagaaggtgccacagtgagacctggagccaccccttcctgccctggcgccgtttagagctgggagcccgtggactcccggcctgtttctaccttctattcaaccactctgacgtggggagacaagaagaaatagaactttttgatagtgtggtaaaaacattgatttgaactattttagtaaaaggagtaacaaacaagattgtgatagtgtctactttgagctagataaataaaggcctctttgtgagcctc

SEQ ID NO: 1002 - DNA, 4047 bp, Homo sapiens
gactcggctaatggcgtcggcgagtcttaggggcctggggagctggcgctgaagcttcttgccaggttggctggtgacacccggtgtggctgggccccgcggcagcggagggacctgcccgccttgtgggtttctcggccagagtcggcggagcctagcgggacggtgcgactgcggggggcgcctccgagaaaagccagaggtgttgcggggaagctgctgggggacgctcgagcaggctccgggttcgcagcccagggcccaagaagcgggctgctgaaggaccagagacaccgggagggagctgcctgtggccctaaggagctgaccgtgccagagcttgtttgtacctctcggaaattggctgggaccttggaggatcatgtccggcaccagcagccccgaggcggtgaagaagctgctggagaatatgcagagcgacttgcgcgccttgtcactggagtgcaagaagaaattcccacctgtcaaagaggctgctgaatcaggaataataaaagttaaaacaattgctgcacgaaacactgaaattttggcagcactgaaagagaacagctcagaggttgtacagcctttttttaatgggttgtggaaccaaggaaccgaagatcactcagctatgtttggctgctattcagagactcatgtcacatgaagtcgtgtctgagactgcagctggaaatataattaacatgctttggcagctaatggagaatagtcttgaagaacttaagctacttcaaacagttcttgttcttttaacaaccaatacagtagttcatgatgaggcactttctaaggcaatcgttctttgttttcgactacacttcacaaaagataatattacaaataatacagctgctgctacagtgcgacaagttgttactgttgtttttgagaggatggttgctgaagatgaacgacacagagatattatagaacaaccagtactggtacaaggaaatagtaacagaagatctgtcagtaccctcaaaccttgtgctaaagatgcatatatgcttttccaggatctttgtcagttggttaatgctgatgctccttattggctagtgggcatgacagaaatgactcggacgtttggcctcgaattacttgagtcagtcctcaatgattttccgcaggtctttttacaacaccaagaatttagtttcctcctcaaagaaagggtatgtcctcttgtgataaagctcttttctccaaatataaagttcagacaaggttccagcacctcatcttctccagcaccagttgaaaaaccatattttcctatctgcatgcgtttgctgagagtagtatctgttctgattaagcagttttacagtcttttggtaactgaatgtgagatatttctgtcacttctggtgaaatttctggatgcagataaaccacagtggctacgagctgttgcggtggaatcaatacacagattccgtgtgcagcctcaactattaaggtcattttgtcagtcctatgatatgaaacagcattctaccaaggtttttcgtgatattgtaaatgcactgggatcttttatacagtccttgtttcttgtcccccctactggaaatcctgcaacaagcaaccaagctggaaacaataatttaggtggctcagtctcagcaccagctaactcaggaatggtggggattggtggaggtgttactttgctaccagcatttgaatataggggaacctggatacctattctgacaatcacagttcaaggcagtgctaaagccacctacttagaaatgttggacaaagttgagcctccaactatacctgaaggttacgccatgtctgtggcattccattgtttgctagaccttgttcgtggaatcacaagtatgattgaaggagagctaggagagcttgaaacagaatgtcaaaccaccactgaagaaggttcttcaccaacacagtcgacagaacagcaggatttacagtcaacatcagaccaaatggataaggaaattgttagtagggctgtttgggaagaaatggtgaatgcctgctggtgtggtcttcttgctgcactctcactccttcttgatgccagcacagatgaagctgccactgagaatattttaaaagctgaactgactatggctgctctttgtggaagactgggccttgtaacttcaagagatgcctttataactgcaatatgcaaaggttccctgcctccccattatgctcttactgtattgaataccaccactgcagctacactttccaacaaatcatattccgttcagggccaaagtgttatgatgataagtccatcaagtgaatctcaccaacaagttgtggcagtgggtcaacctttagcagtccagcctcaagggacagtaatgctgacttccaaaaatatccagtgtatgaggactttacttaacttggcgcattgccatggggctgttcttggaacatcatggcaacttgtcttggcaactcttcagcatcttgtgtggattctgggattaaagcctagtagtggcggtgccttgaaacctgggagagctgtagaaggacccagtacagttccttttaaggatttcatgcagccaccagcatccagagttcaaaatggagaatcttgaccggctacaatatatttgaaagcaggaagatagtctaaaaaatgtttgctcctaattgagtcttctgtgagaaggacatttcttactgcagataattcttggcagctgttgttggcctcctttaaattctacttacctgagttcagtaattcatattacaggcttgcacatcaacaaaggctcctgaatgaacagcagtgtaaggctttaataaattaaactgatgggagggataattaacactacagtatacatgctaccatatctccagttggtgatttaaagtgagcttatgtacagtttgtggtgtatgtgttaatgatgtactttttaaaaagaaagaagagatatttcaattcagtcagatttattagtctggtgtttttgcaccctttttcaagtacaaaatcgtactagaattttatgcaagatggtactgtaacattccatattatctatgaccagcctttgttaacaaagggaactgatatacttgtgtgtataataaatggtacagttctgtataaaatagtgcatttatttaaattttaaaagtattgataatgttaaatgcttaaagctctatttattattaatacaaaattgtttgcttacatttttacttataatttgccttcatatgtggcggataagctcaccatatgatcatgcagttagcttcatgcttattttaaatgtattattagtgaccattaaacatctgaccagtaaggtcatgtgaacacagcagcaaatagtttatgatttgctgattttggagctttgaaatataggttcttaatacattgatacatattgtagcactatgacttcatcatacctcatttctttaaacagctctccaagctttcactgaagtctgtctgttttttatattggctgtctggattttaaagacttttcatattttatatttctactgattttgtttcccctaacaacatttgtcactgtctttgaattatgacccaggcaagatgatttcagattttctaaaatcttgcctgtgaggttttgttcataacagtgcttcattttgtaatgtcttctcaagaaaaatacctatgttaactcacaagtataaaatatgtgtgtattataaaacaatgaaaagtgtatttttggagatagtcaagcatttagaagtgcagtgaacttgctgtcacggagtaaaatgctaattatgtttcactttcctagcctagtgaaaaagaaaagtgctcttgagtacaataccttaattatttcttaaaatactgactttgacctagctcactgtattttttatttaatggattatggattacagtatttttcttctgagttaaattttcataatttatgtgaagacacaaagatgtttaaaacaatgattattcataag

SEQ ID NO: 1003 - DNA, 3890 bp, Homo sapiens
gttgctttggagaccacaggagaggcggtggtgatggcccatcgcttcagccctgtggcatccccacaggatccatgggcatcaagtaatttccctgtgctcctctgaagataaaccgctgcctgcaccagcctagcagcttccagaagctgtggatgagaagcaatctcccaccaaaagccagagctcacctgcaaagcttcaatcccaagcagaaggaagcctccgttttttccccccagatgagcctgaattcacctccagaaagtctcaatgcatcacaccaagggtcacacacctgctcatggttcttcttgaggcaaagcagctcctccttcagggactccagctgggcctccaggtcacacttggcgagggtgaggttgtctagcaccctgcgcaggccacagatgtcagcctccaccagctgttgcagcgagcgctctctctcgtacctgtaacagggaaagtgcaggagtgacagttagagggcaggaaggggcaccaggacatgactcccagctcgcagctgtaagtccactggcctgccctttgccatctaattgtgagttggcttgtcctgtgtagtgtgctcaaagcccagaaagcaacaggatgttccccactcagtcaatactaagcacctgagatgaaccaaggggagcagctggtactgaggatactgtgatggacacacagccagcacctgcctttacacacaatggcccaaaagggaggtggcaaagtaaccaggcatttgcaacacagtgcaatcactgcaggcccctctctacaagccccatacccaaagggaccctggattccctattagagtaaaagccacattgccagcatgagaggaaggaaatggctttctttagctctagaagagtgagacttgcacagtgccccgaagaaagatgataaaacacaatgcccttccagcacccagggtagaccctcctcaggtggtgtcaaccctttgactttcacatgttttcatcttaggctatggagcatgatttctgctatgaattatcagcactcacaaattaatcaagctgcagcacagaaacatatccttattaaggcaacagtttcacaggaaattgcttcaagaaaggaaaatttggtacaaaatttaaggccaagtcccagctctgccactcggtacccacatggcttctggcaagtcacaccagcaccccaagcctcagggtccccacctgtggaggagattctatccctgcccgcctgcttcacaagttgcttaccaggtggatgatgcattctagcacatgttgtaaactgttaatgctaaaccactggagagcggatagtttttcaggatcttgagcttaatgccctttgttctcttctgctataactactgggttggggtctgggtcaatgacatccgatgccacatgagacagaagcagccaacttggcattgtcccatccccatccaaccccaactctcacttggctccttcccatccctgtccaaccccaactcacttggtcctgaagtcatctgcagccaatttggcattgtctatttgcacaaccagcctattgttctccgatttggtgcacagaatctggggtaagaaagtaggctcagtaagtgacttactgatcccagagacacctatagcctcaggtgggaggaagttttattggctgaagttgaacctacagcatccgcctggacaacacaaactcccaaacttgcaagagatgcttttgtggtgtgggaaggaagatgtgcaagagacttcttggaaaaggatgaagacatagagtcaaaggaaccaggagatggaagacagtagcaaactgaacatataacaaagacttgctttcattttgccagatatgatgcttagcccaatataaataagaagatctggccggacgcagtggctcatgcctgtaatccccgcactttgggagaccaaggcagatggatcacctgaggtggtgggccggatttggccgacaggcagtaagcagattcctgacccctgatctggtgcaccgcaaacctcaccttctgctggagctcctggatggtgcagaagtaggactggtagtttcggcacacgctggactcgtggcacttgctcctctcatggagtttggtctccagttctgcattgtcccactccagctggcgcaccttctccagcacaactctagctaccaaggagcttcaatgacaattcctccagctgatggatttggccaagagtcagagagtctagcaacaacctatgcattgacagtttatttttgtgatgactcaattttacttctgattgaaaagcaaaatcctcttatcttctagatatgggagaaagtgacataggttctaaccaatctagactacagcccttctttttctttcaatgcttatattctctttcctcctatataatgaccatttctagcaacaggctaatttaaggtgtggagagaaatattcttctagtcaaaaactgtttttgaacacctacaatatagactgagtaatggggcgggcccttggaaatacagcaggagagaagtcacactgaccctcctcatcctgacttacttgatcctaaagtcatcagcagccagcttcgcgttgtcaatttgtacaatcagcctggcattctcagccttgctgcacaggatctgaggaaaacggaaagacggttcacacacaaagcaccatactctaagctcccactccatgtgtggtatttacgctcatgtccaagagaaaccaagaacccaaagctctctggaccttatgcagattcctcctgcgaaggcttctgccttctcagacccagcatgcccaggcgatcccacacctcaccttctgctggagctcctcgattgtacggaagtaggactggtagtcggggcacacggtggactcgtggcacttgctcctctcgaggagtgtggtctccagctctgcattctcctgctccagctggcgcaccttctccaggtagttggccaggcggtcattcaggaacttcatggtctccttctcatggccattcagggtgtttttgccgtaggccccacagattccgatgttgccgggaatgtgacaggtccctggcaagggacaagcagtgtgactggttgggggcagacagaggctggggcggcccaggggagtcgaccccacacggactctgttggcgtgtgccacgttggccaagaggcacatggaggcagcattggcctctgccacaggctggcacccaacatcgataggagagacaaagacatttcttgctccaggagccatggtgcaacccagagggcatgaggaggtgctgtagaaggaggtcatggtgtagggctgaggctgcacaggagcttcagatcagctgggaaggctgagccactgagactgaagcctcctctcctcccaacccttttataccccatcctgggcgggtgttggctccagtgctttgacctcctgccttgattatctacctgttgtggtgccatcatcctgttactcagctgctgagtttaccatgagaagttcctcagctcattaaagcaatgttgacaaatctgagatgcctcttggctcttccatatcaggttagctgttggtgggaagtcagagactcactgtttctgctcaacaaacaccagcagttgattcaggccccaattgctctctctggactatggtctctgtggatgtggtcacaatgaaggctcaaatctttccgtcagtaatttgtgtagcaggagacacagagaaccaatgggacccactggatctttcgcctgtgcaagactgaatcagcctttcctttgaagagaaaatatcagttaataaaaccaatgcatctactgat

SEQ ID NO: 1004 - DNA, 3374 bp, Homo sapiens
agtgttttatcaaacaaaagacaggctgacatctttaaagtatggtctttattaagtagggagcaaatcattccacaccttccctcccaatacctccctcaccagtgacttcaagccttcaaacaagaggggacacctctccccacttcccagtgacctttctccgcccctcattgcatccatgagtgacaccactgagatcagatgcagtgatgttaattgaaatggacattaagggctcacttgctcaagcagaagcacattagaagaaatataaacgaggaagacattgggtcagtaacatttgttctaatgagaataaccatctctagagcatcttgttcaaaaaggattgagtgcccaggaaacaacagatacatgaggccttccacccccaccccacccccaatactcagaagtgtcacacatacttgcagagacttttcaatcatccttgcttcaatcatgattccccaggtgcatttctgtgggtgtcacccagcacattccccctcgtgttctccatctgtttctccaaatctacttctccatattattttaagagtttgtgaccagatgttggtaacatgtggtcccagatgttcttatttgctatacctcaggaattcttgactaagtgacccaagagcttctcaactttggatccaataaggggaacctaaggctaaaagaatcccatctggagtagagaggaagatacccaattacccaatttttttgtttgtttttgtttgttttctgagacagagtctctctctgtcacccaagctggagtgctgtggtgcggtcatagctcactgcagcattgaactcctgagctaagcagtccttctgcctcagccttccgagtggctgggactataggcatgtaccaccatgcccagctaatttttaaaaaaagtttttgtaaagacagggtctccttatgttgcaaaggctggtcttgaactcctgggctcaagaggtcttcccacctcagcctcccaaagtgctgggattacaggcatgagccaccacatctagcccaagtttctgcataaagaacatgaaggttttccttagatcatgctttacatggcacatcatgtctttatggttattagtgggcagttgcaaggtatagataccatttttgtctatgctgtatcatctcccaatattcttaacagcatctgacttaaaaaaattttttttttgagacaaggtcttcctctgtcacccagtatggagtgcagtgctgcaatcatggctcactgcagcctcaacttcccaggctcaggtgatcctcccacctcagcctccagagtagctgggaccacaggtcgtgccaccatgcccagctaatttttgtatttttttgtagagacagggttttgccatgttcctcaggctggtccctaactcctaagctcgagcaatctgcccgtcccagactccctgtaagtgcttggattacaggcatgagccattgtgcctggccagcatctgatttttctgtgagcctctactcctattcttggtccaggccataaagagtatggaaactaaagtctgactgcctaggtttgaatattggctctgccattgaccagctatgtgaacctggaaaaattcctaacctctctgtgcctcatataagaaatgtggagaatagtatctacctcatggagtttttgggttatatgagttaattcagataaaatgtttaaaagagtgactggcacatagtaaacaccccccaaatgtcatctagtattaatattattactattagttcagaaggggctgacttcattccccctggccctggtgatggcacctgacccaggcctggccaatcaggacattctgtccccctgtccaccatggagtccttctccatggtcagtcataccagtcatttggattggcactgtgggctgtgatctaatgtgaactctgaaagcctggtcatgctgggccaaagctgcaaagtaaaggtaaacatcaaatctgggctggttcatcaggagagaacattctgagtagggagacctggggactatccagtttcaccttgcaggtgaaggcccactctccctactctagccgttagttagaccccatgaaaataattgcagtagactgttaatttgatggcttccagtgaaccatgcttctggcattcatactcttatgtagtcccctcccacattgattctggactttgccatattgatgcagggcaggtaagccccagaattggggcttagcccgagaaggttcttcacttcatccaggaaagaattcaagggcaaacaggtggtggtagatgccaacatttttttttttttttttgagacggagtcttactctgtcatcaggctggagtgcagtggcacgatctctgctcactgcaacctccgactccctggttcaaatgattctgcctcagcctcccgagtagctgggattacaggcagacaccaccatgcccagctaatttttgaattttagtagagatggggtttccccacgttggtcaggatggtctcgatctcctgacttcatgattcacccacctcagactcccaaagtgctgggattacaggtgtgagccactgtgcccagcctagatggcaacttttattggagcagcagtgtccaacagcagcagaggtactgctccttgtggaacaggactaccccctaggcagcatgcccagagtagcagctcaggggtaattctgtcgtcatatttatacccacttttaattacatgcaaattaaggggcaggttattcagaattttctggacaaaggatgatacttccaggccattgccatggaaaggggtggtaacttttaggtgttgccatcactgtggtaaactgacatggtgttgctgggtatgtctcatggagaggtgctttcactgcttccctgttcacctagtcttcaatctggtccagagtttcagccccacctctggagttgagtcctgccttctccctcaatgtgacaaatgttggccaatggtatatcgcagttgtgatgcaagcagaggcttggtaaatgcctgcatactggggtttgtcctcttggaatgctcatttgtgggagccctgaacaactatgtaagaagtctggctaccctgctggagagaacacatggtgggaagagactaaaattatgtgaagagagtcaggccagccatcccagcttctctgctgagccccgccatcagccaacctgccagctgaatgcaaccgtaagagtgatcaccagcaagatcactagaaaaaccacctaactgagcccaccctggattgaacaatcataaacaaataaaatggttattgttttaaatcac

SEQ ID NO: 1005 - DNA, 3811 bp, Homo sapiens
gcggccgagaagaggctggggctcgcggcgcggctgcagccgtcctgtgcgcgcggcgcgcggctccggagaggcgcccgcagtccagggcggcgcgcaccgcctcgctggcgctcagagcggtgccttttccccgagactcccggcacctcttcagcgcaaagattatttaatgtaatggcaactccacgggggaggacaaagaaaaaagcatcttttgatcattctccggatagccttcctttgaggagctccggtaggcaggcgaagaagaaagcaacagagacaacagatgaggatgaagatggtggctcagagaagaagtacaggaaatgtgaaaaggcaggctgtacggcaacatgtcctgtgtgctttgcaagtgcttctgaaagatgtgccaaaaatggctacacctcccgatggtatcatctctcctgtggggaacatttctgtaatgaatgctttgaccattactacagaagccataaggatggatatgacaaatatactacatggaaaaaaatatggactagcaatggcaaaaccgaacctagtcccaaagctttcatggcagaccagcaactcccctactgggttcagtgtacaaaacctgagtgtagaaaatggaggcagcttaccaaggaaatccagcttactccacagatagccaagacttatcgatgcggtatgaaaccaaatactgctattaagcctgagacctcagatcattgttccctcccagaggatctagaagctcttactcctcagaaatgtattcctcacatcatcgtccggggtctcgtgcgtattcgatgcgttcaggaagtggagagaatactgtattttatgaccagaaaaggtctcatcaacactggagttctcagcgtgggagccgaccagtatcttctccctaaggactaccacaataaatcagtcatcattatcggggctggtccagcaggattagcagctgctaggcaactgcataactttggaattaaggtgactgtcctggaagccaaagacagaattggaggccgagtctgggatgataaatcttttaaaggcgtcacagtgggaagaggagctcagattgtcaatgggtgtattaacaacccagtagcattaatgtgtgaacaagtatctgctcgctcgtgggaccacaatgaattctttgcccagtttgctggtgaccacactctgctaactcccgggtactcggtgataattgaaaaactggcagaagggcttgacattcaactcaaatctccagtgcagtgtattgattattctggagatgaagtgcaggttaccactacagatggcacagggtattctgcacaaaaggtattagtcactgtaccactggctttactacagaaaggtgccattcagtttaatccaccgttgtcagagaagaagatgaaggctaccaacagcttaggcgcaggcatcattgaaaagattgccttgcaatttccgtatagattttgggacagtaaagtacaaggggctgacttttttggtcacgttcctcccagtgccagcaagcgagggctttttgccgtgttctatgacatggatccccagaagaagcacagcgtgctgatgtctgtgattgccggggaggctgtcgcatccgtgaggaccctggacgacaaacaggtgctgcagcagtgcatggccacgctccgggagctgttcaaggagcaggaggtcccagatcccacaaagtattttgtcactcggtggagcacagacccatggatccagatggcatacagttttgtgaagacaggtggaagtggggaggcctacgatatcattgctgaagacattcaaggaaccgtctttttcgctggtgaggcaacaaacaggcatttcccacaaactgttacaggggcatatttgagtggcgttcgagaagcaagcaagattgcagcattttaagaattcggtggacccagctttcttctgtaccccagatggggaaatttgaatcacatgttaaacctcagttttataagagggggaaaaaaccgtctctacatagtaaaactgaaatgtttctaaggcgatatgataatgcaaacctatttcatcactctaaaagcactgacctcaaaaaaccttataagcacttagatttaattgcattttccataggttcaactactgctgaaagtctggatttcagaataaagcagaatgtaagtttcagttgaggccatggatttgattgttccatggctggaagttccctttagatttcacattttatatggctgatcaattttcatacattgagaaaccaagtcaatcaagcaggaatcatttaaaaaccagataaagccatgtttttcttctgtgacaatttatcagtatctttaccaatgagccttaatttttatataggtccaatattgagcttttacttaaaatttagatagaacctttttttggatacagcacaaactccagttgacagtaaaatgaagcttctaggtattttgtattgtacatatttcctcctactgggtgttcaaaagaaatttaaattcaagtaccttttgtgataaaatgttttagatttgtgcacccattggcaaaacaggaaagtttccagataggtattgtatcattgagaatgcagcacagatagtgtgggcttcacactatagacacagaatatagctttttcttaaagccaaatttgggtgataggacactttaaatatccttaattttggcaaccactagcaaaaaaacttgtcagaataatttaaccaagcccctctccacttcttttatttaaaagcactgattcaattgctaggaatatttttgcagatttttctttacagtattccataggcaggtccactggaaaactgcagaaaaatgtgagctctcctggtaaatagtatacattttataagctatattttaaaggcctaagaacatggcaagtatttacttttatcttttttttaaaaacactcatgacagaaaacagtttaataatatctcattctaaaataaaacactggttgcagggtcttcaggatgcctattttgccaagaaacttcagtatacaggttagaaatatgcttttgtttttgaacaataatatactggtttgctttaaagaagggactaaatatgactttaaagagacttcaaaatattgagtattttaaaaatttaaaagtaggtcagtttataacgagtaaatacctaacacaccaagaatgtgcagtgaacctcaggcatttaagacacctcccccaccgcccgccccccgccccccccaatcaaagtgtggtcccaaaacaagccaacagctgtatatctcaaaagttaacccaagacaactctgatatttaggttatttgttgagactcattggtactgactggcaagtattctgctttaaagtatcatgtattaaaatgtttagacagcatgtgttttaaagtgataaatgcaaaatgttaagtttgaaatggttaacagtaaattattatgttagtttccaggcacttgaactgtgctacaagtaggggaaaacctactttaaagtatggtaaatgtgtgttttaaacttcctatcaagtgacatacttcatttgattttttgtttaagaagccatggtacttttttcttgagttactttggatatgttttttcaatgccatctgaagattttgtaattgagtagcagtaaatatacagatttacaatgttttaactacagttcatgaatagctggttgtgtaaaactaataaaaaactagactttcacatgt

SEQ ID NO: 1006 - DNA, 4075 bp, Homo sapiens
actttttgtaaacgccccgcacagcctggaccggcctgcccccgcccagcgagcctcaggggcccagccgacagccaggctcacgcgcccttgaaatctgccggtactcgctctgcgggctgggctgggagatgacgaggaccccggtggggtctgcccgcacccggccaaagcccaggaagctcgggccccagcgaggaaaggcgctccaagcctcctcgcggctttcagaatccccagccctggtgaagaagaggatgcctgatgcgtgcaccctgggaagggctggaatcggtctccccaagatgtgccttcacatggctgtccggcattcgaaggctcagaaaacagggccgggaatcctgcaacagcggcagaagccgcccgcgcctcgggcttccggcggcccagctctactagggaagcgtcgcggctgctctgaggcaggcagcgcttcgctagaaccactcagctcgtcccgcgccgccgccggctgcctgaaccaggttccgctgtcccctttcctagcgggaccccgaaacacccggcggcttcccgctcctgagcgggagagaatagagcttgctgcaaccctctgcttggagggatggcctctgcggtgcttggctagcaaagggaagcttcactgtgtctattagtacatccccatacactccacgcctcaacaactgtcagcactcactccctcccggcccctcacagggccctttgcacccacacctcagggactcggtgtccctccactcaggtcacgttactccatccacttctctctccttctccctctgtcaactccaaatcccctctagttctccctcccctcctacttctctcacactcaccagctacacgtactaattcagattttgcacatgttggtggaaaacatgtcaagccaatgtgcagaccctaaggcttttcacacgctgctcactttcgcatctcacggtgcagaaggaccaatgggctccaggtttacaagcctgactccgagaagcctgttgattctctgatgtccttggcctgtgattcgggtgactgggctgccacctgggtgttttcatgatgggactgccgcacagaccacagagaagctcaggtactgagcacgttccagatacactttaacatgcacaggccactcacacaggctttatctctgtctcgaaactctgctgagtttgctgctcagaccaacaaggtgcagcagcagacacccacatagcaccaggtctgaagccagtgggtattagtctgcctggttgggattagcaaagtcagttactcacatatgtgcttgggagagaataggggagtggagagagagagagagatattgaggaagaggaaagagaagcgacctcctactctgggaagaactcacacatgagagctgtttcctgttgttaagtgtctcactgagctcccctctttctcccccaggaagggcttgagaggcagtagaccagagctctgggctcctctttaccttgctgatgttggggtatgagtcctccaacaccattttgtcccaaggagtatgtgccccatcgtcaatcaggcagaatgcagggcagttgtcggcctttttcatggtggaggccaactgggaaaaaggcagaagggtctgggtcctgggccaagtgaggccctcttccctccaaagacccgtgggatgctctcagaggcggattctagggtggtgggagctgctgacaagtttcctctgatatccctcatgacatctatggcccaaagccattttgttcagctctgaacagtgagtgccttgccagtaggcctcaggcttgctggggaacatgatgtgttcttaaaagttgccttgttgcctttctccacacccagactgtaagcgctgatgggcagagactctgccctccacttctcactcagtgctccccaccaggatgggcttaatgccttttaatagaattagaaaatggttctgctggacagaattgggaaatgccactttccttataatgaagttataatgaagttagaatttccaagaaagggactgtagctgaggaaaagcggtttgatcattgacagccagctcaggatctgagagttctttgccatttggggttattatagctgcatggccatggtgctgaaccttaggcaagggcaaggacacctccctagttcccagtcatggtgaggacctgtctgaaacattcaaactagactttactggaaacagagaagtctctgcattcagggcagctggcttgcaaggtaaggcctgcagtctccacccgcacgctaacccatgaggggatgccagagagagcccttcccccttggtcctcattcctggctcaattttctcccacaaagcgggcactttctaaagatgataggcaactgccatggaggaaggcagttttagatgcctagctggcacaaagtccagaggaagggagggagaagggctgagttttgtattactgttctacctttggagattttcctcatgccaagatagggtgtgtgtgtgtgtgtgtgtgtatgtgtgtgtgtatgtgtgcactataactttatgaaacactttttttttttttgagacagggtctcgctctgttgcccaagctggagtgcagtggtgcaatcttggcttaccgcagtctccacctcccaggctcaagtgatcctcccatctcagcctcagcctcccaagtagctgggactatgggtgtgagccaacacactcagctaattttttttttttttttttggtatttttggtagagacagggttttaccatgtgggcccaactggtcttgagctcctgagctcagggtgatttgcctgcttcaacttcccaaagtgttgggattacaggtgtgagccaccatgcccagtcagttttttattttttatttaaacagttttgggggaacaggtggtttttgcttacatggataagttctttaatggtaatttctgagattttggtgcacttgtcacccgagcattgtacacggtacctagtgtgtaatcttttatccctcatccccctcctacgcttccccccccgagtccccattatataattctttttttcttctttttgagacagagtctcactctgttgcccaggctggagtgcagtggcatgaacttggcttactgcagcctcctgagttcaagtgattctcctgcctgaacctcctgtgtagctgggactacaggcatgcaccaccatgcccagctaatttttgtattttttgtagagatggggtttcaccatgttggccaggctagtcttgaactcctaacctcaagtgatctgcctattttggcctcccaaagtgttgggattacaggcgtgcgccactgcgcctggtccattatgtcattcttatgcctttgcatcttcatagcttagctcccacttataaatgaaaacacaggatatttggttttccatacttgagttacttcacttagtataatggtctccagctccatccaggttgctgtgaatgccattattttgttcctttttatggctgagtagtattccatggtgtatatatatcacattttctttatccactcattggttgatgggcatttagccttgttccatatttttgtatgcagtataacttacagatggtaaacaatatacagcttgatgtattctgacatgtaatgcagtatgtaaccaccacctggatcaagatatggagcatttctggcacttcagaaggttccttcatatctttttccaatcaatattgcctcaaaagggaaaccatatttggatttctatcaccataaataacctttgcctgccttgagcctcgtataaatggagcatatagcatgtatgcctttatgtctagttttttctgtgcaacatatttttaatattcactggtcttgttgcatgtgtcagacatttatttctttttattgctgtgtaatattctagtatttgcttatccatccatatgttgagggacatttgtttccagtttttggatatcataaataaagctgctgtgcacattgttg

SEQ ID NO: 1007 - DNA, 3581 bp, Homo sapiens
gatgtaacaaggccaggctcgcgccgcgtcccctctttcccagactcagtgctccctcctcctcccgcgccccgcgctctgcgcgctgagctggcgccgggctccgcttgcacagcaccgggaccgacgggcactgctgggagagccgctctcccaggttccacctccccgatgcagagtccgtgggggaaaccaggctttcctcccagaaccaagggagcgagccgagggggcagctgctgtgggggcttctgaggagacagcctggcttctttccctacttcctggagagggcaggaaacctcagaatagaggaacgctgctccctggtcagcaagcagcccccaacctggatggagtgaaacatgcggcctgatgacattaacccgaggactgggctggtggtggccctggtcagtgtcttcctcgtctttggtttcatgttcaccgtctctgggatgaaaggggagactttgggaaacatccccctcctggccatcgggccagccatctgcctaccaggcatcgcagccattgccctggccaggaaaaccgagggatgcaccaagcggccagagaacgagctgctgtgggtccgcaaattgccctgcttccggaaacccaaagacaaggaggtggtagagctgctgaggaccccttcagacctagaatccggcaaggggagctcagatgagctggctaagaaggcgggcctcagggggaagcctcccccacaaagccagggtgaggtgtccgtggccagctccatcaacagccccacacccacggaggaaggagaatgccagagcctcgtccagaatgggcatcaggaggagacgtccagatacctggacggctactgcccctcgggcagttccctcacctacagtgccttggacgtcaagtgctcagcaagggacagatctgagtgccctgagcctgaggatagcatcttctttgtgccccaggacagtatcatcgtttgctcctacaagcagaacagcccgtatgacagatactgctgttatatcaatcagatacaaggcaggtgggaccacgagaccatcgtctaatctctgcctacaaaggtggctggattgatagaatatgactaagcccagctccccgtggaagcaaattgctctgcttggagagccttcacactgttagaaattgacctggtatgtgatgggtgtgataacctctggtacccgagagtcatgtaaataggcatgttggggacacattttagggaagggcgatgagggttaaggacactggaagaggcagtgggtaggaaaggaagctactccagttgcttcttaacaatttacacaatgttaaatgttttgtaaaataacccaaaaagtgctatccagaaccagctgagagcaagataaatctagagtgggctgcagatgtgaggcatcaaatgatgcatgagctgaccacagggaaactgagctgctttatgtttgaataagttgaaaataaaattaatgatccgttatataaagtaatttttgcctggttaaaagcttatcacacttggtatttgctgaaagaaaaaaaaatcaagatataagagttaaaccctccttagatgggatggtttttgggaaaagggtagttaaagagagttggattatgtaactgagtcttgtggcattattgtctgacaagatcatggtctctaataaagtaaaataagtgtgagcagctatgtgaaaagttaacatttttagatggctatgttacttcttaaactcttcgtttaaatccatttattgcatctttatctgaaatgggttttttctaaacatttactatcattcatgtattatttccttaccaggtgcaacattatttgaaatgatactttcatagattggaatttgttttcatcaagacaaaatgaattttacatatatatccaagtctttaacattggcagacatgtactgataattaccattcctacataccttttaaaatctgaaaactataaagtctacacattagccttgaacattgcacataatttgtatgaaatgcaatggttaaacctttgcaagtgtcattatttgtacatttgttcaactcctctcacagactgtaaatgccagtgaaacaagaactcatctactaaatttaactgaagcctagattttattaagctcacctgatcagtgaacattacatgataaaagtctctttatttcatacatttttgctgctgaggaaaacaacaaatcacaatgatatcctaaaatgtgctttctatttcacttgctcaactgcaatagataagaaggctatcaagcagaatgccatttgatccccggtgaagaaaaatatgaattatatataggaatggtgatagagttcatcttgaagatcagaagtattttgtatccttcaaagaatgatcattttaagtgatcatatagtcttagtcactttctcccaaaaggggaattgaggacaaaaatttgggcatatatgttttgtgtatttcaattccaactctgcaattctttcttaagtatagcaattgttctgtcttaagaatcatggtatttttaaaaaatcataattttcaagtcaagttcaagatcaaaaatatgtaattattttagtagggcttaaatatcagaaatgagatgcatgatcttgggcaaattttatcttcttacacctgagtttcctactctgtgaagggagggggaactgattcacacttgattatttctatcattcattttcagtttaaatattctatggtgttatgtcaaaggcattttatatattgccaggaaatgagttacagcaaaattcatgccaaagttatgaaatttatgataattatgtgacatacattgcacagctactactcaaaaaagaattttgtagatgtatgaaagcagattattcaacacaatgcattcctgagaataaaatgaacataatcagagtaaaatatttttgaggagaaaacttaaaatgttggtataactcaaagtaatctaatacacaaccttgcactaaatgtgattgacatttggatttgggatggggagagatagtttcctaaaatcacagtaacttttaataattgtaatgcattttgaaaacagagaatcatatttttataatggtgagaactatgcaataactctttaggaatgaaaacttcctttaagaagtttgccaccgttagagatgaggagatagtgagacagagagatgttcacagagactcagcaaatcttagacaataatgctgcaattttctgaaagaagatgcttgcagtgtcaggtatggtttgggggttggaaaagttacttttctgatttcttggaaccatttaaaactcctttatatcattctgtctctttccaaattgagggtcaactactagtttagagatataaggtattttatcttgttttcaagttctacttcagaagaaaacctatttcatgtttcttctcccattacctacttaagatacttaaggtatttaagtatgcatttgaggaaatattttcctgtgctaaaataaaggtttgcaaatgtt

SEQ ID NO: 1008 - DNA, 3033 bp, Homo sapiens
ataaatatgtcatctatgtttttttcagttatttttaattggaaataaagtgccattgcaaataggatgctccaatcctgggacactgagtggaggatgaggagggagagatgaactgtgggccggcctgggagagggggtcttagtggaaccttccttctggcctccagccggggacttacaaaactgaacaatgtattggcagaactggacccacaatgggagattctggggagcaggagttcacttgtatctgagcaggaagcagtgtgccctgaagaatacctctctgagcaaattccagacctcacacatatgcaagggctctgccttgcagcctcagcaagcgtctcctggtgctagctccttcctgacttgctcggagctcggagtgatgtatttgaagctggtgctgggccagatggtgcaggcagtgaggagagactcaggactgcaacctttcggctccttattcctgctcatcactcagaaaagggcagtactaacccctttcctaaccaagacatggcactccctaagagctcttgtctatagagtttggtccttagaggaaagcagataccttcagcgtgagaagggcttggttgacagttttggggtattatgggaagagtaggttggggtaaagcttgagtctaactcttgatccttacatggacctatgaggccctgccattcagtcaggcactgtccttgggtcctcaaattaactgctgagaacactccccactttccgaggacgctgatgggaaatgggctctgtccatgcagctggaaggatccagtgctggtgccactgtcagtggcaccatccttgccttgaatgatctttcttgcaggctcctgcagctgagtgtttcttgtaagatttttcagggggattgggcaagaagaagaggtgcaaattctgttcccttcctaccttgaagccttcccagaccaccacggtctctgcacaagggaggctcccattactgttctgttggcttctagacccaccatcccctctctttctgtggactctgcccgacttctggccacatgcaaccagcagagtaaactgctccaacacctcgggcatgtcctagggcttgccctcccaccagggccagcccaagattaggtcctcagcagcatcaaggtctgggagagccactggcccacatgtcaccattctattcctcagcctccaacaggactcttcattttggggagggaaagggaagatggggccatagcccctaccttgaaattgtacagtgtggaggggatgttagtgcctacctgtgacctttctgctccactgctcagcaagatgaggtaaggttgggtgtcagaggggacctccagcttctctgaagagccagcccttaaggcacttggagcaaaggtcattgagatcagctttatgtggagtaaggaggaggcctgggaaccgcttgtggcatcagttggggcgacaggtggatgagtgtgctctgatggagcttttacggcccacagccactgccaggagcctgagctcttccccatgcttgggacacgttccttggtccccacagcagaatggacattgaattttggtgcttttccctttggtagaaggtggaggtatctgaggagttgtttctgtcttgctacctctgtctactatatagagcaagagtcgggaatagggagatgtgtgagaatcactctcccatggatcagtgtgggccctgtccctcctccccactgtcaccaaccagcagcttggggaaaaggctctgtcgtggatttttgctgcctgcttcccgcttccactcttcttggcggtagatgttcatggtgatccactttgggcggtctgaaagtaggaggtgggggaagaggcaagcctgcacacacacttcctgtccacagggggttgcctgtggcattggagggtggagtctcagagtccagggactgggaggaaggtacttgatgggatggtcttgattctggaactttagactgaggtgttagaaaggggaattgttggctaggggagaagagcagtttaacgctccacttgctaagtcgtctgtatcagtgtcagaaggtcttgacctcccattcagatttaatttcctaactgccaggtgtggggctggggatagagggcccagaagggggcgcagtcactgacgtgaagggaccacatcccgcttcatgtcagtgactcctgccccttggtcttcagtgtttttctcttccccaggagggactttgatcatgcaggatagaattctcccatcgcacacctgggggcaagttttagatgagcttctttcctccatttcacctggtggtctgaggacacacagagggtgggggtgagcaggcagcgtgggtggggaggggctacctcccccagaccccttacaaactctgtacctctcggtgcgcggcagcctcttgctgtagttcttcttttctggatatgactgtcagtttcgtcatgagatttcttgctctcatttcgaactctttctttcttccactttctttgggggcgacccccgatccatgccaggtcttcctgtgaagaccgttccaacctcgtttccatttcttgaatgttgagtattacaacatcactgcgctagggtgcttcatggtgctgttctcgaagaggccagttgggctgaatctccttcctcccactggctcctgatatcttgctgtattttgtcttctttctgatttttccctaggggtttggggtgggtgacttaggggcggcttttgtgttctccctctctctctctttcttttctgtatgtatgtatggactggttaaagtgagtttgggcagctgactttatggtatgggttggctgacttttgttcaacattaaagacaaaccaacaaattgtacagctgcacacagaacacctttgagtgtgaacttgaatggcaactagaggcttactttttgaacttcaggtatgtaactcaaaagtaaataaaaccactattttttcagt

SEQ ID NO: 1009 - DNA, 3862 bp, Homo sapiens
gcaggggagcgggctggcacctgggcacaggtgtagacatggctgaaatgccggcctgaggaggtcaggtaccagtgctggatggcgggctgggggtcgtactccgtgacggccacgccgttcacagctgtcatcatgagcatgttgagcacctcgttggagagcttggtcctctcatcggtcctgattcggttcatggccttgaacccccgctcacagcaagaggtggagatgggcacacagaccaccacggccatgagcttgcttagcagggggaagcggcagtgctgggccagggcgtttttgcagagcatggagaacgggaggtgctgggcaatggttttcaggcccagccactcctccagcagagcttcctcactgtatcctgttgggagggagcactcgaaatacctggccaggttgagaatgtcatcattcccaaaactggcaagttcaatcccacttggccaggccatggtgtcaaacacctccatgttcttcagctgtgggggtcggtctgcgtcaaacctctgctggaggtactcaatccccgtcaggactgtcctctccctatccgcctggaaccgctgttccgctacctccagtttgtccaagcagatgccgtggagccgcccatccttgaagctggcgttgaattcttcctctttgggccctgcctggtgacggaggctctccagtgccacgtaggcgcggcccagcgtggcgttcacctctgtaatcagcacgatctccttctggcacacctcggacagaggcctgtagatgctcaggaagtccaacaggaagtggcagaacttgacaaagtggaagccgcgcatgagcttcagcatccctttggcccggtgcccaatctggcccccagcctctgccaccctctggaggtgcctggccagggcgggccagctcacgagcagcgcgtgcagcgtgcgcctcctgctggccacccagcggaccgcattcagatccttcaggcggatgatctcctgctccagaggcgccgcaccttcctgcagctcgttcagcctcttgtttgaggactgataaaacttgaagacggtgcggatgtgccggtcacacttcttcaccagatcgatgctcccgcaggcgtccaccacagccaggtgcagccggtgggccacgcagtggacaggcagcagctgcgggatgacctcctggaacttttccacaaggcctcctctgcagctcaacatggctgagccatccgtccccagccccaccacccagccaggcttccggaaggggatgtccagctcatccagggcagaaacgatggtctcgaagtacccatctgctgtctcactgtagagaggggccagagtgatgtaggactctttcacctccatctgcttgaagtagcggatgtaaatccccacgcaggcctgctcggaggcgtcggtggagctgtccagcagcacgctcacacagggcgagttccgcacgtcctccaggatctccctcttcagggtctctgagatgtacttgatgaactgagtgcacgccgtgcgattgcggtacttgcctaatatcacggtccccgtgctttggaggagctgcaggatcttctcaaagtcattcaggggccttgagtggtatgcaatggagtaggcggcattgaaaaagtgctccatgttggccatgaggtcgctggagatctctggaacgagggcagtgtgaggggtgtcttccttgatttcaaccgtgttgacacagagcctgtgcgctttgctgacttcatggtattttaaagtctccactttaaaaggccccgtgtaacctctgactaaccgagatgatttatcatggagattaggtctttctatgcaggctgagcagaagagtttggtctctttggggtcaattactaaccatgggaactgcccaaaccatgacctctgaatggaacggggcctatatgtcctcttgattctcctaggtccatctccttcctcacaaatgctggaactgcagcaggaggcacgggcctccacgggagagcctggaagcaacgcggagtctgcagccgaggcctgtgtgtctgcctctctcactgccaccatcttcttgttccctttggagaaaattgaatcatgcttggttctgctacccagaactctgccatcttctatcagctaagacacccccaaatttaataagtatcccttaagcaaggcagagaagatgaatgcaatccttctttctagagaaagtggcgtccacttaaaccctcacccattctcatctgtgaaagttcatctggctcccccagagttgttgctaatccttgtgggttctttcaccagcgccccaaccaccctatccacacagctaccctgggatcatgtgacaccagataccaataagttcaattaacccccttggccacagagactgttggataagcaggtggctttcactctcgtgtgaggctccacaatagaataggttaaacacctgccaaggcttttacaagcctcagaaggaagtaggtacagaagtaagtgtagcaactacaagccaagaaattactgattgagataggcaagacaacgaattctcacaaaccaatagtgctgtcaccgagcactggagaaggagggagaagggatgagaggctcacagatctctgggtcccctggctcctcgagaccagtgtccccacgtacctgctcccaccagctctgccacagcctccatcagtacttctgcttacaaaaggacctgttttttccctgtttcccagactactctacactctgtgggcagggttagttgcttattcatcttgtctacccagggcctcctgccaggcttggtgcccaatcggcccccatcagatgagcacagctgagctcatgctgtttgactcatcatagccgcctgggccctggcacatgtccttcagaatgctgtaggtttacactcacctggaggacgacctttcccccactttggcccatttgggtccttgatccagggtgcagccctccgctccagtttggagatcaagtctggcttggcagcggcaggtcctgttgtaaggatgaagaatcatgctgatgtcactgctgtggccaaatcgagtagccccctcaagctagacccagtccctgaagtacacagaggtgtctctgggttctgtccttataaagtctagtcggccaggggcaggctgagcgcaaacccagagtgccaaagaggcagtaaggggaggggcagccctcagctaggatagggcttcctcagatccatgggccagccatacacaccagagggggaagggtggaaacaggaagaaacatagggactaagcaggagagagaggcagggggaaacagcagccatatgagaagtggaaggtgccacccacagctggcccacgcgtgtgcccctctgcccccacagctggcccacgcgtgtgcccctctgcccccacagctggcccacgcgtgtgcccctctgcccccacagctggcccacgcgtgtgcccctctgcccccacagctggcccacgcgtgtgcccctctgcccccacagctggcccatgcgtgtgcccctctgcccccacagctggcccatgcgtgtgcccctctgcccccacagctggcctttgtgaaggtgaccaactacatgggtttttgaaaggggcacttggagggccccctgaaatacctaccacctgcaatggagcctgaaatctgactaaaggagatttgtgtctttggattaagcactaacctttacttaaaataggaatattgttcaggggtatgcagataaaccatttcctctattgaaaataaaatccatcactatctacatc

SEQ ID NO: 1010 - DNA, 3015 bp, Homo sapiens
agcattcagcattacttcttggagttaattgttttatagagctaattatgaaggttttaagacctctttgcgtagatgttgttttattttttagaataaatttattcctacacctattttccagaaagacactggtagaatcattctaataataagatggagtggaatgaaggggacactaatagaaaatgaaaggccatgaaatgtaaatatacgtcttcctttcagtgggtgtaatttattattgacacacaggacttttaggacgactgaatgatgaaagaagagaaattctcgaaatgactgaaagagagtggacattccagtggtttctgaaccttgaggtgattcaggaaggggatggaccagtaatctccagagatggcagggtcctcaccatccccacagtcacacgcaatgactccagcacctaccactgtgaggccaggaaccacctgggatccaggctcagtgaagccctcgtggttggcgtggcttatggcccggatacccccatcgtgaccgcactggacccagattttgtgattggttccaacctcactctggtctgcttagcctactcccacctccttgcccagtacacatggagcttcagtggggtcaccacatgggagggccagaccctcttcatgcccagtctctccagggcacactcaggggtctacacctgcaaggcctccaactccctttccggcttgcacagcagtatggacaccatcatcactgtctcagagacacttcctcagcccaatgtcacagccagtaacttagccccagtggagcatgtggattccatcagtctgcattgccttcctccaaggagcactgtggccatccgccgggatgtcaatggccagaagctcttcattggtggccacagggagctgtccctggactgcagaacactgactctgtcaaacatcaccaggaatgacacgggggtctaccagtgtgagagctggaactcagccaccagcagcatcagcaaccccactctcatcaaagttacatatggcccagaccctcctatggtcaaccctccagacccagaggtcacagctggggcagccctcaccctgtcctgctttgctgactcaaacccccctgcccagtaccactgggagatggacagaaggccaggccctgccacccagcacctggtcatttctgaggtcactctggaccagtagggcaggtacacctgtgaggcctccaacagcatcactcacctctgcagctcagtcaatgggaagatctggatctcagaggttcctggggatgaactgcagccggccttactcaggaccactattcctgctggaggcatcgcagggattgcctcgagtgtcctgatcagcgtggtgctcacagggactgctggctactgtgttggggtcataaggtcccagaaggtgggatgaagacagcctgctattggcttagctgcagaggaagacaccttttccactcgcctcttgggacttaactcttctttccttctctccagcccaggaatcctgtggagttcagctcagcaagaggcatggagatgtcaactgcattgtgaccagtcttcaacaccctgaccagagatttcaactcctcccaaggccaaaaagagacactgagccagctattttaacagatttgaggtgatcttcattgaaaggtagaaggttgtaatcactccccaatctctttccttttttaaaacaaaaatgctttagacaggggattgcatgatgattaggacttaccttgtagcttcacagaccacctccacacgtttactccaccagttaagaagtgttgtctgtgcgcggtggctcacgcctgtaatcccagcactttgggaggctgaggcgggcagatcacctgaggttgggagtttgaggccagcctgatcaacatggagaaatcccgtctctactaaaaatacaaaattagctgggtgtggtggcacatgcctgtaatcccagctactcgggaggctgaggcaggggaattgcttgaaccccggaggtggaggttgcggtgagccaagatggcaccactgcactctggcctgggcagcaagagcgaaactctgtctcaaaaaatttaaaaaaaaaagaagtgttatgatgtagaataccctttcttatgttgcattccttctttgcatattatgtgtaactctctaagggctgtggctcaagtagctcagtcagcttttgcattcaaaaattcacagttcagactaggcacggttgctcacacctataatcccagtgctttgggaggctgagatgggaggattgcttgaggccacaagttcgagaccagcatgggcaacatagagagactcccctctgaaacgctacaaaaaaaattagctgggtgccgtggcatgtgtctgtaatcccagctacttgggaggctgaggagtctgtacagagtccttggcagcattagctaatatcctcatgtcatcagttgatctctaacatccttcagctcctgggagcctctcactttcctaccacagaactctgtctgaccctcatccatgcttctttgtccccaccatctcccttaaatggaattttcatggctggcttgataatgcaagattggacactcttttcttcctagtagtgagacaagagctaagcaccttacaaaattgttaatgcacgatcttgaggtgaacttaaaagtatcctgcaggtggctgggcacggtggctcacgcctataatcccagcactttgggaggccaaggtgggtggatcacctgaggtcaggagttcgagaccagcctggccaacatggtgaaaccccatctctactaaaaatacaaaacattagtcgggtgtggtcgtgggtgcctgtaattccagctactgaggaggctgaggcaggagaattactcgaacctgggaggtggaggttgcagtgacttgagatcgtgccactgcactccagcctgggtaacagagtgaaactccgtctc

SEQ ID NO: 1011 - DNA, 3982 bp, Homo sapiens
atttgggaggtgaaaccaaagcagaaatggaagccatttagtcaaaagcagataatcttattggaacaatcctatcagaaacatcaaatatcaagagaccatggctggattaagctagataataattttgaggtcaattttgataaagatccaatggaaatgcgcctccctattcgtagccctattaaacgagactttttatcaggaattcagattgaatttaagcagtcttctcaccagagaagtttaagggccaggttgtactggcttcaggttgataatcagttaccaggtgcaatgttccctgttgtatttcatcctgttgcccctccaaaatctattgctttagattcagagcccaagcctttcattgatgtgagtgtcatcacaagatttaatgagtacagtaaagtcttacagttcaagtattttatggtcctcattcaggaaatggccttaaaaattgatcaagggtttctaggagctattattgcactgtttaccccaacaacagaccctgaagctgaaagaagacggacaaagttaatccaacaagatattgatgctctaaatgcagaattaatggagacttcaatgactgatatgtcaattcttagtttctttgaacatttccatatttctcctgtgaagttgcatttgagtttgtctttgggttccggaggtgaagaatcagacaaagaaaaacaggaaatgtttgcagttcattctgtcaacttgctgttgaaaagcataggtgctactctgactgatgtggatgaccttatattcaaacttgcttattatgaaattcgatatcagttctacaagagagatcagcttatatggagtgttgttaggcattacagtgaacagttcttgaaacagatgtatgtccttgtattggggttagatgtacttggaaacccatttggattaattagaggtctgtctgaaggagttgaagctttattctatgaacccttccagggtgctgttcaaggccctgaagaatttgcagaggggttagtgattggagtgagaagcctctttggacacacagtaggtggtgcagcaggagttgtatctcgaatcaccggttctgttgggaaaggtttggcagcaattacaatggacaaggaatatcagcaaaaaagaagagaagagttgagtcgacagcccagagattttggagacagcctggccagaggaggaaagggctttctgcgaggagttgttggtggagtgactggaataataacaaaacctgtggaaggtgccaaaaaggaaggagctgctggattctttaaaggaattggaaaagggcttgtgggtgctgtggcccgtccaactggtggaatcgtagatatggccagtagtaccttccaaggcattcagagggcagcagaatcaactgaggaagtatctagcctccgtccccctcgcctgatccatgaagatggcatcattcgtccttatgacagacaggaatctgagggctctgacttacttgagaatcatatcaaaaagttggaaggagagacttaccgataccactgtgctattcctggaagcaagaagacaatccttatggttacaaataggcgagtgttgtgtataaaggaagttgaaatcctgggccttatgtgtgtagactggcaatgtccatttgaagattttgtatttcctcctagtgtcagtgaaaatgtgctaaaaatttcagttaaggaacagggtctgttccacaaaaaagacagtgccaatcaaggctgtgttcgaaaagtttacctgaaggacaccgccacagcagagagagcatgtaatgccattgaggatgcacagtcaacgagacagcagcaaaaattgatgaagcagtcatcagtgagacttctcagaccccaattgccatcttaatcacagacctcaggggctccaacagggagaaaaaacaatcactggtcttgtctataagtcactctgctttatcttgctaaagacaatttttcaagcaatcctttagttttagttttctggaatagctagtattgggttttctagttttttcaccttttagtttttactctaattttgtaaccatgtatatgctagcagtccacttctacgccaccacccaaatgggtcagacccttgaagaaacgtcacttcaaactcagaatgaaattttcattaatattaaaattgtgaagcaaaggtcaataggcttatatttaattaaagccttactgaagaataagaaatgagcttagaatgactagtgttctttgaaagttttttttatttttgtttttttggggttttttttttttttttgagaccgagtcttgctctgtcgcccaggctggaatgcagtggtgcgatcttggctcactgcaatctctgcctctcgggttcaagcggttctactgcctcagcctcctgagtagctaggattacaggtgtgtgccaccacgcctgggtaatttttttttttttttttgtatttttagtagagatgagtttcaccatgttggtcagtctagtctcgaactcctgaccttgtgatccgcatgcctcagcctcccaaagtgctgggattacaggcatgagccaccacggcccgccaaaaggctttaacccatgaacaaatgttggatcctgacattttgtttaagagtgatttgttcaataattgaactgagttaacattcttggtaaaccaggtaattgaatgaagaaaggtcactaaagggagaaatgacatgttttctattttcttttcatgaaaacactgtttttccccctaataaagcatattttactttggtgcttatttttcctccttgcagtctaataaaaaaatctggacaatcaaaccttaaaatagctacactctgccctctgtaatgtagcattcataaaaatttggaagtatttacatcctctttcaagatgagcttatatgacacaattattatttgctgatacatgaaaatactgcactttaagtttctcaagactctgaaatatgtaaaattcaatatttttatattcccagaaattgtttcttacaggttgaaagtcttttaagggcatcacaaattaacatttactcctaatgcacgcctagaatgtattttaaatacttactaagaagaatgaaaattctttggttgttttatatataaataaggcatatataatgacactgtgttctgtgagggagcaggccctgtgagaatcaattcaggacagtattttttttttttgtcctttctccatccttgatcagagataaactattaaaactttaaaaaatactcaaaaatatgtaagttttttggttgaacctttagatttgctcataatgtttaacataacaacatttatttcaaatcactgaattcatggagatgtggacacgcttggtttgctctatttttgtttatgtgtgatagtggttctgtcatcatcattcatgttttttaaggcctggtcataaaactttaaattttactagtgttacttaatgtatattctaaaaagagaatgcagtaactaatgccctaaatgtttgatctctgtttgtcattactttttcaaaattatttttttctgtaaagtataatatataaaacttcttgcttaaattgaatttctatattagtggttaattgcagtttattaaagggatcattatcagtaatttcatagcaactgttctagtgttttgtgtttttaaaacagaattaggaatttgagatatctgattatatttttcatatgaatcacagctgttgacaatgtcccatatatttaagaaattatatcatactgatactatttgtaacattttgatttgatttaatctccagggacagaaataattcattggtaaagtgtaataatgcgttttttaaaaatgctttgagaggtaattacttgcatatgagagaaataaaacatttggcacattgtttacaggtgt

SEQ ID NO: 1012 - DNA, 5835 bp, Homo sapiens
ggcattatgcaattatattactaaggctgctacctgcccatgcccctctcctcctcctggtttggaactaccctccccatctgctgctatatttatctgccttcttggccataaaaggctggttgtgtggcctgacattcgactgcctgaccacatgcattatttttgaactggcccccagggtcctgtctttagccctgcctcttaacattgtcttggattcaacctaggtggagtcttcattctctcatccagttcctcggcctcatcggaacatttccaccaccattactcctttggaaactggtggcccggttccttcaagaggcacaggatgtctttgcctttttatcagaggtgccaccagcactatgatctcagctaccgcaacaaggacgtgcgcagcaccgtgagtcactaccagcgggagaagaaacgctccgccgtctacacccagggctccacggcctacagcagccgctcctccgccgcgcaccgccgggagtccgaggccttccgtcgggcgtccgcctcctcctcccagcagcaggcctcgcagcacgccctgagctctgaagtcagtcggaaggcagcctcagcctacgattatggctcctcccatggacttacagattccagtctgctgttagatgattattcatccaagttgagccccaaaccaaagagagccaagcacagcctactgtctggagaagagaaagaaaatttgcccagtgactacatggtacccattttctcaggacgtcaaaagcatgtcagtggaattactgatacggaagaagaaagaattaaagaagctgctgcttatatagcccagaggaatcttcttgctagtgaggaaggaatcacaacacctaaacagtccacggcatccaagcagaccacggcatctaagcagtccacggcatccaagcagtccacagcatccaagcagtccacggcatccaggcagtccacggcatccaggcagtctgtggtttccaaacaggccacatccgctcttcaacaggaagaaacttctgaaaagaagtcaaggaaagttgtgattcgagaaaaggcagaacgcctgtccctgaggaaaacattagaagaaaccgagacatatcatgccaagctgaatgaagaccatcttctccatgctcctgagtttatcattaaacctcgctcccacacggtttgggagaaggagaatgtaaaattgcattgctccatagcaggctggccagaacctcgtgtcacgtggtataaaaaccaggtgccaataaatgtccatgcaaaccctggaaagtatattattgagagtcgatatggaatgcacactctggagattaatgcatgtgattttgaagatacagctcagtaccgggcctcggcgatgaatgttaaaggagagctttcggcatatgcttcagttgtggtaaaaaggtataagggagagtttgatgagactcgcttccatgctggggcttccaccatgcccctcagctttggtgtgaccccatatggttatgcatcccggtttgagatccactttgatgacaaatttgatgtgtcttttgggagagagggagagacaatgagtctaggctgtcgtgttgtcatcactcctgaaattaaacatttccagccagagatccagtggtacagaaatggagtacctctttctccatcaaaatgggtgcaaacactttggagtggagagcgggcaacgctgacattttcccatctcaacaaagaagatgaaggcctctatacaatccgtgtacggatgggagaatattatgaacaatatagtgcttatgtctttgttcgagatgctgatgcagagattgaaggagccccagctgctcccttggatgtgaagtgcttggaggccaacaaagattatatcatcatctcctggaaacagccagctgtcgatggagggagtcctattctcggatattttattgataagtgtgaggtgggcacagatagctggtcgcagtgcaatgacacacctgtgaagtttgctcgttttcctgtcactggattgatcgaaggtcgttcctatatcttccgagttcgagctgtgaataaaatgggaataggtttcccatctcgagtttccgagcccgtggctgctctggatccggctgagaaagctagacttaaaagtcgcccctcagcaccctggactggacagatcattgttactgaagaggaaccttcagagggtattgtgcctggccccccgacagacctctctgtcactgaggccacccggagctatgtggtgctcagctggaagccccctggccagcgtggtcatgagggcattatgtactttgtggaaaagtgtgaggcaggaacagaaaactggcagcgagtgaacacggagctccctgtgaagtctccccgctttgctctgtttgacttggccgaggggaaatcctactgtttccgtgtccgctgttctaattctgcaggagttggtgagccctcagaggcaacggaggtgactgtggtaggggacaaacttgatatccccaaggctcctggcaaaatcatcccaagcagaaacacagacacctcagtggtagtttcgtgggaggagtccaaagatgccaaagagctggtcgggtactacatagaggcgagcgttgctggctctggcaagtgggagccctgtaacaacaaccccgtgaagggctcacgattcacttgtcatggattagtgactggtcagagttatattttccgggtcagagcagtcaatgcagctggacttagtgaatattcccaggattcagaagctattgaagtcaaagctgctattgggggaggagtgtctccagatgtgtgtcccgcactgagcgatgagcctggtggactaaccgcctccagggggcgcgtgcatgaagcctccccgccaaccttccagaaagatgctttgcttggcagcaaacctaacaaaccttcactacccagtagctctcaaaacctgggccaaacagaagtgagtaaagtaagtgaaacagttcaggaagagcttaccccgccaccacagaaagcggctcctcaggggaaaagtaagtctgaccccctgaaaaagaagacagacagagcaccaccatctccaccctgtgatatcacctgtcttgaaagttttcgtgactcaatggttcttggatggaagcaaccagataagactggaggggcagaaattactggctattatgtgaactatcgcgaggtcattgatggggtaccaggaaaatggagagaagccaatgtcaaggctgtcagtgaggaggcatacaagattagcaactcgaaggaaaacatggtgtatcagttccaagtggcagccatgaacatggctgggctgggcgcgccctccgcagtaagcgaatgcttcaaatgtgaagagtggaccatcgccgtcccaggaccaccgcacagtctcaagtgtagtgaagtcaggaaagactcactggttctccagtggaagccgccagtccactccgggcggactccggtcactggttacttcgtggacttgaaggaggccaaggccaaagaagaccagtggcgagggctcaatgaggcggctattaaaaacgtatacctgaaggttcgaggcctcaaggagggcgtcagctacgtgttccgtgttcgagccataaaccaggcgggagttgggaagccatctgaccttgctggccctgttgtggcagagacccgtccaggaaccaaagaggttgttgtaaatgtggatgatgatggagtcatttcattgaacttcgagtgtgataagatgactccaaagtccgagttctcctggtccaaagattatgtatccactgaggactctccacgattggaagtcgaaagcaagggcaacaagacgaaaatgaccttcaaagaccttgggatggatgacttgggtatttactcttgcgatgtaacagacactgatggaatagcatcaagctacttaatagatgaggaagaattgaaacgtttacttgctctcagccatgaacacaagttcccaactgtcccagttaaatcagagttggcagttgaaattttggagaaaggccaggtccggttttggatgcaggctgagaaactgtctggcaatgccaaagtcaactacatatttaacgagaaggaaatttttgaaggcccgaaatataaaatgcatattgaccgaaacactggcatcatcgaaatgttcatggaaaagctacaggatgaggatgagggaacgtacactttccagcttcaagatggaaaagcaactaaccattctactgttgttctcgttggagatgttttcaaaaagctccagaaagaagctgaattccagcggcaagaatggatcaggaaacaaggtcctcactttgttgagtatttgagctgggaagtgactggtgaatgtaatgtactattgaaatgcaaggtggcaaatattaagaaggagactcatattgtgtggtacaaagatgagagggagatatcagtggatgaaaagcatgactttaaggatggtatatgtaccctgcttataacagagttttccaagaaagatgctgggatttatgaagttatcctgaaagatgaccgaggaaaagataagagcagactgaagcttgtggatgaagcctttaaggaactgatgatggaagtatgcaaaaaaatagctttgtctgctacagacctgaaaatccagagcacagccgagggcatccaactgtactcttttgtaacttactatgtggaggatttgaaagttaactggtcccacaatgggtccgccattaggtactcagacagagttaagaccggggtcactggagagcagatctggctacaaatcaacgagcccaccccgaatgacaaagggaagtatgtcatggagctctttgatggcaaaactggacatcagaagacagtggatctctctggacaagcatacgatgaggcctatgctgaattccagaggttgaaacaagctgccattgccgagaaaaatcgtgcccgggtgttgggaggtctcccagacgtggtcaccatccaggaggggaaggcccttaatctcacttgcaacgtgtggggagacccgcctccggaggtgtcgtggttgaagaacgagaaggccctggcctcagacggccactgcaacctcaagttcgaggctgggaggaccgcgtacttcaccatcaacggcgtgagcaccgctgactcgggcaaatacgggctggttgtgaagaacaagtatggctcggagaccagcgacttcaccgtcagcgtgttcatcccagaggaggaggcgaggatggccgccttggagtccctgaaaggcggcaagaaggccaagtgaccggaggtgcgaggagagccagccggcctgtgtgacttgggtgtgaatggtttgggttaaggatgagacgtcttcatgctttctcctccctattattttctggcttgaggggaaaataatgtcaggtctttcactcatataaaaaagcaccaactaatgacactttaattgtttttctttatctacaaaattatgtgttaagaaaataccattcatagcatgaagattaggaaacagttttaaggagaagacttgaatgaagttggagggacattgaatgatggtcagagggcagacgaatgtgtcgtggggcgaattgggatttgctgcagctgtgaagccatggccgtgtctcgtgtgttgttacagaggtgatgtgcttttcgacgggcgcctcgtggcttggaacctcctctgtatgaataaacagttttcacgtctgt

SEQ ID NO: 1013 - DNA, 4291 bp, Homo sapiens
acggaccccgcctggcgcgccggccccttcgcctgcagccgcactcggaggcggccggctgaagtgcagtggcatgatctcagatcactacaacctccacctcttgggttcaagtaattctcctgcctggccttcctgagtaactgggattatgggcacccaccaccatgcccagctaatttttgtatttttagtagagatgaggtttcaccgtgttgatcaggctggtctcgaactcctgacctcaggcaattcacctgcctcggcctcccgaagtgctgagattacagttgtgagccaacatgcccagccaggatttttgtaccaatggctagaagcagatcgtcatggcaagagccaaggtgctgcaaatacgacttcaggcgaaaattttgaccagagtcctttgaaaagaacattcaaatccaaagttctcgcccactatcctcagaatatagaatggaacccttttgatcaagatgcggtgaacatgttgtgcatgcctaaagggctatctttcaggacacaaacggacaataaagacccccagtttcattcatttataattaccagggaagatggttctcgcacctatggttttgttctcactttttatgaagaagttacaagtaagcaaatctgcacagcaatgcagacactttaccagatgcacaacgctgagcattacagcagtgtgtatgcttcatcttcctgcagtatggactcattggcaagtagtcttgatgaaggagatacaacttcccttttgaaactccagcgatacaactcctatgatattagcagagacaccctgtatgtttcaaaaagtatatgcttgatcacaccgttaccattcatgcaggcctgcaagaaattccttatccagctttacaaggctgttacctcacagcagccaccacccttgccacttgaaagctatatccacaatattctttatgaagtaccccttccacctccagggaggtcactgaaattttatggtgtttatgaacctgtcatctgccagaggcctgggcccagtgaactccccctctctgattacccccttcgggaggcatttgagctcctgggattagagaacctggtgcaggtgtttacctgtgttcttttagagatgcaaatccttctctactcacaagattatcaacgcctgatgactgtggcagaaggcatcaccacacttttgttcccatttcaatggcaacatgtttatgtgcccattctacctgcttctctgctacattttcttgatgctcctgtcccttatctgatgggccttcagtcaaaagaaggaactgaccgttctaaactagaacttcctcaagaggctaatttgtgttttgtggacattgacaaccattttattgagttgcctgaagaatttccacagttccccaataaagtggattttatccaagaactctctgaggttcttgttcaatttgggatccctcctgagggcagcctacattgcagtgagagtaccagcaaactgaagaatatggttctgaaagacttggtcaatgacaaaaagaacggcaatgtctgtactaataacatcagcatgtatgagttactgaagggcaatgaaaccatagcccgcttgcaggctctggccaagcgtactggtgtggctgtggaaaaaatggacctctctgcttctctgggtgaaaaagacaaggatttaaaactgcattgtgaagaggcagaactaagggactaccagctcaatgtacagctccgagaggtctttgctaaccgttttacacagatgtttgcagattacgaagcatttgtcattcagactgcccaggacatggaatcctggctgaccaaccgggaacagatgcagaactttgacaaagcttcctttctgtctgaccagcctgagccttacctgccatttctttcacgcttcattgaaacacagatgtttgccacctttattgataataaaattatgtctcagtgggaagagaaagatcctttgcttcgggtctttgacactcggattgataagataaggctgtataatgtaagggcacccaccttgcggacatctatatatcagaaatgcagcactttaaaagaagcagcccaatcaattgagcagagactgatgaaaatggatcacactgcaatccacccacatctacttgatatgaaaattggtcaaggcaaatatgagcaggggttctttccaaagttacagtccgatgtcttggcaacaggaccaaccagtaacaatcgctgggtaagtcggagtgccactgcacagcgcaggaaagaacgccttcgccagcattctgagcatgttgggctggacaacgacttgagggagaaatatatgcaagaggcacgaagtttaggaaaaaacctgaggcaacccaaactgtcagacctctctcctgcagttattgcacagaccaactgtaaattcgtagaaggcttattaaaagaatgtagaatgaagacaaagcgcatgttggtggagaagatgggacatgaagcggtggaacttggccatggagaagcaaacatcaccggcctggaggagaacaccttgatcgccagcctttgtgacctgctggagaggatatggagccatggcttgcaggtcaagcaggggaagtcggctttgtggtcacatttaattcaatttcaggacagagaagagaaacaagagcaccttgcagaatcaccagttgccctcggaccagaaagaagaaaatctgactcaggagttatgttgccaacgctcagggtctctcttattcaggacatgaggcatattcaaaacatgagtgagatcaagactgatgttggacgagctcgggcgtggataagactgtctctagaaaagaagctcttgtcccagcatcttaagcagttgctttctaaccaaccactcaccaagaagctttataagcgatatgcttttctacgttgcgaagaagaaagagagcagtttctttaccaccttctttctctcaatgctgtggactatttctgcttcaccagtgtgttcaccactatcatgattccgtataggtcagtgatcatcccaatcaaaaagctgagcaatgcaataatcacatcaaacccttggatctgtgtatcaggagagctgggagacacaggagtaatgcagattcccaaaaacctcctcgaaatgacctttgagtgccagaacttggggaagctgaccactgttcagattggtcacgataactcaggactgttagccaaatggctagtggattgtgtcatggtcagaaatgaaatcacaggacatacatacagattcccatgtgggcggtggctggggaaaggcattgatgatgggagcctggagagaattcttattggagagttgatgacatcagcatcagatgaagatctagtaaagcagtgtcggactccaccccagcagaagtcacccaccacggctaggagattgagcatcacttcactgacaggaaaaaacaacaaacccaatgctgggcagatacaagaaggaattggagaagctgtgaacaatattgtgaaacattttcataaacctgaaaaagagagaggaagcctcaccgtgttgctgtgtggagaaaatggcctggttgcagcccttgagcaagttttccaccatgggttcaaatctgcccgcatctttcacaagaatgtcttcatctgggacttcatagagaaagtggttgcttattttgaaacaactgaccagattctagataatgaagatgatgtccttattcagaaatcatcctgcaaaaccttctgccactacgtaaatgctattaatactgcacccaggaacattgggaaggatggcaaattccagattttagtttgccttggaacaagggatcgcctgctcccacagtggattccattgttagctgagtgtcctgccatcactcgaatgtatgaagagagcgctctcctgcgagaccgcatgactgtcaactcccttatccgaattctgcagaccattcaggacttcaccatagtcctagaaggatcactcatcaaaggagtggatgtgtaacccaactggctagaaactctcagtccaaaccttgctccttccccaactaggggaccgatttggacttgtctgacagtagtgagtcactgcaggggcagccaaacatatgccccatttggaacaatcctcactctacagacaaggcaaaatgttgtattgtagttcatttgaacctggaatttagtataaaatagagtattttcatgtgtt

SEQ ID NO: 1014 - DNA, 4836 bp, Homo sapiens
cagcctgctgcctggcatcacctacagcctgcgcgtgcttgccttcaccgccgtgggcgatggccctcccagccccaccatccaggtcaagacgcagcagggagtgcctgcccagcccgcggacttccaggccgaggtggagtcggacaccaggatccagctctcgtggctgctgccccctcaggagcggatcatcatgtatgaactggtgtactgggcggcagaggacgaagaccaacagcacaaggtgaccttcgacccaacctcctcctacacactagaggacctgaagcctgacacactctaccgcttccagctggctgcacgctcggatatgggggtgggcgtcttcacccccaccattgaggcccgcacagcacagtccatgcccagcgggcctccgcggaaggtggaggtggagccactaaactccactgctgtgcatgtctactggaagctgcctgtccccagcaagcagcatggccagatccgcggctaccaggtcacctacgtgcggctggagaatggcgagccccgtggactccccatcatccaagacgtcatgctagccgaggcccaggaaaccactatcagcggcctgaccccggagaccacctactccgttactgttgctgcctataccaccaagggggatggtgcccgcagcaagcccaaaattgtcactacaacaggtgcagtcccaggccggcccaccatgatgatcagcaccacggccatgaacactgcgctgctccagtggcacccacccaaggaactgcctggcgagctgctgggctaccggctgcagtactgccgggccgacgaggcgcggcccaacaccatagatttcggcaaggatgaccagcacttcacagtcaccggcctgcacaaggggaccacctacatcttccggcttgctgccaagaaccgggctggcttgggtgaggagttcgagaaggagatcaggacccccgaggacctgcccagcggcttcccccaaaacctgcatgtgacaggactgaccacgtctaccacagaactggcctgggacccgccagtgctggcggagaggaacgggcgcatcatcagctacaccgtggtgttccgagacatcaacagccaacaggagctgcagaacatcacgacagacacccgctttacccttactggcctcaagccagacaccacttacgacatcaaggtccgcgcatggaccagcaaaggctctggcccactcagccccagcatccagtcccggaccatgccggtggagcaagtgtttgccaagaacttccgggtggcggctgcaatgaagacgtctgtgctgctcagctgggaggttcccgactcctataagtcagctgtgccctttaagattctgtacaatgggcagagtgtggaggtggacgggcactcgatgcggaagctgatcgcagacctgcagcccaacacagagtactcgtttgtgctgatgaaccgtggcagcagcgcagggggcctgcagcacctggtgtccatccgcacagcccccgacctcctgcctcacaagccgctgcctgcctctgcctacatagaggacggccgcttcgatctctccatgccccatgtgcaagacccctcgcttgtcaggtggttctacattgttgtggtacccattgaccgtgtgggcgggagcatgctgacgccaaggtggagcacacccgaggaactggagctggacgagcttctagaagccatcgagcaaggcggagaggagcagcggcggcggcggcggcaggcagaacgtctgaagccatatgtggctgctcaactggatgtgctcccggagacctttaccttgggggacaagaagaactaccggggcttctacaaccggcccctgtctccggacttgagctaccagtgctttgtgcttgcctccttgaaggaacccatggaccagaagcgctatgcctccagcccctactcggatgagatcgtggtccaggtgacaccagcccagcagcaggaggagccggagatgctgtgggtgacgggtcccgtgctggcagtcatcctcatcatcctcattgtcatcgccatcctcttgttcaaaaggaaaaggacccactctccgtcctctaagggtgagcagtcgatcggactgaaggactccttgctggcccactcctctgaccctgtggagatgcggaggctcaactaccagaccccaggttccagtgtccccagttgcccgaatacctcaagtatgcgagaccacccacccatccccatcaccgacctggcggacaacatcgagcgcctcaaagccaacgatggcctcaagttctcccaggagtatgagtccatcgaccctggacagcagttcacgtgggagaattcaaacctggaggtgaacaagcccaagaaccgctatgcgaatgtcatcgcctacgaccactctcgagtcatccttacctctatcgatggcgtccccgggagtgactacatcaatgccaactacatcgatggctaccgcaagcagaatgcctacatcgccacgcagggccccctgcccgagaccatgggcgatttctggagaatggtgtgggaacagcgcacggccactgtggtcatgatgacacggctggaggagaagtcccgggtaaaatgtgatcagtactggccagcccgtggcaccgagacctgtggccttattcaggtgaccctgttggacacagtggagctggccacatacactgtgcgcaccttcgcactccacaagagtggctccagtgagaagcgtgagctgcgtcagtttcagttcatggcctggccagaccatggagttcctgagtacccaactcccatcctggccttcctacgacgggtcaaggcctgcaaccccctagacgcagggcccatggtggtgcactgcagcgcgggcgtgggccgcaccggctgcttcatcgtgattgatgccatgttggagcggatgaagcacgagaagacggtggacatctatggccacgtgacctgcatgcgatcacagaggaactacatggtgcagacggaggaccagtacgtgttcatccatgaggcgctgctggaggctgccacgtgcggccacacagaggtgcctgcccgcaacctgtatgcccacatccagaagctgggccaagtgcctccaggggagagtgtgaccgccatggagctcgagttcaagttgctggccagctccaaggcccacacgtcccgcttcatcagcgccaacctgccctgcaacaagttcaagaaccggctggtgaacatcatgccctacgaattgacccgtgtgtgtctgcagcccatccgtggtgtggagggctctgactacatcaatgccagcttcctggatggttatagacagcagaaggcctacatagctacacaggggcctctggcagagagcaccgaggacttctggcgcatgctatgggagcacaattccaccatcatcgtcatgctgaccaagcttcgggagatgggcagggagaaatgccaccagtactggccagcagagcgctctgctcgctaccagtactttgttgttgacccgatggctgagtacaacatgccccagtatatcctgcgtgagttcaaggtcacggatgcccgggatgggcagtcaaggacaatccggcagtcccagttcacagactggccagagcagggcgtgcccaagacaggcgagggattcattgacttcatcgggcaggtgcataagaccaaggagcagtttggacaggatgggcctatcacggtgcactgcagtgctggcgtgggccgcaccggggtgttcatcactctgagcatcgtcctggagcgcatgcgctacgagggcgtggtcgacatgtttcagaccgtgaagaccctgcgtacacagcgtcctgccatggtgcagacagaggaccagtatcagctgtgctaccgtgcggccctggagtacctcggcagctttgaccactatgcaacgtaactaccgctcccctctcctccgccacccccgccgtggggctccggaggggacccagctcctctgagccataccgaccatcgtccagccctcctacgcagatgctgtcactggcagagcacagcccacggggatcacagcgtttcaggaacgttgccacaccaatcagagagcctagaacatccctgggcaagtggatggcccagcaggcaggcactgtggcccttctgtccaccagacccacctggagcccgcttcaagctctctgttgcgctcccgcatttctcatgcttcttctcatggggtggggttggggcaaagcctcctttttaatacattaagtggggtagactgagggattttagcctcttccctctgatttttcctttcgcgaatccgtatctgcagaatgggccactgtaggggttggggtttattttgttttgtttttttttttcttgagttcactttggatccttattttgtatgacttctgctgaaggacagaacattgccttcctcgtgcagagctggggctgccagcctgagcggaggctcggccgtgggccgggaggcagtgctgatccggctgctcctccagcccttcagacgagatcctgtttcagctaaatgcagggaaactcaatgtttttttaagttttgttttccctttaaagcctttttttaggccacattgacagtggtgggcggggagaagatagggaacactcatccctggtcgtctatcccagtgtgtgtttaacattcacagcccagaaccacagatgtgtctgggagagcctggcaaggcattcctcatcaccatcgtgtttgcaaaggtt

SEQ ID NO: 1015 - DNA, 3466 bp, Homo sapiens
atgaccagcaggcctggctacaggcagcaagcaccaaaccccattccagatgccaggaaaggcacacacaggcctggcgcaggtgggctgtcttctggccgctccctgggtggactggtcttggagactggacggagtgctcaatgtcaggaggaagccacgactcactcactggagaacacgagagacagccggcgccgccccgaggagtgagcggaggatctgcctggagctagccagcctcatggcctggacagacacctcagtgagcctgtgatcagggccctcggagcagagccagctgcagggaggcaagtcaggaggcctttccttgaggccaggagagaagaacaagccagcaggagggcaggacagactccagagacactcgttgagaaaactggcttcagctccagagtggggggcagaggggctgctccgcctgggcagcgtggggactgctgccggccgggaagctgccaagagcccgggagaggagggcagagggcacagcactccttcttcatagacagcagggacaaaggtggagggtgactacgtcactctcgattccccgcctttctgggaaggcctcatcatgaaacattttcggcatcataatactggcttataaatgttcgtatacccaattcccaaaccattgattaatttattaaagctatgatttacgtaaggatgagcatttaattagagaagagcttctaccatttcaccaacccaggcagtggggaaggggtggaaaggggcggctgctgtcccaggggcagtccttggtgtcctcctggtccaggctttcttccctcccttcactggcctccagagccaggtgctgcgctgcctgcactagaagccctgccctaggctgtgctgagcatgcgcacacaccccccacagcagggctcccgcgtcagtggcctcactccaccctgctctcccagcgagcctgctgtccatagtctggcaggtctcctcttcacgttcagtgacacaactgctcggcgcattatagaggcctctgaaaggctatgtgttcacgatcctcccatggaggggctcagaggagcggcctaagaggagatgcctgcactgtgcaggaaagaggggctccctgcagagccagtgccgttggtggggctcaggctcccagggtaggggcaggagtggtctccacagtgcacatttgcacgtatgttaggacgaggctatggggcacagaggggccatttgccctgcctggagactggtctagggttgcagggcccacatgtactgcatgcccccaaaagggtcaggggaaggcttcctccatccccttggggccacagcctcctacttgcctagggaaacatggctcttggaggcccagggaggccactaccctgctgagcaggcaggccccaaactaaggtggagaccacagcgatcgcagcggggcagcagaagctggtctcaggctggtgggtgaaagctgaggttactggcagttgccatggcatggtgagattgccaggatgagggcccacttgaagaacatgcctgcactgccctagagctgcatcttcctggcagcagaatgtcaggggaaccaggcctccccgcttcaagtgggacaaatgtatgagcctggggggcaggtggggagggccctgcagggtgcctgggcagcctgtggaggaacagcggggattcccttcgcaccgggtgtagccagctgcacggcattaacagccacttgttcttcagaactttgctcttcaggtggggtctggggtgaggaaacccagtaacccaggatttgcacaaggaaagtagcttcctgtggcttggcttcttacgagtgtctaaaagaaccgtcccggtaccgctaggccacaaaatgttcagaaaacactgcaagagacactgggacactctaaagccaggcccagagaaggaatgccgaggagagagaggaggaatgccaaagagaggcccagcgggaaggggttctgcccagcaccctctgcctggtcccgggctccctgtgcagggagctatgccagtgtgctgagggtgttcgatgaggacagcagctcacaattgcagaagccacggactcctggagaaatggaccacgcaccttctccccagcaaagtgtcctctctccaaagagctttgaatctcagagaatctgaaggcccccaccacgtggggcccatccagagccctggcccagagcagcagaggacaggcttatacccctgctctggagttgtgaaaccgtggcaccctggagttgtgaaatgccatctcaaactcggccaatggcccttccatccctgtcccagctcctacactggctctttccattataaggaggccgggaagtaatccagcttcacctggtaagttcgacctgtgaaatgtgggaagacacaagtcagacacaacaccttctgtccacaccgctggcacaaggcttccagttgggcagagctgctagggggcacggggacagaggtggagctcctccatccagcccccaaaggagcctgggcatgaccgtgggtactcagagcaggctgcctcctgagggaccagaagtcaagcgtgcgacgggctgcggggcggagaggccactctgcctccagggacacacactctcccaggcccacttccctgtggccaaggaggaaagccgagcaggcacctttgagttgcacacaacggacacacagcacagagcccacccagcctgagtatttaccatccgcctttcatggaaatgccggcacctgctccagaggatacaggaatgacagggatggaggacgggagggactcccagcctgcggggaggctcctgcatgtgcccagcagactttcagcagggctgggctgcaggagtgcccagcatttcccatttcagctccactggaaagtgcggctggttcaagttgttgcgaactgatcccacccatgtatactggggtgggagggcagtgggcagcttctcggctcaggtttccagagcacgagggggcagatccagagcgagagtaactcaccgtattaagagtctgggcattaagcctggtgccatgaagggaccagactttggggccatcttccttgggtagggtttattttgcatggggaaagctgggaagcaaatatttgtgaccagaagggcaaatgatggtgactgaattactgctcatgcatattcactgcctgtccctgggagaggcctacacttcccaccccctgaagtcttggccagttggcgtctcttgtgggaagaataactcccgtcctgcgggtggttgtctgtgctctcactgctctgctccaacaccagcgacactccagatggggactgcactagttgcttgggaaggggttgaagacaagagccacagctgacacaggtgaacaggaaataaacttgtctatgtatcagcc

SEQ ID NO: 1016 - DNA, 4590 bp, Homo sapiens
gatgcttgaacggttacgtgaagaccggaggcgcgtttgaccccggtgcagggcctcggactacaggaaggctggaggtccaaaatgagaggaaagcggagcaagcaaacgcagaacttcagcaaggccctcagaggagaattagctatgatttgagagactgagtcgttcttgctgagacggtaaaacttagcttgggctgagaaagtaacaaactgcctagcctttcatctggatggataacagagtcaaataaagccagacgacgttaagaggaaacaatgtttcttttaggacatgctgcaacggaaaagtattaccacttaagtacattcttactacacactgagaaaccttgttatttcttctttttttttttttttttttttgagacggagtctcgctctgtcgcccaggctggagtacagtggcagagcttggaggcaagctctgcctccaaggttcatgccgttctcgtgcctcagcctcccgagtagctgggactacaggtgcccgccaccacgcccggctaatttttttgtatttttagtagacacggtttcaccgtgttagccaggatggtctctattttctgacctcgtgatccgcccgcgtccgcctcccaaagtgctgcgattacaggtgtgagccaccgcgtctggccgaaaccttgttctttcaagtccacataaacgttgctatttgaaattatatcagaacgagtgaaaagtcccatccttgcctggaggatctaagtctctttgacgcagagaagcagcctcaatttctatccaggtgtagagcttcagataaacggttctgaaaacattctgtattttcttaactttgcagtttccaaggaaacatgccctacattcaattctcgtccagacctgatgttaatgcctttacacacagctatgctttgagatttcatttaaatttcacctaaacttcactctccccgccaaaacatacaataactaccttttattttgtacggtgagacacaccacaactcctctggtgtgcagtcttcttgattgcaataagtcaatagatctgactttgttggattacaggtttgtgctggtggttttaggattattgagctgggagtgagccatcattcttgctcatgtaatttgtttggattttgaagacagcagaatctacaggacgggaactacttgtccaaactagttttttattttctttaatcaatgcaattcgtttattttgaaacaaatttatggaaaagttacaaataacagtacaaagaacttttttcctgaaccatttgagactatgttgcagacctaatgccccatgatccaaatacttattgtatattttctacaaacaaaccagggcattctacataaccacaacacagccaacaaaattaggacattgatactgatgcactactactctctaatccttagactccatttatgttttgccaaatgtcccaatattgtcctttagaggaaaagggttcagttcggaatcattgttgcttagtcatatttcttgtgtctccttcaatttggaagattttttgtttttccttttcatgaccttgacactattaaagactacaggctgcttatactgtagaggttccttagtgcaggtctgtttgatgttttctcttgattagattcagattatgcatctttgtcaggattatcacagaagtgatgctgcggttttcacattgcaggttgtgcacaatttcaatttgtcctgttacctgtaatgctcaatggattacttgcttaaggtggtgtctgccaagctgctctaccataaagttattcttttcctttttgttattaataagaattttgtggggaggtactttgaaagtatataaaaatctgattgttcatccaacttttagctcattcacttatttatttatatcagtatggactcatgatttccaatgttattcaatgggttataatccattactatcattatttattttgatgctcagatcatctccaatttggccaatgggaccccctttaagctcctttacacattcgaaaaaggagaaaaaaaaattccccatgattacttgagcacttttttactttctggtgcagagatgttccaggctcatttttacattctctactccagtcctgaaatcagttatttctccaggggtccttttggtgctgcttagaaaccaagatctgagctttaatgtgcttattgctactgggatgtctttgctgtcatgaacattgctgggaaatacatatgtataaacaaacacgaacatttacatcaaacatttctatattttatatattaaaactattatgccttctatgtcaaagactatgaaaaaaagaaaaaaacttgagttcacactgataatctccaatttcaatccaaaatcacatgattcattttattttcctctatttttaactccattgataacaagaaacttggctttcattaaccttagtatatttattttattaccaccttgtgttaaccagtattgctttgtagccactgacttctcattcctgcacaagtcagcatgtgtaaggactttgctgggatcaaatacctaaaataataccagtggtgactgaaacttaagtgagggtaagcccagtgcttggtgaaggtagagaggggcaaggccagaatgccggttgagactgtctaggtggagtgtgtgtgagacaatgagagcctagggcttgcaggacttggtagtgatcggtttggtgatgggtatatataggtggaaatcaggagagtggggttacaggaaggaaacttctgatttcttcaagatggcagaggaaaaatactgctgcctccccttccaattggatgaggcaactgtctcgacttgataggagataggattcctccccaataaaaaggaatgagagacacttcagattctaggacatcaggtacagagagggcttatgcttattgaatggtgagtcaaacatcccagaaaaatacctatggatctcttatggactagcaacaaaaatagttggccatctcctcatcatataatgaagttcattgattaagctcacccttgtacccctgaattatcaattttcagatgtctcatttaaatccaaatgcacagtcagggactagacatttgaaggcagatgccaacaggaaagagcaaagcaaagaaacagaaaaagaagttagaggaaacaaaaacactaaaatatttttaaaatttaaagaaactaaaatatcatcagagaggataacatgaaacaagaatggcatactatataaaagaacaattatagaaataaagtactcttggaaaacgtagatagtgggaacaaattaaagaaggttagaagataaagtctgagggaatttctataagattcaaactagatcttgaaccccattttaaatctgttatgagagagggcgtaaagctctggagagtaaaaagatttctagttaataagggcaacatttcaaacaatttcccagcacagacttttttaaataaaatttttattttttctaaagtagtgtgaatcatcttgggaaggaggaaggtgagaaagataaaagtggattcaagctttttgaagtcttttgaggcaactgtaaagagggaggaggctatttaaaggaaggatttatcaagcgctgaatgatgccacctgtaaaatgtcctttcattaaaagaacagattatttggacttaagggtccaaataatgactctcagtgagagctggtttggtgccatgtgggagtaaattggattttctcaagtctttggtataaccttagaaagcaaaatttcgtctaaatacctcctttacccatgcatatgtagcaaatccaaaatttttgctgttaacagtatatatggcaaaaggaatatagactgcttggtggaataattgtttattaaacggctgattttgattttgttagcaatattgtcatgtcaaaataattcatgacttaaaattttcatgggatgatatgtcaagtttttgccagctggaccacaaggtcacaagtatatgttttgttttgtttttttcaaatagcaacaatttttttaagatgctaaacttttctgaccgaattgtgatttttgaaagcataaacttactttgtcatcaaaataatatcattgcaaaggatataacattaacttatcaaatgtctactaaaaagcaagcagagcactttacaggacagggagttttgggcaacaaaatagaaaatgtgcttgtcagtatggtgagtgtacttttacgcactatcctgatattgacaattctgtagaaatttccaaggcagaaaaagacactaattgggaattatgatacagattactaaggaaaaaaaccacttcattataacccacatcaaacctgtgtatgtatttactatagtgtgttctagtcaattgacatagcctaaaaggaaatgctggtgtacttaaaatatcttagacaggtactgtatattctacataggagattgtcaaattatatagctatattgtaatataataaatggatatttcactctc

SEQ ID NO: 1017 - DNA, 4499 bp, Homo sapiens
atttttgctcgtcggctgggagccgggcgtcgggtcgctgggagtttgcctcttgtggcagcatcctgcttagtccagcgaattgtgacacattattaaatgtatcagaatataagaactgtgtcactactacgtcaccagatggccatttccacgaattcatgtttccgttcggcggccggcgtccctcgggtggtcgcatgcaatgagtgcatctttctcgagaacaactcttccgcggaaagtcattgctgacagtcctggcattccggtggctgcttcttggcagtgagcacttgtctatcttgcttccaagatccggtacttgcaggaatatcataaccgggttctccacaacatttatcctgtaccatcaggaacagatattgcaaacaccttgaaatacttttctcagaccttgttaagcgtcctgcgagatgctccctcagaacgcggcccgcaaagtcgtgatgctcagttgtcagactacccttctttggactaccaaggcctctacgtgactttggtgaccctcctggatctagttcctttactacagcacggccaacacgatcttggacagtcgatattttatacaactacatgtttgctaccttttctcaatgatgatattctgagtactttgccctacacgatgatatcaacgttggctacctttcctccatttctgcacaaggatatcattgaatatcttagcacatcttttctaccaatggctatattgggctcctcaaggagagaaggtgtacctgcccatgttaacctctctgcatcatccatgctaatgattgcaatgcagtacacatccaatccagtgtatcattgtcaattactggaatgcctcatgaaatataaacaagaagtctggaaagatcttttgtatgtgattgcgtatgggccttcacaagtgaagcctccagctgtgcaaatgcttttccactactggcccaatttaaaacctcctggggcaataagcgagtacagggggttgcagtacacagcttggaatcccatccactgccagcacattgaatgccacaatgcaattaacaaaccagctgtgaagatgtgtatagacccttccctgtcagtagcgttgggtgataaaccacccccattgtatctctgtgaagaatgcagcgagaggattgcaggggaccacagtgagtggctgattgatgttcttctgccacaagctgaaatatctgctatatgtcagaaaaagaactgcagttcccacgttagaagagcagttgtcacctgcttctcagcagggtgctgtggtcgtcacggaaacaggcctgttcggtactgcaagaggtgccactcaaatcatcacagtaatgaagtgggggccgctgcggagactcacctctatcagacctctcctccgcccatcaacacgcgggaatgcggcgctgaggagctggtctgcgccgtggaagccgtgatcagcttgttgaaagaagccgagttccatgctgagcagcgagaacatgagctgaaccggcggcggcagctgggtctctcctcttcccaccattccctggataatgctgactttgataacaaggacgatgatagacacgatcagaggctgctcagtcaattcggaatatggttcttagtgagcctctgcacacccagtgagaacacgcctacagaaagcttggcccggctggtggccatggtgtttcagtggtttcactccactgcgtatatgatggatgatgaagtgggaagtctggtggaaaagctgaagcctcagtttgtcaccaaatggctgaagaccgtatgtgatgttcgcttcgatgtcatggtcatgtgccttcttcctaaacccatggaatttgccagggttggtggctactgggataagtcctgtagcacagtgactcagctgaaggaaggtctcaaccgaatcctctgcctgatcccctataatgtgatcaatcaatctgtctgggagtgtattatgccggaatggctggaagccatcagaacagaagtcccagataatcagttaaaagaattcagggaagtattaagcaaaatgtttgacattgaactctgtcctctgcctttctcaatggaggagatgtttggttttattagttgtcggtttacaggatacccctcctctgtgcaggagcaagctttactgtggcttcatgtattatcggagttagatatcatggttccacttcaactactaataagtatgttttctgatggagttaattcagtcaaagagctggcaaatcaaagaaaatcaagagtcagtgaactggcagggaaccttgcatctcgaagggtgagtgttgcctctgatcctggccgacgagttcagcacaatatgcttagtccatttcatagtcctttccagagtccgtttcggagtcctttgcgtagtccgtttcgtagccctttcaagaattttggacacccaggaggaaggactattgactttgattgtgaagatgatgaaatgaatctaaattgtttcatcctcatgtttgatcttctcctgaagcagatggagttacaagatgatggaatcacgatgggtttagagcacagcttatcaaaggacattatttctattataaacaatgtcttccaagccccctgggggggatcccacacctgccagaaggacgaaaaagcaatcgagtgcaacttatgtcagtctagtatcctctgctatcagcttgcttgtgaactcctggagagactagctcctaaagaagaaagccggctggtggagcccacagacagcctggaggatagcctcctttcttccagaccagagtttatcataggccctgaaggggaggaggaggagaatcctgcaagcaagcatggggagaacccaggcaactgcaccgagcccgtggaacatgctgcagtaaagaatgataccgaaagaaaattttgctaccaacagcttccggtaacattgagactaatatataccattttccaggaaatggctaagtttgaagagccagacattctttttaatatgctcaattgcctgaagattctctgtctgcatggagaatgtttatacattgccagaaaagatcaccctcaatttttagcctacattcaggaccacatgttgattgcaagcctgtggagggtcgtcaaatccgagttctctcagctgtcttccctggcagtccctcttctcctccatgccctgtcacttcctcatggtgctgacatcttctggacaatcataaatggcaatttcaacagcaaagactggaagatgaggtttgaagcagtggaaaaagttgctgtaatttgtagatttctggatattcactcagtaaccaaaaaccacctgctgaagtactccctggcacatgccttctgctgcttcctgacagcagtggaggatgtcaaccccgcagtggctaccagagctggtctcctgcttgacaccataaagaggccagcattgcagggtctatgtctttgtcttgacttccagtttgatactgtggttaaagacagacccacaattttgagcaagcttttactcttgcactttcttaagcaggatattcctgctctgagctgggagttctttgtcaatagatttgagacgctttctttggaagcccagctacatttggattgtaacaaggaatttccttttcctacaaccatcactgctgtgaggaccaatgttgctaacctcagcgatgcagccttatggaagatcaagagagctcgctttgcaagaaaccgccagaagagtgtacgttccctgagggacagcgtgaaagggcctgtggaatccaagagggcgctctccctccctgagaccctgacctccaaaattcgacaacaatctcctgagaatgacaacaccatcaaggacctgctcccagaagacgctgggatcgaccaccagacagttcaccagctgattacagtgcccatgaagttcatggccaaggatgaaagcagcgctgagtcagacatcagcagtgcaaaggccttcaacacggtcaagcgacacctgtacgtcttactcggctatgaccagcaggaaggttgcttcatgattgcacctcaaaaaatgcgcctgtcaacttgctttaatgcattcattgcaggaattgcccaagttatggactataacattaacttgggaaaacaccttctccccttagtggttcaggtgctcaaatactgctcttgtcctcaactccggcattatttccaacagccgcctcgttgctccctctggtccctaaagcctcacatccggcagatgtggttgaaggccttgcttgtcatcctttacaagtatccataccgagactgtgatatcagcaagatcctgctgcatctgattcacataacagtcaatacactcaatgcgcagtatcatagctgcaagccccatgccacggcaggacctttgtacagtgacaacagtaacataagcagatacagcg

SEQ ID NO: 1018 - DNA, 4064 bp, Homo sapiens
aatcacaacatgatctcgtgtgctgagcagcgaagccggcagggagaggccggcagaggcccggctccggtggctccagctttcctcccactctggctccccaggggctgctctggaattctctcggtgcccgccgttgccatgcactcggctggaactcccagagccgagtcccccatgagcaggcaggagaaggacgcagagctggatcggaggatagttgccctgcgcaagaagaaccaggccttgctccgcaggtaccaggagatccaggaggaccgtcggcaggcagagcagggggggatggctgtgaccacaccagcactcctccagcctgatggcctcaccgttaccatcagccaggttcccggtgaaaagcgggtggttagcaggaactgggcaaggggtacctgtggacccagagtgaccaacgagatgcttgaggatgaggatgctgaggaccacgggggtactttctgcttaggggagctggtggagctggctgtgaccatggagaacaaagcagagggcaaacggattgtaagtgaaaagcctaccagagcaaggaaccaaggcatagaggggtcacctggagggcgtgtgacccgaagcccccccacgcaggtggccatcagctcagattctgcacggaagggttcttgggagccctggagccggccggtgggggagcccccggaggcgggctgggactatgcccagtggaagcaggagcgggagcagatcgacctagcccgcctcgcccggcacagagacgcacagggtgactggcgccgcccgtgggacctggacaaggccaagtccacgctacaggactgcagccagctgaggggagaaggcccggccagggcaggcagcagaaggggtcccaggagccaccagaaactacagcccccaccattgctccctgatggaaaaggtcggggcgggcaagccagcagaccctcggtggcaccagccacaggcagcaaagcccggggcaaggagaggctgactggcagggcccgaaggtgggatatgaaggaagacaaggaggagctggaaggtcaggagggaagccaaagcaccagagagactcccagtgaggaggagcaagcccagaagcagagcgggatggagcagggccgactggggagcgcccctgcagccagcccagccctggcatccccagaggggccgaagggggagtcagtggcttccacagccagctcagtcccctgctctccacaggagcctgacttggctcctcttgacctctccctaggaggggctggcatccctgggcccagggagagcgggtgtgtgctcggtctgaggcctggggcccaggagagccctgtgtcttggccagagggctctaagcagcagcccctggggtggagcaatcaccaggctgagctggaagtacagacttgccctgagccacagagaggagcagggctcccagagcccggagaagacaggtctggcaagtctggggcccagcagggcctggccccgagaagccggcccacgagaggaggcagccaaaggtcgagaggcacagcaggtgtgaggcgcaggacagggcgccctggcccggcaggaagatgctgaacacagctcctgggagctggggagtccccggggagaggaaaagggaatcactctgttaaaggccctccgcgtgatggccatgtggttgccggtggcttgcgccattgtcactgagcagtgtggcaaactctccagcatggcgaccttgtgagggcaaggagtggcctccctgcacctcacacgctcatctctgtgcacatgtgtgttttcacgcacgggcacagcccctggtgtattcctgtactagtatctggcatctgaggctggtgcaccctgacctgggcctactgctgcccaggccacaagccttctccactatgatgagagaacaaggcttggtggcacccagcacctggctctcctggctccccgtcacccccccagggcctggcctccctctccagctgcaggctttcacctcttgcctgggctggattcccccagtcccagattcccaggatgcccaaccaggggaatcccagtaaccatgcgccagcctcctgcctctcctgagtggtggctgaggcctggaggaggagaggccacacagctggcagggtctggcctgggcaaagaagagtagagctcacgtcttcttggtgaaaaggaggatctctggaaagtcctcctctctgaaatgggttgggatggggagcgacaacctcctcttcccacagcaggatgggagagcttactcccaggcccccacacccaggtcagacatcacgtgcgccctgaatgtaggcaagggcctggccctgcagcccagggtcatttcctgctctttccacttcctctttccccaccgtcctgcactagcaccagggccaggccaaggcaagaatcagacagctactccacagacagagaaacaacttccagctaagtatgacatcaggacttgtctttcctactaagcctccatccccgcccctcccctgaggcccacgtctgctgaattatccggactccgcacaagctgtggcttcctctcagttcaacaaacatttcctgagcacccactaccagtaatccagccggtaggcgacggagactgccagcaggagggagggaagaaagccagtcatccggcagatctgggctgttctgggcgggagctgttctgggccacaggtgccctacagggctgggggcaggatggcggtaggagccccaggggaccctcccacctctgcctggcagaagcaagtgcccttctttcttgttatgtgtgccttctgctcctgagccctagtgtggacctcaccgcatggtcccctctgccccctccttctggtcctgccatggctgctgctctctgctgaaggctgtggggctctagggagagtccagatcaccctgggatttctccactgcccaatgtgaagcctaaactgtggggaagtagggcttgtctccatggatgacgtccagaaggatgtcaggaggaggaatatcacaggagttatagacattggagggaacagagactggcacaggacctcttcattgcaggaagatggtagtgtaggcaggtaacattgagctcttttcaaaaaaggagagctcttcttcaagataaggaagtggtagttatggtggtaacccccggctatcagtccggatggttgccacccctcctgctgtaggatggaagcagccatggagtgggagggaggcgcaataagacacccctccacagagcttggcatcatgggaagctggttctacctcttcctggctcctttgtttaaaggcctggctgggagccttccttttgggtgtctttctcttctccaaccaacagaaaagactgctcttcaaaggtggagggtcttcatgaaacacagctgccaggagcccaggcacagggctgggggcctggaaaaaggagggcacacaggaggagggaggagctggtagggagatgctggctttacctaaggtctcgaaacaaggagggcagaataggcagaggcctctccgttccaggcccatttttgacagatggcgggacggaaatgcaatagaccagcctgcaagaaagacatgtgttttgatgacaggcagtgtggccgggtggaacaagcacaggccttggaatccaatggactgaatcagaaccctaggcctgccatctgtcagccgggtgacctgggtcaattttagcctctaaaagcctcagtctccttatctgcaaaatgaggcttgtgatacctgttttgaagggttgctgagaaaattaaagataagggtatccaaaatagtctacggccataccaccctgaacgtgcctaatctcgtaagctaagcagggtcaggcctggttagtacctggatggggagagtatggaaaacatacctgcccgcagttggagttggactgtcttaacagtagcgtggcacacagaaggcactcagtaaatacttgttgaataaatgaagtagcg

SEQ ID NO: 1019 - DNA, 4929 bp, Homo sapiens
atgaatttttcaatgagctttatcatcgcttcttgctcaccccaaaagtaaacatgaagtgtttatgtttacaagcccttgctattgtttatggcagatgtcacgaagaaataggaccttttacagataccagatatatcattggaatgttagagaggtgcacagataaacttgaacgagataggttgattctcttccttaacaagttgatccttaataagaaaaatgttaaggatctcatggattcaaatggaataagaatccttgtggacttgcttacccttgcacatctccatgtaagccgagctacagtaccactgcaaagcaatgtaattgaagctgctccagatatgaaaagagagagtgaaaaggaatggtattttggcaacgcagacaaagaaaggagtggcccgtatggatttcatgagatgcaagaattgtggaccaaaggaatgttaaatgcaaaaaccagatgctgggctcaaggcatggatggatggcgaccacttcagtccataccccagcttaagtggtgtctcttagccagtggacaggctgtcctgaatgaaactgaccttgctacccttatattgaacatgttgatcacaatgtgtggatattttccaagcagggatcaagacaatgccatcattcggcctctacccaaagtgaaaagactgctgtcagatagcacttgccttccccatattattcagctactgctgacctttgaccctacccttgttgagaaggttgctattttgttataccatatcatgcaagataacccacagttaccccgcctttatctgagtggagtatttttctttatcatgatgtacacaggttccaatgtgcttcctgttgctcgatttttgaaatacacacataccaaacaggctttcaagtcagaagagacaaaaggacaagatatttttcagagaagtatacttgggcacattctacctgaagcaatggtttgttacttagaaaattatgaacctgaaaagttttctgagatttttctaggagaatttgatactccagaagcaatctggagcagtgaaatgaggcgcctgatgatagagaagattgctgcccatctcgcggatttcacacctcgtcttcagagtaacacaagagcactttatcagtattgccccattcctataatcaactatccacaactcgaaaatgaactattttgtaacatttattacctcaaacaactgtgtgatacactccggtttccaaattggccaattaaagacccggttaagcttctaaaagatacccttgatgcctggaagaaagaagtagaaaagaagccacctatgatgtcaatagatgatgcttatgaagtgcttaatctgcctcaaggacagggaccgcatgatgagagcaagattaggaaagcttacttcagacttgcacaaaagtaccaccctgataagaatccagaagggagggacatgtttgaaaaagtaaataaagcatatgaatttttatgtaccaaatcagcaaaaatagtggatgggccagatccagagaatataattttaattctaaaaacacagagcatcctcttcaaccgtcataaagaagatttacagccttataaatatgcaggataccccatgcttattcggactataacaatggaaacttcagatgacctccttttctcaaaagaatcaccattgttgcctgcggctacagagctagctttccatactgtcaactgttcagccctcaatgctgaagagctcagaagagagaatggactagaggtgttacaagaggcatttagtcgctgtgtggctgtcttgactcgttctagtaaaccaagtgacatgtcagtacaggtgtgtggatacataagtaaatgctacagtgtggctgctcagtttgaggaatgccgagagaagatcacggaaatgcctagcatcatcaaggatctctgtcgggtactatattttggcaagagtattccccgcgtagctgctcttggggtagaatgtgtcagttcttttgctgtggatttctggctacagacacacctatttcaggctggaattttgtggtatctccttggttttctgtttaattatgactacacactagaagagagtggcattcagaaaagtgaagaaacaaaccagcaggaggtagcaaacagccttgccaaactgagtgtccatgctctgagtcgccttggagggtatttggctgaagaacaagcaactccagaaaatccaaccataaggaaaagcttagctggcatgctgacaccctatgttgctagaaaacttgctgtggctagtgtgactgagattttgaagatgcttaacagcaacacagaaagtccatatttgatatggaacaattctacaagagcagaattacttgaatttcttgaatcccaacaagaaaacatgattaaaaaaggtgattgtgacaaaacttatggatcagaatttgtctacagtgatcatgccaaagaacttattgtaggggagatttttgttagggtgtataatgaagttcctactttccaactggaggttccaaaagcatttgctgcaagtctcttggattatataggctcgcaggcccaatacttgcacacattcatggccatcacacacgcggcaaaagtggagtcagagcaacatggagatcgcttaccgagagtagaaatggctttggaggctctgagaaatgtcataaaatacaatccaggttctgagagtgaatgcattgggcactttaagttgatattttctcttctccgagttcatggagctggtcaagtgcagcagttggctttagaggttgtgaatatagtgacatctaaccaagactgtgtcaacaatattgctgaatcaatggttttgtccagtttattggctcttctacattcattgccatcaagtcgtcagcttgttctggaaactctttatgctttgacatcgagtacaaaaataatcaaagaagcaatggcaaagggtgctttgatctatttactggatatgttctgcaattcaacacatccacaggttcgagcccaaacagcagaactttttgccaaaatgacagcagataaactgataggtccaaaggttcgaattacgttaatgaaatttctaccaagcgttttcatggatgctatgagagacaatcctgaagctgctgtacatatttttgaaggaactcatgaaaatcctgagttaatttggaatgataattccagagataaagtgtccacaacagttagggaaatgatgctagagcactttaaaaatcagcaggacaaccctgaggcaaactggaagttgcctgaagattttgctgtggtgtttggagaagcagagggtgaacttgctgttggaggagtcttcttgaggatctttattgcacaaccagcctgggttctaagaaagcctagagaatttcttattgccctgttagaaaaattaactgagctcctagagaagaacaatcctcatggagaaactctggaaaccttgacaatggcaacagtgtgtctcttcagcgcacaacctcagctggcagatcaggtcccgccattgggccatcttcccaaagttatccaggcaatgaatcataggaacaatgccattcctaagagtgccattcgggttatccatgccttgtctgaaaatgagctgtgtgttcgagccatggcatctttagagaccattggcccactgatgaatggaatgaaaaagcgagcagatactgttggtctagcctgtgaagcaattaatcgaatgtttcagaaggagcagagtgaattagtagcacaagccctgaaagcagatttggttccatacctcttaaaattactcgaaggcattggccttgaaaacctggacagcccagcagccactaaggctcagattgttaaagctctcaaggcaatgactcgaagtttgcagtatggagaacaggtgaatgaaatcctgtgccgttcttcagtctggagtgccttcaaagatcagaaacatgatttgttcatttctgagtcacaaacagcaggatacctcacaggacctggagttgctggctaccttaccgcaggtacatctacatcagtcatgtctaacctgccacctcctgtagaccatgaggcaggcgaccttggctatcagacttgaaatattcacgagagacaataaacgctgaaaggccagtgccaagtccacattcctccagctgatacgttgaagcaaactcttactgcctttctcctggtttcatgacagtgttattcctttttctataaatatatttttaggaaaaaaagtcagtgatcctaattgtatcacattataagaaagcactctgtggatcaacataagtgggtacacaagaattttttttttcttggtgtatgtaagcacatttgttcctttatatctgtttacaaaactgtgaatcaaaaagacaaaactttcttcctagtttttgtaatttttttttgaactagcatgactgtagggttgagctacagtcaacaaaaattgggctaagtcacttttccccaggaaagaatatttccctctcctgcatcaagtctgcgtggccatcctccccccaccatccaagactattaggttttgtccctgcacccttcactggcatcctcaatcattaaccttctgaaagctcacagtacacattagtatgtataactggctttaccaaattgaatgaaaaggagcttgtgcaaaaaaatttaaaaatggatgtcaagatgttatgtaaaagatgagtgtaattgtgaaatgttctatacactatcaaatatataaagctttctatattgaatgtacattatacagatcattcatatgtgtacataaaattttaaaaataaagggaattgactgctttgttaatgag

SEQ ID NO: 1020 - DNA, 5460 bp, Homo sapiens
ttgcgcggactggagctgtgtgcagggccagcgcggagcccgagcagccgcggtgaagcgcctgtgctctgccgagactgtcgtgcccattgctcgcctcggtcgccgccgctttagccgcctccgggggagcggccgcctattgtctttctccgcggcgaaggtgaagagttgtcccagctcggcccgcgggggagccccgggagccgcacgtgtcctgggtcatgaaacttaatccacagcaagctcccttatatggtgattgtgttgttacagtgctgcttgctgaagaggacaaagctgaagatgatgtagtgttttacttggtatttttgggttccaccctccgtcactgtacaagtactcggaaggtcagttctgatacattggagaccattgctcctggtcatgattgttgtgaaacagtgaaggtgcagctctgtgcttccaaagagggccttcccgtgtttgtggtggctgaagaagactttcatttcgtccaggatgaagcgtatgatgcagctcaattcctagcaaccagtgctggaaatcagcaggctttgaactttacccgttttcttgaccagtcaggacccccatctggggatgtgaattcccttgataagaagttggtgctggcattcaggcacctgaagctgcccacggagtggaatgtattggggacagatcagagtttgcatgatgctggcccgcgagagacattgatgcattttgctgtgcggctgggactgctgaggttgacgtggttcctgtcgcagaagccaggtggccgcggagctctcagtatccacaaccaggaaggggcgacgcctgtgagcttggccttggagcgaggctatcacaagctgcaccagcttctaaccgaggagaatgctggagaaccagactcctggagcagtttatcctatgaaataccgtatggagactgttctgtgaggcatcatcgagagttggacatctatacattaacctctgagtctgattcacatcatgaacacccatttcctggagacggttgcactggaccaatttttaaacttatgaacatccaacagcaactaatgaaaacaaacctcaagcagatggacagtcttatgcccttaatgatgacagcacaggatccttccagtgccccagagacagatggccagtttcttccctgtgcaccggagcccacggaccctcagcgactttcttcttctgaagagactgagagcactcagtgctgcccagggagccctgttgcacagactgaaagtccctgtgatttgtcaagcatagttgaggaggagaatacagaccgttcctgtaggaagaaaaataaaggcgtggaaagaaaaggggaagaggtggagccagcacctattgtggactctggaactgtatctgatcaagacagctgccttcagagcttgcctgattgtggagtaaagggcacggaaggcctttcgtcctgtggaaacagaaatgaagaaactggaacaaaatcttctggaatgcccacagaccaggagtccctgagcagtggagatgctgtgcttcagagagacttggtcacggagccaggcacagcccagtattcctctggaggtgaactgggaggcatttcaacaacaaatgtcagtaccccagacactgcaggggaaatggaacatgggctcatgaacccagatgccactgttcggaagaatgtgcttcagggaggggaaagtacaaaggaaagatttgagaactctaatattggcacagctggagcctctgacgtgcacgtcacaagtaagcctgtggataaaatcagtgttccaaactgtgcccctgccgccagttccctggatggtaacaaacctgctgagtcttcacttgcatttagtaatgaagaaacctccactgaaaaaacagcagaaacggaaacttcacgaagttgtgaggagagtgctgatgctccagtagatcagaattctgtggtgattccagctgctgcaaaagacaagatttcagatggattagaaccttatactctcttagcagcaggcataggtgaggcaatgtcaccctcagatttagcccttcttgtgctggaagaagatgtaatgccacaccagaactcagaaacaaattcatctcatgctcaaagccaaaagggcaaatcctcacccatttgttctacaactggagacgataaactttgtgcagactctgcatgtcaacagaacacagtgacttctagtggcgatttggttgcaaaactgtgtgataacatagttagcgagtccgaaagcaccacagcaaggcaacccagctcacaagatccacccgatgcctcccactgtgaagacccacaggctcatacagtcacctctgaccctgtaagggatacccaggaacgtgcggatttttgtcctttcaaagtggtggataacaaaggccaacgaaaagatgtgaaactagataaacctttaacaaatatgcttgaggtggtttcacatccacatccagttgtccctaaaatggagaaagaactggtgccagaccaggcagtaatatcagacagtactttctctctggcaaacagtccaggcagtgaatcagtaaccaaggatgacgcactttcttttgtcccctcccagaaagaaaagggaacagcaactcctgaactacatacagctacagattatagagatggcccagatggaaattcgaatgagcctgatacgcggccactagaagacagggcagcaggcctgtccacatcctccactgctgcagagcttcagcacgggatggggaataccagtctcacaggacttggtggagagcatgagggtcctgcccctccagcaatcccagaagctctgaatatcaaggggaacactgactcttccctgcaaagtatgggtaaggccactttggctttagattcagttttgactgaagaaggaaaacttctggtggtttcagaaagctctgcagctcaggaacaagataaggataaagcggtgacctgttcctctattaaggaaaatgctctctcttcaggaactttgcaggaagagcagagaacaccacctcctggacaagatactcaacaatttcatgaaaaatcaatctcagctgactgtgccaaggacaaagcacttcagctaagtaattcaccgggtgcatcctctgcctttcttaaggcagaaactgaacataacaaggaagtggccccacaagtctcactgctgactcaaggtggggctgcccagagcctggtgccaccaggagcaagtctggccacagagtcaaggcaggaagccttgggggcagagcacaacagctctgctctgttgccatgtctgttgccagatgggtctgatgggtccgatgctcttaactgcagtcaggcttctcctctggatgttggagtgaagaacactcaatcccagggaaaaactagtgcctgtgaggtgagtggaaatgtgacggtggatgttacaggggttaatgctctacaaggtatggctgagcccagaagagagaatatatcacacaacacccaagacatcctgattccaaacgtcttgttgagccaagagaagaatgccgttctaggtttgccagtggctctacaggacaaagctgtgactgacccacagggagttggaaccccagagatgatacctcttgattgggagaaagggaagctggagggagcagaccacagctgtaccatgggtgacgctgaggaagcccaaatagacgatgaagcacatcctgtcctactgcagcctgttgccaaggagctccccacagacatggagctctcagcccatgatgatggggccccagctggtgtgagggaagtcacgcgagccccgccttcaggcagagaaaggagcactccctctctaccttgcatggtctctgcccaggacgcacctctgcctaagggagcagacttgatagaggaggctgccagccgtatagtggatgctgtcatcgaacaagtcaaggccgctggagcactgcttactgagggggaggcctgtcacatgtcactgtccagccctgagttgggtcctctcactaaaggactagagagtgcttttacagaaaaagtgagtactttcccacctggggagagcctaccaatgggcagtactcctgaggaagccacggggagccttgcaggatgttttgctggaagggaggagccagagaagatcattttacctgtccaggggcctgagccagcagcagaaatgccagacgtgaaagctgaagatgaagtggattttagagcaagttcaatttctgaagaagtggctgtagggagcatagctgctacactgaagatgaagcaaggcccaatgacccaggcgataaaccgagaaaactggtgtacaatagagccatgccctgatgcagcatctcttctggcttccaagcagagcccagaatgtgagaacttcctggatgttggactgggcagagagtgtacctcaaaacaaggtgtacttaaaagagaatctgggagtgattctgacctctttcactcacccagtgatgacatggacagcatcatcttcccaaagccagaggaagagcatttggcctgtgatatcaccggatccagttcatccaccgatgacacggcttcactggaccgacattcttctcatggcagtgatgtgtctctctcccagattttaaagccaaacaggtcaggagatcggcaaagccttgatggattctacagccatgggatgggagctgagggtcgagaaagtgagagtgagcctgctgacccaggcgacgtggaggaggaggagatggacagtatcactgaagtgcctgcaaactgctctgtcctaaggagctccatgcgctctctttctcccttccggaggcacagctgggggcctgggaaaaatgcagccagcgatgcagaaatgaaccaccggagtttcagtctagaaggcttgacaggaggagctggtgtcggaaacaagccatcctcatctctagaagtaagctctgcaaatgccgaagagctcagacacccattcagtggtgaggaacgggttgactctttggtgtcactttcagaagaggatctggagtcagaccagagagaacataggatgtttgatcagcagatatgtcacagatctaagcagcagggatttaattactgtacatcagccatttcctctccattgacaaaatccatctcattaatgacaatcagccatcctggattggacaattcacggcccttccacagtaccttccacaataccagtgctaatctgactgagagtataacagaagagaactataatttcctgccacatagcccctccaagaaagattctgaatggaagagtggaacaaaagtcagtcgtacattcagctacatcaagaataaaatgtctagcagcaagaagagcaaag

SEQ ID NO: 1021 - DNA, 4320 bp, Homo sapiens
tcctttgtccgctctctgatggcgccggctccctgcccagcgctgagtcgggtccggccgccagccccgcgctcgcagacctcggctgccgggtgtggcgcggggactggggaacgctggcccgtgcccagtgcggttggagcctgtcccgcgcgtccccgggacgcgcttcttcccgcctccgcccgcgccagcgcccgcacccggatccccacttctcccggccctcgggagccaggagagccctgagatggcgttggcggaagtgaagccccgagcgggggtctgcgaggctggtgatcagcgccggtaacatggcctttctgtcctctccccggtcccagtgcaccccttaaacaacgacccccgcgttttccccgtactagatggttagggcgcatagtgccgaactacgctgctgctacagaatagcttttttgggggcaacataaaaaagaattgtatgtatggtttatatacaacaaaatgtcccattttcagtgtgcaaatcgacgggatttgacaaattatacactcctgtaaccattatcccaaagtgaacattgaccatttccttcaccctgcaaagttccctggtacctcctttctgtcaatccaccccaggccccgcactcaaccccggttctgattgttatcatagcttagctttgactgttctagaacttcatagaacaagatcatcagattatatctgggtgttggcacccagccactattctgccaatgaagtacatcctggtcacgggtggggtcatctcaggcattggtaaagggatcattgccagcagcattggaacgattctaaaatcatgtggactccgagttactgccataaaaatcgacccctatattaacatcgatgctggcactttttcaccttatgaacacggtgaagtcttcgtcttaaatgatggtggagaagttgatttagaccttggaaattatgaaagatttttggatattaatctttataaagacaacaatatcaccacggggaagatatatcagcatgtgatcaataaagagaggcgtggtgattacctggggaaaacagtgcaagttgtccctcacattactgatgctgtccaggagtgggttatgaatcaagccaaggtgccggtggatggtaataaggaagagccccaaatatgcgttattgagctgggaggcaccattggagacatcgaagggatgccgtttgtggaggcgtttagacaattccagtttaaggcgaaaagagagaatttctgtaatatccacgttagccttgtcccacagctcagtgctaccggagaacaaaaaaccaaacccacccaaaacagcgtccgcgcactgaggggtttaggcctgtctccagatctgattgtctgccgaagttcaacgcccattgagatggccgtgaaggagaagatttctatgttttgtcacgtgaaccctgaacaggtcatatgtatccatgatgtttcttccacataccgagttcctgtgcttttagaggaacaaagcattgtgaaatattttaaggagagattgcacctgcccatcggtgattctgcaagtaatttgctttttaagtggagaaatatggctgacaggtatgaaaggttacagaaaatatgctccatagccctggttggcaaatacaccaagctcagagactgctacgcctctgtgttcaaagccctggaacactcagccctggccatcaaccacaagttgaatctgatgtacatagactccattgatctggagaagatcactgaaaccgaggaccctgtgaaatttcatgaagcttggcagaagctatgcaaagctgatggtattcttgtgcctggaggctttggaatcagaggaacattgggaaaactccaggcgatttcttgggcaaggacaaagaagattccttttctgggagtttgtcttgggatgcaactagcagtgatagagtttgcaagaaactgccttaacttgaaagatgctgattccacagagtttaggccaaatgccccagttcctctggtgattgatatgcccgagcacaaccctggcaatttgggaggaacaatgagactgggaataagaagaactgttttcaaaactgaaaattcaatattaaggaaactttatggtgatgttccttttatagaagaaagacacagacatcggttcgaggtaaaccctaacctgatcaaacaatttgagcagaatgacttaagttttgtaggtcaggatgttgatggagacaggatggaaatcattgaactggcaaatcatccttattttgttggtgtccagttccatcctgagttttcttctaggccgatgaagccttcccctccgtatctggggctgttacttgcagcaactgggaacctgaatgcctacttgcaacagggttgcaaactgtcttccagtgatagatacagtgatgccagtgatgacagcttttcagagccaaggatagctgagttggaaataagctgaaatgaatacatgactgggaataatggggactgcctgtgaggcctctgaaataattgaaggcaagatgaaggaactatctgaagaaatcactacactcttagagaatccctctgttctccagcaaacatgggatgtaaagcctcacagggaatctgataatacatacttctgtcaaccagaaccagaggggtagttttcttttccctccagaggcagcctttggtacttaaaatatctgtagctgattaaatttttcccaacaacctcactggggagaaagtgtgttcatgttttgtccagcggatcaggatgttaggatgacgagcaagagtccaggtcactgtgcctttgctgtgttgtatggaaaggatggcagggaacatgctgtaagtaattttgagtaagaaaatgagtcactgtgttacctggaactcagccacagatttgtgtgtggtccaagatcattgcagtttctcaccctgtttatttcctggtaaaagtaaaattgaataggtccaagacttgggggtggcaagtaaggctttgcctcaggcacaaaatttaagggggctccaaaaaactcaggaatcaagatcagcaatacagtctgagtatcccttatgtgaaatgcttggggctagaagtgttttgaatttcagattttggaatatttgcatatacatgcgatatcttggggatgaggctcaagactaaacatgaaattcatttatgcttcatatacaccttatatacatagcctaaaggtaatttgatacaatattttaaataattttgtgcatgaaacaaagtttcgactgcattttgactgtgatttctggcatgagatcagttatggaattttccacttctagcgtcatgttggcattcagaaattttgaaattttggagcattttggattttcagattagggatgctcaacctgtatatatattttttaatcgacgtgaaattcacgtaacatagaattaaccattttgaagtgaacaatttggttgcattcactgatgttgagcaaccaccacctttaactatttccaaaacattttcatcactccaaaataaatgcctgtacacactagcagtcactccctatcttcccctccacctgtccgctggcaaccactgatctcctttttatttctgtggctttttctattctggatatttcatataagtggaattacacaatatatgtggtcttttgtgtctggcttcttctgagacagtaggaagggggcttggctttggctcacccccactagagcattttttcatgcattcccactgatcacaaaacccatactactacctcattgacaccatacctgctaacctcgaggctttagtcatacaaagaaaatggcctttctgtattgttcttctgtgctctcataatgcttaaccatgtcttttacttaaacaattccaggaactggccttaggagatccaaatagggaaccaagattgcagagtgtcccatcttgggagggaatgctgaataattaattgatttacagccttgttgccgctggccagaccaccaggtggcccattactcgagatgatcatcacaaccagatgatgctaacctatatcctctacccttcgcgtgctttgtctgggaagtcttttggccccatgtcagtttctattgcattgagagcccaagagcccctggtcagtcaggcttccatttagcatggcgtttgcaaggtttacccatgttgtagcatgtgtcagaatttcattcctttctatggctgaataaaattccattgtatgaatataccac

SEQ ID NO: 1022 - DNA, 5978 bp, Homo sapiens
gtgtctttttcctgccactgagtaagggatgatcttcacacacatgccccactccgcccccatctcggcgcaccgtttctccaggaaggcatcttctcagagacaaaagattctgagagacatctaattccctaccaaaagtgtctcagtgtttgtgcaatcaaaggaaatcagaaaagaaatgatcctcaccgctctgtggtccaatcctctcattttacaaataaggaccccaagattggagagaggaggacattttcccatggtccatcagcaagcagaggacccagctccccagcctcctgactttcagtccgacactctgcccccacccaacactgcttctgcttgtgcatgccttctgtgactaaccagggaggaggggagctgaaacaagctcccaccgaaataggctgctgcctgtgcgtgattatgttgctatgagaacctcagtgggtgtgtttcctcctttcgctgttgaaatcttttgctttgcttggcttctccccaagcacagacacgtctccctttggaatggggagtggagaggctgagatggagagctatattttcatggcaagagttttctgtcccaacccatccaacccagagccagcctggggctgtgagtgaggagcctatgccactagggtggttccataaaggctggagtacaggagtgaactgttttgaaagtggatactctagccccctgttgagctgtcttagaacaaagaggtgctgttcctgctatgtaaccacctaagaacaaattcacaagcaagctaattattactttaagagacgaagtttggggtgatttgttatacaccaagagatgacctgaacattcacatcttatgattgtgaaaagtgcctagcacatagtaggtactttgtagaactattttctcagcatccctaccattcctgtgaattcagtctttctctatctcttttgcaaaaatatattagcatagtctttcaccaggttaattagtttagtcatcccacaaataatttactaggcatctcttaaatgcccagctcattaataggcactagccttaacaagaggcaacaaaacatattgaattgaccattgatgagctcttaatgtagtcatgttggatgcttttacaggtacagatcttctgtagaactcttaaggagattttcatgggaggcaagaaaacatgtgggatgataaggggttcagagagttcactagtgtgtgagtcaaatgggtagtttgaaacaatagaccctaccaggtaaagaggttctgaagacgcattttatttatgtaatttttcttatactagatcttcaacacaacaaaagtagagtgcttagaacaatgcctatctcatggcaagtgcacaaatattatgtcaacattcgctaggccctgtcctaggcacatgagttaaattttatagaacacttgctaagtcttatagaacacttactatatgccagagattattcttgacctacctgtgttctcatgtagcccgttcaacagctttttgaggtagatacaattatccccatataacagatgagaaaacaaaaacacaaggaattgcccaagtggtagaggcaagattcaaatctaagatacctgattccatagcataaacctcaagaagttgaccaggttcagggagcaagacagtggttctcaaccttggctatacagtggaatcatctggagagctttaaaaataccagtgctttagttctacccccagagagtatgatttagtgaggtttgggcatcaggattctttaagcctctaattctaagggacagtgatgattggaggacaactggacaagaatatctggagacaaaaacacctgcagaggaagaagatccctaagttacagaagatccaaaacaagaaccccacactgtaaggaggtctatctctaactcacaggttcttgagaggcctggactggaggaaagctgtgttgatggttgggatgagacccttggggagggttacaattacaaaggttatccagctttgtgagatgctgcagaagaagtgagtttcctattactggaaaggctcagttagattaattgttggcgtaaatgatgtagaggccccacaaacgccagaaggttgagcaagccctctgaggttccacctgccttgtgctgggactctgtaattctgtctcctgtcaactctgagcccatgctggaaccccagaaggtgaagactgtaccatacttcatctccaggggccaaccaacacttccttttgctgctgcccaaaatcccaggcccctagaatcaggaagcagcattttaacctgcggaccatgctgcctgggaaatctcaggctctagcttgttccaatggtcgttgctgctgaaaggggcgacatattatgtggttttctcctcctcctcccaggggacctcacacatggccagggttcacatatggccacagcacactgcagtgaatccacgactcctcgagaatcaggccagagccatgatccatcaccacctcatggcagctaccccagcagtgttcttagtgtcttctgggccagatgggagccaagccaaggctgcagcagccagctacctggctgagcctccaggcagccccacacctgggccgttctcctacacaaaagcctctgtggtcctattcctccctaacccaaggcccaatatttttaaactgcattccaaagaacaactcgctgagtgccaccaatacctgcaaagcaatatgaggtgggatttttcttttgccattaaaaccagaatgttatttcttccttgctctgataatgtctgattaaatcaattcactgcggttttgtgctggatatgatactatttgctttaacaatatctgggaggcattttcttagtataatacttctgcatttatagcttaatcctgctgttttattctaaaaagttgaatactcttgttacctacctttctctaaggatgagaaagacccaaaagattctgttgtgctgccacaacagaattagctttttctactgggtggacgttgtatactctactcctttcctcctttttaaatctttcattaaggctcacctttttatgggaaatctctctggaatccctgaaagccaactggaagccattcagtctttccagtgcaataacttaatacatatttttttctgttaactttatatgactatgggccaagcaagtgctaagtattctggactaaaaggtgaagagacttatctctgcactggtgacccttatcttccaggaagagttggttaaatgactaactctaatatactaactgttataatagatttaggtaccatcgggggtcttatgcattggttctcataggttaaatatatatatataatataatcaatggcttacagtcaggtaggccctgcaagaagtatctactgatatggaccgggagaccctggaggctgtagggcctcaaccagaagcatggtagattccaagtgtgcctggagacacattctttttaccaagataccaaagttcttgtatgccttggaaacttttacagatgagaagttttatagccttttctctccaaatgcactatttaccaatgtcacttgtggcataacacattgtcatctgccttagcatagggctgacctctggtgcgtcagggcaacccgacctgaaaacgcataatgagtggaggtggtaaaacaaagctgtgattgagtccaccttttcctttctggaccatgtaaccattctgatccctttcttctcaggggattttattttaatttaaactttgctagatttttctttcatttaaaacttcacccccttaaggtaatattaacattttactgtgtactcttctctattttttgctcatgcaaatatatataagacctaagttatatatataaaagtgtgtgctgttggtgtatgctgtatataaatggaatcatgttatatacattactcagaaacttgctttcttcattaaacagtgtataatgggcctctttccaggttactacatgtagatccaagttatttttaaaagtgtataacatctcactgtatggataaaccatactttccaaacaattcacctactgatgaattttcaagttctaagcaatattttaataaatgagttttaaatatacccttatgaacagaagcttttattttcatatgatagtttcccccaaagtgatattaccttaatatccattgccagttcctcatgaaattgtaatttctaagactgtagctggaacaatcagaaggtgcaaatctaattttctttccctttcctacccaacatccccctggatcacgcacttgaggaggaagatccatgaaataaaagacgtaatcctgttttaaatgtgtttctatagcaagagtcttccaatgcctggggaaaggctcatgagagatgctgagacctggggcattctttccgagaggtctttacagagaacagatcacttccaattgctgggcaacagagcatggatttcatgttaccaagaagtactgtgatccgaaaaacttaagattttcttaattggcatcagttacctgtctcttaggtagaactaccacaaaggacactcaggcctgaggtgcaccctctctttcctttccttccagaggttgtgcctgcaggagagcctggattgatagcagcctgccacccctgcccataccaatgcctagtagaagcccactccctcagaaaccacactccccactccccagaaggtcttgtttgactcccttttaaaccaacattttctgtattcagacttgcctgtaataagtgacttacccattgccctcaacctaaggaagccttgccatttaaaacctcccaatggagcctatcaaagcgtgcttcaaagtgtgagggaggctgagagaggaagtaagtgagatgaaggaggcgtttaacagagcctaggagaaagagctttgtggtcttacagaacagtaagttaacctctccatctgtgtacaaacagcttaatggtgatcactgcctggctaaggggttgtgaggacaaaatgagccaatgcagatgaagcatctggcacagttcctgggacatagtattgttaacacaggtgagtttccttttcttcagctcgtcctaaaagaccgtatttaaccatagcagacagagacacagagtaagaaggagaaagagcatgacagcaggggtcagcgtgcctgtgcactactagtcccagctctgtcatttagcagccaggtggccttaggaaagtcatttaacttttctgggcctgtttcctcctctttaagagatttgcctgagacaaaccccgcatcctccttctgtttgccatttcattcatgatgtggattatgatgctaaccacctccaaatgacagcaaagactggtcagaggcatctcaaatcaaaattcaactctgatggccaaaataaaggctgaagagcagaacgccccctccttcccactgtaaaactgatgggaagggaagtcagcctgccatcagttcaggggtttacaaaggaggcctgtaagtaatgttaattactgtgttcattccagcactgggctctagtttagcttttccagaggtcgaaagaggtgccattttttaagagccccatttggctccagcagcctcaatagtagtagccaagcagccattataagtagtcatcactcgatttcctcatcacttgtcaggaggcagagcttgatggggaagtcaatgaatttctcagcaatacaggctactgggctgtaagtcagcataaccccatagctctcaatgatccatgtcaatacatgaatgacacaaatcgcagattattgaaaaaaaattgttctttgactcattgtatgtattatgtatttttacatgcaaataaaatttctacctgtctatc

SEQ ID NO: 1023 - DNA, 4153 bp, Homo sapiens
attttgatgtcctcaactgcagtaggagccatctccctgacttgttctgacctgacttgttccctaccgtaatctcctggatgcagaagtccctcaggcccatcgggcttctgagggcccaatctctggaatggttctacaataatgtgaagagccgcttcgagcgctttggcagtgccaaggttctgaagaacctgtacaggaagcaccggctggagagtggcgcgtgcttcgacattctaggaggaagcctttttgagtcaaacctggagaatgaaggaagcatttctggcagtgattcaacattttataggcagtcagaaggacatagtgtgatggacaccttggctgtggccctacgggtggctgaagaggccattgaggaagcaatttccaaagcagaggcatatggggacagcctggacaagcaaaatgaggccagttacctgcgggaccacaaggaggagctaactgaggaactggccacgacaatcctgcagaagattatacgaaaacagaagagcaaaagtgagcagcaagtggaagaagagccaggatggccacatccccagagttgcagcacaaaggtggcagatgaggggacctcagcatcccctggaggctaccgtgctcccgctgccctctggaggtcccagtctgccttctcaatcactggagaagaagccctgaagacccctccagtggaggctccatcgaggcagccaagggaccaaggccaacacccgagagcagagtctgctctgcccagctggaagagtgtggacaggctggatgaaacaaacctggccccagttttgcagagccccgacgggaactgggtggccctgaaggatggcgctccaccccccacccgactactggccaaacctaagagcgggacgtttcaggccctggaggtggcctccagtgtggcatctgcctacgatgagatgggctccgatagcgaggaagactttgactggagtgaggccttgagcaagctgtgtcccaggtcccgggccctgcccaggaacccccagcctcagcccacacaggcccagagctctgaccaaggccccatagctgcctccccatcctctgcactctcccccaaccctgaggccatgtgctctgactcggagacctcctccgcaggctcttcccgagaagttgggcaccaggccagactgtcctggttgcagaggaaggcccccaggaaccctgcagctgagaagatgcgcttgcatggggagctggacgtgaacttcaacccccagttggccagcagggagacctcggacagcagcgagccggaggaggccccccacaccacagaccggcgggccaggaggtggagaagagcccgattgggctcagaagagccaagcaaagaaccatcttcccccagcgcccagctccgggatctagacacacatcaggtgtcggatgatttatcagagacagacatcagcaatgaggctcgggacccccagactctcacagacaccacagaggagaaacggagaaacaggctgtacgagttagcaatgaaaatgagtgaaaaggagacttcttcaggggaggatcaggagtctgagcccaagacagaatctgagaaccagaaggaaagtctgtcctctgaagacaacagccagagtgtccaggaagagctgaagaagaagttttctgctgtttctctctgcaacatctccacagaagtcctgaaagtcatcaatgccacagaggagttgatagcaggatctacagggccctgggagtccccacaagtccctcctgacagacagaaggggatgtttcctcgtgggacagaccaagtgagactggatgagcagctgacttccctggaagaaaatgtatacctggcagcaggcactgtgtatggactggagacccagctgactgagctagaagatgccgcccgctgcatccacagtggcactgatgagacccatctggcggatctggaggaccaggtggccacggctgcagcccaagtccaccatgctgaactccagatttcagatattgagagccggatttcagccctgaccattgcaggattaaacatagcaccatgtgtgcgcttcacaagaagacgggatcagaagcaaaggacccaggtacaaaccatagatacatcaaggcagcaaaggaggaaactgcctgctccaccggtgaaagctgaaaaaattgagacatcttcagtgactaccattaaaacatttaaccacaacttcattctccaaggctcctcaacaaacaggactaaggaaaggaaaggcaccaccaaggatttgatggagcctgctctggagtcagctgtgatgtactgacaccatggaattccactgccagtgacccactgcctccggccgtacacgacagtgccttgacccaacagccatcgagtactgtatgtatttccacctgaggagaaggcctggggaggccacagtgcaccattgcacagggctgtcctgatacctcatccagaaagccgtctcagacttcagcactgcggtcttgcccactctctgccttaggctcccaggggaatccaagacagaaaatgaagacactggcttccaacagcagcgctccatgtttaagatacatattttccctgtttgctttgctactgtatgttgactttaagatctttttttaaatacatttgattcagctagtattccatgtcaacaatttgtccaaaggaaaactgctggagggaggtggagggaggaaggtgggaattattatttaatacatcattaatgcttattaatctctcacaagcatctttgtcttgcaaatcctaagggaaaagcaagtccctgcagtgagcactagggacagtctaatttggggattgctcaaccatcaagactgcaggtctcccttcagccacctccttcctgctaaaagcttagcctaccacactaccagtcattcccatcgctctgcaatcacaagccacaggatgagaagttctgactcactcatgccatgcccagggctatctgaaacaatgtctcattaagaatttagggttcttccatgggcttactgacagttgcccagatctgaaggggaaagggtcttgagaaagaccatcactggctcaactttagggcactgtccagagtcaacatgatgtggtttagcagtgatcacatctaaacaaagtttaggtaaatgaattatcgcagagaaaaaccacatgagaaaatttttgtactccaaatttacttcccaataaatattcagcaaagtagtaaaatgaccttaaagataaaaatgattagggaatagccttagaaaatttataggtataaaaaattcaaggacaaactgtgcatttaatggacacaagaattgactctaactccatgtctgtggtttctttgaacccatatcaaatgtatgactatttagagtgtttataagagataatggaactgaactttcactcaattaattgggcattaacaaccttcttttatgtttgttcctgatatagtctgaatcttaggaagaaggtaaaagaaaggaggcaagagaatagttatgatgaatatgtgttaagtgcctgctctgaaggaggcaatgtccttctcatttgaatccttatggcaaccttattcaataggttttcccatatttcagatttaataactgaaggccagagagattaatttgccaaagccacacctttatgctaattatgattggaatgcatcacaaaagcctaactctgttgttttcaacctctacgttattttgctgctatgtgcatttccagatctgattttctgctaacttgtgtgctatgatccactcctgatgggggtctacattaatcttccagtactccttgctgatgctgtgttatgtgtcatctaacagaaatgactcctttgaaataagtaaatctttggctttttgttccgttggtgtgattcaaagcaaaacaaacaaacaaaaacaaattttaagaacacaacaaaaaagatttgacttccgaatagaatgttttctttaagaggcatgaaaagcaactattgttgtgttacagtgttaaaaatattcagttttctttgacaaaaatgtgtactgtgtaagccttgcaaac

SEQ ID NO: 1024 - DNA, 3200 bp, Homo sapiens
aaaaatgcccttgggtgtgcattacttcaagcaaacggaagtgtgccccgctgacagtgggaatgcctggctgggggtgggggggcccgagtgcaccacatccagctgggagtgaaattcctggagaaagcacccacagcactctgagcctgcttgcagcccaacggcctcgctgagaatgctacatttaaaagtgcagtttttggatgattcccagaagatttttgtggttgatcaaaagtcatccgggaaggcattgtttaacctgagttgcagccatctaaatcttgctgaaaaggaatattttggattagaattctgcagccattctggaaataatgtttggctggagcttttgaagcccataacaaagcaggtaaaaaatcctaaggagattgttttcaaatttatggtgaaatttttcccagtggaccctggacatctgcgggaagaacttacaaggtatctttttactcttcaaataaagaaggatttggctctaggaaggcttccatgcagtgacaactgtacagcgttgatggtatctcacatcttacaatcagaacttggagactttcatgaagaaacagataggaagcatctggcacaaactcggtacttaccaaaccaagactgtttagagggcaagatcatgcactttcatcagaagcacattggcaggagcccagctgaatctgacattctgctactggacatagcaaggaagctggatatgtatggcatcaggcctcaccccgccagtgatggtgaagggatgcagattcacctggctgttgctcacatgggagtactggtgttacggggaaatacaaagatcaatacttttaactgggctaaaatccgcaagttgagttttaagagaaagcattttctcatcaaacttcatgccaatatcttggtgttgtgcaaggataccttggagttcaccatggccagccgagatgcctgcaaggctttctggaagacttgtgtggaataccatgctttcttcaggctttcggaagagcccaaatcaaagcccaaaaccctactctgcagcaagggttccagtttccgctatagtggacgaacccaaaggcaacttttggaatatgggagaaaagggaggctgaagagcttgccatttgaaaggaaacattacccatctcagtaccatgaacgacagtgcaggtcctcaccagacctcctctctgatgtgtcaaaacaagtggaagatttgagactagcatatggtggtggctactaccaaaatgtgaatggagtgcacgcatctgagccagtgctggagagtaggaggaggaattctgcattggaggtgacatttgcaactgagctggagcattccaaaccagaggcggatcccacattgctacatcagtcccaaagcagttcctctttcccttttatttatatggaccctgtctttaacactgagcccaatcctaaccctgatcccagagacattttttcagagaggagttctctaagctccttccaaacaagctgtaagttttctggtaatcacatgagcatatattctggcctcacaagcaaagtgcgtccagcaaagcagctaacttacacggatgtgccctatattccttgtacaggtcagcaggttggtattatgcctccccaggtctttttttatgtggacaagccaccccaggtgcccagatggtccccaattagagcagaggaaaggacaagtccacatagctatgtagagcccactgcaatgaagccagctgaaagaagcccaaggaatatcagaatgaagagctttcagcaagacctgcaagtactccaagaagctatagccaggactagcggtaggagcaacatcaatgtaggtctagaagaggaagacccaaatttggaagatgcatttgtatgtaacattcaagagcaaacccctaaaaggtcccagagccaatcagacatgaaaactattcgttttccttttgggtcagaatttagacctttagggccttgtcctgctctcagtcataaagcagacctgtttacggatatgtttgcagagcaggagttgccagcagttctaatggatcaaagtacagcagaaaggtatgtagctagtgaatccagtgattctgaatcagagattcttaaaccagactactatgctttgtatggcaaagaaataaggtcacccatggccagaatccgcctgtcttctggtagtctacagttagatgaagaagatgaagatgcttatttcaacacaccaactgctgaagacaggacttcactaaaaccatgtaattactttttagcttaaaagtgtgaacctatggacatttctgagccagttccatgttaccgacttaggcagaaaataatgaagttgtagaaaccattttcttggttactacatattcattggtattaaggaaatctcattttggatgcctgccttatgaaagatccagctgttgcctcattccttgagtttcactcttccattacctctgaagggactttagaacatgccctctcctcaccagcactgtggcaaggcaaggtgggtatttgtcatctccactgcatacttcctcatagagacattgtgagtgaaggtcaggctcttcaatgctgaagaatggtgacagtatgggttggcatatggaattagcgtctaatggcatttagtgatttagtagattgtgactgtgttgatctttgtgctcttaaacaacactgaacaaatatttcagtctttactatttgtgtggggcccagtagaaatggtcttgtaatatgctaaatacttccatttttataacatataaaagcagagcatggccctcctacagcctcaggaaggaggtggtggcatagatcctctcaagagaatacaggtttagaattaatctaggacttggcagaattctaaacctaggaaattcatgaattaaatcaatttctagagccagacataaaccagatgaaagtatcatgttgttttacttataacttctatattcttatctactatatctagtaaaagagaaacattatcaggtcagtttgtttatctaatatttcctgccagaatttattttttgtcatagcttcttgcatgtatgcaggccaggaaatgaatgttattgtaataaagtgtgatggaaaatccaggtaattaaaaaataaattat

SEQ ID NO: 1025 - DNA, 4047 bp, Homo sapiens
gacagtggcgccggaagccggggccggggctgcggggcgagttgtcggccctgggccgggagctggagtcccagactcataggtcccggcccagcccccgaagagccgcctcagccggggggagttgctcggactcaaacgtccagtcctcgtgcgaccgcgctgggtcggaagtgagcagggtctcgctcttgctcaggctggaatgcagtggcataatcatggctgactgcggccttgacctcccgggctcaagcagtcctccgtcccacctcagccttctgaggagctgggaccacaggcgtgtgccaccatgcccaggctgaggccaccatggagcagtgtgcgtgcgtggagagagagctggacaaggtcctgcagaagttcctgacctacgggcagcactgtgagcggagcctggaggagctgctgcactacgtgggccagctgcgggctgagctggccagcgcagccctccaggggacccctctctcagccaccctctctctggtgatgtcacagtgctgccggaagatcaaagatacggtgcagaaactggcttcggaccataaggacattcacagcagtgtatcccgagtgggcaaagccattgacaggaacttcgactctgagatctgtggtgttgtgtcagatgcggtgtgggacgcgcgggaacagcagcagcagatcctgcagatggccatcgtggaacacctgtatcagcagggcatgctcagcgtggccgaggagctgtgccaggaatcaacgctgaatgtggacttggatttcaagcagcctttcctagagttgaatcgaatcctggaagccctgcacgaacaagacctgggtcctgcgttggaatgggccgtctcccacaggcagcgcctgctggaactcaacagctccctggagttcaagctgcaccgactgcacttcatccgcctcttggcaggaggccccgcgaagcagctggaggccctcagctatgctcggcacttccagccctttgctcggctgcaccagcgggagatccaggtgatgatgggcagcctggtgtacctgcggctgggcttggagaagtcaccctactgccacctgctggacagcagccactgggcagagatctgtgagacctttacccgggacgcctgttccctgctggggctttctgtggagtccccccttagcgtcagctttgcctctggctgtgtggcgctgcctgtgttgatgaacatcaaggctgtgattgagcagcggcagtgcactggggtctggaatcacaaggacgagttaccgattgagattgaactaggcatgaagtgctggtaccactccgtgttcgcttgccccatcctccgccagcagacgtcagattccaaccctcccatcaagctcatctgtggccatgttatctcccgagatgcactcaataagctcattaatggaggaaagctgaagtgtccctactgtcccatggagcagaacccggcagatgggaaacgcatcatattctgattcctacctggaaggaattttgttgaaaggggttttcacctgtgagccttggtctgtctcggtagggtggtcaacttcagtggactgtggttggtttcagagcgcctggctgaggagttccactgaggggagcactggagcagccctttggcagaggctgaggagggagatggaccagcccacgcctggcacctggctccatggcataaggaaagggagatgctggcctctgtgctcctgctgtcttttcctgtttctgtttgcgtttgacttagtagcaaccgacagagtggcaagggatttggtcttcagcagtagacatccttccacccctgccctcagccaagtctcttgctgccatgccaatgctatgtccacccttgcccctcggcccaagagtgtccagcggtggcccacctcttcctcccactacagcctcaacagtatgtaccatctcccactgtaaatagtcccagttagaacggaatgccgttgttttataactttgaacaaatgtatttactgcccttctcatttctcctggccaacctttagcctcactgacaaattatgaccacatgtctaccacacacagggactgggcacggcctggtggctgccgcaaacaaaaacatggccagcaggtatccagtgtccaggcaggaagaacacaacttgcatccctgactgcggggagcttagatgtcagaccccgggcaaggtgcttttacatatacccataccagatcttactaactccataggagaaatccgtgtaatgggattcaggaaaatgaagttacttgcacaacagggctcacagcttagaaaggagagagcttggagttttaaccagatctgaccctcaagcccaagctatttccagtttattccagggtgcctgaacttggctgttatgtatactgagtcctgtgcagggcctctgacagcaggaaggggccccaagtctaaaatacttgaagggattgggttactagggccattatgttaagcaagagagctcgggggaatgcattttagcttcatattcctatttaaaatgtgctgtgtgggtgggtaaattgcttccataagcttcacagtggcatttaaggctcctgggttaagttaggaatgggggtgttcctgatgtgggggctttaggcttccatgaagtgggtctgggccccctgccttacctcacagcccccatctaccctggaagagggagttgaaaatgctgggatagcagcaggatcagttctcagcttgagccaaagcacccggccctgggcagctgagcatcagcacagaaccctctgagtcctttgggctctctgctgaggaagactgcttcactcttcccgcccaccaactcgctggcccaaccagcagctgctgcttaagaaaacacccacagactcaccacattttagtcttagcatttactttccccaccccacattcttggaacagcctttagttctacaggaaatggcactgatggacagaagactagcattaccttcatgaaagggctgttagagctgcctgggaagaaggcgtgccttggggaactgggaagatgccgtcagtgtgggtgggcaggaggacagccagtcgtcctgctgccagcccaatagcttccagcggcaggtgcccaggtgctaccggagcccctcataggggtaggggcagggactgcacctcctccaggcactcatcgtaagcctcctggtactcctcatggggcttgaccattatcacacaggtggggcgcttggagcctgcggctgcacccaggtcctacagaggggaaagaagtgctgtttggaaaaaagctgtacaacctgtatgccaggaagtcaccaactgatgacccaccagcctaatctggcccacaaccatgttctgttcggtccatgttctatttaaaagcatcttgaattggttgccatcatttaaactcaatcagactttgaaggcatggtccagccacacagggcctacattcccacatggcaactatgaaagggctccagcccagcaggggctgtcccggtccctgccacccccacttcctgtgcctcagatctggcccctgctacgtaagataaggacagctacaggtccctctgagcctaaacccacctaaccggactaacatgggtgaagcatcttagcttacaaagctctttcacatacatctatctctttattctcatagtccacagataactgactatttggttcttaccatcaggccaaacggtaagttccttcagaacagggcctcctgctttatcccaagaagtgatactgtaggtacccaagatccacccccagcctctatttttttttttgagacagggcctcactctgtcatgcagtctggagtgtggtggtgtatgatcatggctcactgcagccttgaactcctgggttcaagtgatctcctgctttagcctcccaagtggctgggactacaggcatgtgccaccacacccagctaattaaaaaaattttttttgt

SEQ ID NO: 1026 - DNA, 3412 bp, Homo sapiens
aggtgtcgaacccaagggctcttctcagcagagtgtctgcatgccacactctgctttagagtctgttccctggggaacacaaccagagactgaaataattggtgggcagtggggagcacaaagggctgtttttgtttcatgtgaagacgatgagcatgctatgaaccccgaagagctgttgtatagagtatctgcctggaaaccctgttgcctggagaccactcttgaagaacatccactgctgtggcctcttaaagatttaagacatctaatgaagagctgacagaaatcatcaatttgctcctcagcctccctcctccctgaaacacaaagacattgaaattaggccaattaataactctacaatggcctctaagagttaaaatgaaaggaagtgtaaaatggtttctcacttgaaatcaaaagctagaaatgattaagcttcgtgaggaaggcaagttgaaagctgagacagccaaaagctgactcccgcaccagggagccaagttgtgcaagcaaaggaaaagttcttgaaggaaattaaaagtgctgctccagtgaacacatgaatgataagaaagcaaaagtgatctgggtagaagatcaaaccagccacaacatgcccttaagccaaagcctaatccagagcaaggctttaactctcttcaagtttgtgaagactgagagaggtaaggaaagtgcagaaggaaagttaaatgctagaagagtcggttcaggaggtttcaggaaaaagccatctccacaaataaacatacaacgcgaagcaacaaatgctgatgtagaagctgtggcaagttttccagaagagctagctcagatcattgataaacgtggctacattaaacaacatattttcagtgtggatgaaacagagtcctattggaagaagacaccatctaggactttcatagctacagggaaaagtcaatgactggcttcaaagcttcaaagaacagggtgactctcttgtcagacactaatacagctgctgacttgaagttgaagccagtgctcactgcacattctgaaaacttaaggatccttaagaactgtgctaaatctactgtgcctatgtgcaacaaagcccttatggcagcatgtctgtttacaatatcatttactgaatatttgaagcctactactgagaactactgctcaggaaaaaagatacttttcaaaatagtactgctctttgacaatggacctggtcacccaagagctctgatggaggtgtgcaaggagatgaacgctgtgttcatgcctgctaacacaacacccgttctgtactccatggatcacagagtaattttgactttcaagtcttattatttgagaaataaattttgtaaggctatagctgccacacatagttattcctgtgatggatccgggcaaagtaaattgaaaacctagaaaagagtcaccattctagatgtcactaagaacatttgtgattcatgggaggaggttaaattatcaacattaatagaagtttgaaagaaatttattccagccctcatggatgactttgatgggttcaagactttgatagaggaagtaactgcaggtatagtgataatatcaaggaaattagaactaaaagtggagcctgaagatgtgactgaattgcttcagtctcacgataaaacttgaacataacagcagttaattcttacggattagcaaaaaagtggttttgtgagatggaatctattcctggtgaaaatgctgtgaacactgtggaaatgacaacaaaggatttagaatattacataaacttagttgataaagcagcagtagggtttagaaggattgactccaattttgaaagaagttctacggtgggtcaaacgctaccgaagagcgttgcacgctatagagaaatctttcatgaaaggaggagtcaactgatgtagcagacttcactgttgtcttatttttaaaaatttccacagccaccccaattttcagcaaccaccaccttgatcagtcagcagccatcagcatcaaagcaagaccctcttccagcaaaaaaattacaacaacttgctgaaggctcggatgatttttagcaacaaactattttaaaattaagattgtcaaacatgacccttgaggcttacctctggattgtggtatgaaggaatgaaagcgaaaaataattacctttgtgagattcagtaagtacttaagtccacttttaaaatttgaaaacagaaacaaaatctaacgatttagacacaagggagaagccaatatattgacaatagatgctttttgcagagtacaacagacttttaaaggctatttattttacagttttcttggtgaatttccatagctctcatttttagtgctgtttaatttattcaaatatttagactggtcagttatcccaagggcttagtggggatgttttgcttcatgttcttaaaagccattcaatgtacgcctacagccatctgatctttgacaaagtcagcaaaaataagcaatggggaaaggactccctactcaataaatggtgttggataaccagttggccatacacagaagaatgaaactggactcctatcttttaccacatacaaaaattaactgaaaatggattaaagatttaaatgaaagacctcaaactataagactcctagaagaaaagctaggaagcaccgttcctgacatcagccttgggaaggaatttataactaagtcctcaatagcaattgcaacaaaagcaattgacaagcgggatttaattaaactaaagagcttctgcacagcaaaataaactatcaacagagtaaacaatctacagaatgggagaaaatatgtgtaagctatgcatctgacaaaagcctaatatccagaatctataaggaggttaaataattgaacaaacaaaaaccaaataatctcattaaaaaatgggcaaaggacatcaaccagacacttctcaaaagaagacatacaagcagccaacaaacacaacaaaaaaatgttcaacaagtcaccaatcatcagagaaatgcaaatcaaaacagagggctattattgaaaagtcaaaaaagcaacagatgctggtgagcctgtggagaaaagggaatacttatacactgctattggaaatgtaaattagttcaaccactgtggaaagcagttgggagatttctcaaagaacttaaatcaaaactaccatttgcctcagtgatcccattgctggggtatctatctaaagggaaataaatcattctatcaaaaagacaaatgcagttgtacattcgtcacagcactattcaaaatagtaaagagactgattcatcccaagtgttcattaatagtggactcagtaaagaaaatgtggtacatacacaccgtggaatactatgcagcc

SEQ ID NO: 1027 - DNA, 3641 bp, Homo sapiens
aaaaataaagccgagacgacggcggtggcggtggtgagcgcgctggagcccgcgtggagaacatgcggcggggatgggagtgcgcctagtctcgaggcgggagagccagccgccctgcagccggccgtcggccccgcagccacagaagccgagccccgctgcggagctcccggcggcccagccccgaggctctgcggccgcgccgcgcgtccctaccaaccgacaccatgaacaccatcgtcttcaacaagctcagcggtgcggtgctgtttgaggacggaggcgcctcggagcgggagcggggtggccggccctacagcggtgtcctggacagtcctcacgcccgccccgaggtgggcattcccgacggcccgcccctcaaggacaacctcggcctgagacaccggaggaccggcgcccggcagaatggcgggaaggtgaggcacaagcggcaggccctgcaagacatggcgcgacccctcaagcagtggctttacaagcaccgtgacaacccgtaccccaccaagaccgagaagatactcttggccctcggctcgcagatgacgctagtgcaggtgtcaaattggtttgctaatgcaagacgtcggcttaagaataccgttcgacagccagatttaagctgggctttgagaataaagttatacaacaagtatgttcaaggcaatgctgaacggcttagcgtaagcagtgatgactcatgttctgaagatggagaaaatcctccaagaacccacatgaacgaagggggctataataccccagttcaccatcctgtgattaaaagtgagaattcggtcatcaaagcgggagtgaggccagagtcacgggccagtgaggactacgtggcaccccccaaatacaagagcagcttgttgaaccgttaccttaatgactctttgagacatgtcatggccacgaacactaccatgatgggaaaaacaaggcaaagaaaccactcgggatcttttagctccaatgaatttgaggaagaattagtgtctccatcgtcatcagaaactgaaggcaactttgtctatcgcacagacactctggaaaacggatccaataagggtgaaagcgcagctaacagaaaaggaccaagcaaggatgacacgtattggaaggagatcaacgcagctatggccttaacaaatcttgcacagggaaaggacaaactgcagggaactaccagctgcatcatccagaagtcgtcccatatagcagaagtaaagactgtcaaagtgccgctggtgcagcagttttaagagcttgttgcttttcagatccaatggatgttctttccggtgttttcatcaaccctcatcctaagagccgaagcagggatgaaaatgactctctcccaaacctcttcttatttttaattatcccaaatatatcatttagttgcttctataaaagacatataaattataaaaaactcattttaatcaaaaatattaacttattttatgttactcaaactatgcataaaacatctgcattaccattacagtaagtgccttgcttcccgacaataagctccaacgtgggcatagttgaacaagctatgcctcaaaatgccaacgccatatgcttattagcctgtgtgcatcattccagacgggcctaatcattccaggactgaaaccagaatcgctgaaagcccttgaaatacattcaataattcatatgttaaaacttggatatctgttcagcccaaatgaaatcttccttttaaaaaacgtctacagtattgaaaattgttcaatgtgcttttcagagtgacggtgagaattttatgcatgtatcttgcctgcatatttgatatgttacaaacttccaaaattcaaggtgcagcgatccacagaacgttgtacatttaagaagtgattccttcaagctaatttaaaatttcattgaacacatggtgaccaggaaaactttttttcaagcactgttggaaagcaccacaaagccctttagaattaatctggatttgtttctcaagttctgctgaagtttaaaaaaaaactttattatacaaataactcaaaattttcctgtgtaaaactaaacctgtagttttaaaacataatcctgtttgcattagagctcactgtctttttgtgatggaaactgtgttcgtatggaatgactaaaaatcttttatttggtttgtttcaaattacaattgctgatggacaatttgtattgcagcgagaacaacagaatgaaagaaatgtatctctgtgcggctatacatatacatacataaaattgatttttaaatttaaaacatatggaaaacaaaacattgaacagtttgaattttgccaagttggacattaaagtaaaaatgaagtgaaatcatgcattgaaagaaaacattttgtttctaaattagtctaccattgagtgagaataatcaatatcaagaaagaagactatctttctcaactaaacaataatattccaatcagcttgggaagacctgaaacttgaataagcagtggaaatgccaaatataacagagggtatgtgctacagagaagtaaaaagggtttgactttttatgatgggatttttttttttctgggtatgtaatctattttttttttaaactggaaagcatttttgtcagtgtgaatgagggtcaatagtgcagccagtggtgacatttttctttattttgcaaaatgcttttaaaaccaaaggctgctctagttgatggacagtatcagtcttgatctaaattgtaggacactttttcatgtaacataacatttggggattgggtttatttagtgtaatgaagataatttgatataaaaatattttgtgtatatatatatatttttactttgttttctaaattgctgtttgcagtaacagtaagcgcaaagcaaaatatataagttatgactgtatgatcagatgaagtatgagttcttttggtttgcatccttaaatagttagagatctctgataaaaactttggaatctttgcaaaacaatacaaaaatgccaaaatgtgagcatgtcaatgaaaactaaagacaaatacttcactctttttcatactattataagttattctggtattaaatatgttaataaaagtgtttttgttttgacatatttcagttaaatgaatgaatgctggttgtattttatttgaatgagtcatgattcatgtttgccatctttttaaaaaaatcagcaaatttcttctatgttataaattatagatgacaaggcaatataggacaactattcacatgattttttttaataccaaaggttggaagattttataattaacatgtcaagaagactttatagtaagcacatccttggtaatatctccaattgcaatgactttttaatttattttttcttttgctgctttaacattttctggatattaaaatccccccagtcctttaaaagaatcttgaacaatgctgagccggcagctgaaaatctaactcataatttatgttgtagagaaatagaattacctctattctttgttttgccatatgtaatcattttaataaaattaataactgccaggagttcttgacagatttaaaataaaagttaatttctagacctcg

SEQ ID NO: 1028 - DNA, 4433 bp, Homo sapiens
gagtacgggcccggacatgttcctggacattgcagaggccctgtcacatgcatgtctttattgtaggcatgagcctgtcctctgtgacgctggccagcgccctacaggtcaggggtgaagctctttctgaggaggaaatctggtccctcctgttcctggccgctgagcagctcctggaagacctccgcaacgattcctcggactatgtggtttgcccctggtcagccctgctttctgcagctggaagcctttctttccaaggccgtgtttctcatatagaggctgctcctttcaaggcccctgaactgctacagggacagagtgaggatgagcagcctgatgcatctcagcccctgcagctctgcgagcccctgcactccatcctgctgaccatgtgtgaagaccagcctcacaggcggtgcacgttgcagtcggttctggaagcttgtcgggttcatgagaaagaagtgtctgtctacccagcccctgctggtctccacatcagaaggctggttggcttggttctgggtaccatttctgaggtggagaaaagagttgtggaggaaagctcctctgtgcagcagaacagaagctacctgctcaggaagaggctgcgtgggacaagcagcgagagcccagcggcacaggccccggagtgtctgcatccttgcagagtttcagaaagaagcacggagacccagagctcaccagagccccattggagcaccttgacacacagtcactgcagcctccttgttaaccgcgctcttccaggagcagatccccaggaccagcaggcgggccggaggctcagctctggatctgtgcactcggcagcagacagctcatggccaacaactccttctcagaggggttttctgcaaagaaggagcaagttttccaggccagagttcatcctgttggctggagaggccccgatgacactacatctgccgggatcggttgtgaccaaaaaagggaaatcctatttggctctcagggacctctgtgtggtcctgctgaacgggcagcacctggaggtaaaatgtgatgttgaatcaacagtgggagctgtcttcaatgccgtgacatcctttgccaacctcgaggaactcacctactttggcttggcatatatgaaaagcaaagagttctttttcctggacagtgaaaccagattgtgcaaaatagctcctgaaggctggagagagcagcctcagaagacctccatgaataccttcacactcttcctgaggataaagttctttgtcagccactatgggctgctccagcacagcctgacaaggcaccagttttacctgcagcttcggaaagatatcctggaggagaggctgtactgcaatgaagagatactgctgcagctgggggtccttgccttgcaggctgagtttggcaattaccctaaggaggtggagagtaagccatactttcacgttgaagattacatcccagcgagtctgatcgagaggatgaccgctctacgggtccaggttgaagtctcagagatgcaccggctcagctctgcactgtggggagaggatgctgagctggagttcttgagggtcactcagcagctcccagaatatggtgtgctggttcaccaagtattctcagagaagaggaggccagaagaggagatggccctggggatctgtgccaagggtgtcatagtctatgaagtgaaaaacaacagcagaattgcaatgttacggtttcagtggagagaaaccgggaagatttctacttatcaaaaaaagttcaccatcacaagcagtgtcactgggaagaagcacacatttgtcacagattcagccaagaccagtaaatacttactggacctctgctcagcccagcatgggtttaatgcacagatgggctctgggcagccttcccatgttttatttgaccatgataagtttgtgcaaatggccaatttgagtcctgcacaccaggcccggtctaagcctctcatttggattcagagattgtcatgctcagaaaacgagttgtttgtatccaggcttcagggtgctgcaggaggcctgctgagtacatcaatggataacttcaacgtggacggcagcaaggaggctggagcagaaggcatcgggcgcagcccctgcactggccgggagcagctgaagagtgcctgtgtgatccagaagccaatgacctgggactctctctctggaccacctgttcagagcatgcatgcaggctcaaagaataataggaggaagagctttatagctgaaccgggccgagaaattgtacgtgtgacactgaaacgtgacccacatcgtggttttgggtttgtcattaatgagggagagtattcaggccaagctgaccctggcatttttatatcttctattatacctggaggaccagcagaaaaagcaaaaacgatcaaaccaggagggcagatactagccctgaatcacatcagtctggagggcttcacattcaacatggctgttaggatgatccagaattcccctgacaacatagaattaattatttctcagtcaaaaggtgttggtggaaataacccagatgaagaaaagaatggcacagccaattctggggtctcctctacagacatcctgagcttcgggtaccagggaagtttgtcgtcacacacacaagaccaggacagaaatactgaagaactagacatggctggggtgcagagcttagtgcccaggctgagacatcagctttcctttctgccgttaaagggtgctggttcttcttgtcctccatcacctccagaaatcagtgctggtgaaatctactttgtggaactggttaaagaagatgggacacttggattcagtgtaactggtggcattaacaccagtgtgccatatggtggtatctatgtgaaatccattgttcctggaggaccagctgccaaggaagggcagatcctacagggtgaccgactcctgcaggtggatggagtgattctgtgcggcctcacccacaagcaggctgtgcagtgcctgaagggtcctgggcaggttgcaagactggtcttagagagaagagtccccaggagtacacagcagtgtccttctgctaatgacagcatgggagatgaacgcacggctgtttccttggtaacagccttgcctggcaggccttcgagctgtgtctcggtgacagatggtcctaagtttgaagtcaaactaaaaaagaatgccaatggtttgggattcagtttcgtgcagatggagaaagagagctgcagccatctcaaaagtgatcttgtgaggattaagaggctctttccggggcagccagctgaggagaatggggccattgcagctggtgacattatcctggccgtgaatggaaggtccacggaaggcctcatcttccaggaggtgctgcatttactgagaggggccccacaggaagtcacgctcctcctttgccgaccccctccaggtgcgctgcctgagatggagcaggaatggcagacacctgaactctcagctgacaaagaattcaccagggcaacatgtactgactcatgtaccagccccatcctggatcaagaggacagctggagggacagtgcctccccagatgcaggggaaggcctgggtctcaggccagagtcttcccaaaaggccatcagagaggcacaatggggccaaaacagagagagaccttgggccagttccttgacacattctcctgagtcccaccctcatttatgcaaacttcaccaagaaagggatgaatcaacattggcgacctctttggaaaaggatgtgaggcaaaactgctattcagtttgtgatatcatgagacttggaagatattccttctcatctcctctaaccagactttcgacagatattttctgagcaccttctctgcatgtctgcagtgctgtgtaaaatgccctacctttgcatggactattctttctaatcaagaggcgtgtgtggcgaacttggggcagcccctggaagtcttgttctttgaccattacgtctgcggctgcatcaccagataatgagcttcaccactcgtctgcctcctgtgtccttccgcggggagtaaatgtcacttcagcttgccgcatctctaaataggcaaattttcagtgctcagaaaaggacctgatctttgcacaaagtgctttgatggttgcctgcttgagtcactcccaatcccttcctgaagccctttctttataattcttctgttgaaatagccatcatattcacagtactaatcacagcatctcacatttactaaaaacttaccccacccccccggtctcctgagctcggtaaggtgctccagctgcttctatcatagcacttcctacatggactgtaacatttctttactgctccaacttctcattaaattgggggctcctcaaagcc

SEQ ID NO: 1029 - DNA, 3148 bp, Homo sapiens
gcacacctccccgcgccgccgccgccaccgcccgcactccgccgcctctgcccgcaaccgctgagccatccatgggggtcgcgggccgcaaccgtcccggggcggcctgggcggtgctgctgctgctgctgctgctgccgccactgctgctgctggcgggggccgtcccgccgggtcggggccgtgccgcggggccgcaggaggatgtagatgagtgtgcccaagggctagatgactgccatgccgacgccctgtgtcagaacacacccacctcctacaagtgctcctgcaagcctggctaccaaggggaaggcaggcagtgtgaggacatcgatgaatgtggaaatgagctcaatggaggctgtgtccatgactgtttgaatattccaggcaattatcgttgcacttgttttgatggcttcatgttggctcatgacggtcataattgtcttgatgtggacgagtgcctggagaacaatggcggctgccagcatacctgtgtcaacgtcatggggagctatgagtgctgctgcaaggaggggtttttcctgagtgacaatcagcacacctgcattcaccgctcggaagagggcctgagctgcatgaataaggatcacggctgtagtcacatctgcaaggaggccccaaggggcagcgtcgcctgtgagtgcaggcctggttttgagctggccaagaaccagagagactgcatcttgacctgtaaccatgggaacggtgggtgccagcactcctgtgacgatacagccgatggcccagagtgcagctgccatccacagtacaagatgcacacagatgggaggagctgccttgagcgagaggacactgtcctggaggtgacagagagcaacaccacatcagtggtggatggggataaacgggtgaaacggcggctgctcatggaaacgtgtgctgtcaacaatggaggctgtgaccgcacctgtaaggatacttcgacaggtgtccactgcagttgtcctgttggattcactctccagttggatgggaagacatgtaaagatattgatgagtgccagacccgcaatggaggttgtgatcatttctgcaaaaacatcgtgggcagttttgactgcggctgcaagaaaggatttaaattattaacagatgagaagtcttgccaagatgtggatgagtgctctttggataggacctgtgaccacagctgcatcaaccaccctggcacatttgcttgtgcttgcaaccgagggtacaccctgtatggcttcacccactgtggagacaccaatgagtgcagcatcaacaacggaggctgtcagcaggtctgtgtgaacacagtgggcagctatgaatgccagtgccaccctgggtacaagctccactggaataaaaaagactgtgtggaagtgaaggggctcctgcccacaagtgtgtcaccccgtgtgtccctgcactgcggtaagagtggtggaggagacgggtgcttcctcagatgtcactctggcattcacctctcttcaggactgcaaggggcctactctgtcacctgtggctcttcctctcctctcaggaacaaacaacaaaaatcaaatgactctgcttttggggatgtcaccaccatcaggacaagtgtaacctttaagctaaatgaaggcaagtgtagtttgaaaaatgctgagctgtttcccgagggtctgcgaccagcactaccagagaagcacagctcagtaaaagagagcttccgctacgtaaaccttacatgcagctctggcaagcaagtcccaggagcccctggccgaccaagcacccctaaggaaatgtttatcactgttgagtttgagcttgaaactaaccaaaaggaggtgacagcttcttgtgacctgagctgcatcgtaaagcgaaccgagaagcggctccgtaaagccatccgcatgctcagaaaggccgtccacagggagcagtttcacctccagctctcaggcatgaacctcgacgtggctaaaaagcctcccagaacatctgaacgccaggcagagtcctgtggagtgggccagggtcatgcagaaaaccaatgtggtctgtgtcaacctggtgaatattctgcagatggctttgcaccttgccagctctgtgccctgggcacgttccagcctgaagctggtcgaacttcctgcttcccctgtggaggaggccttgccaccaaacatcagggagctacttcctttcaggactgtgaaaccagagttcaatgttcacctggacatttctacaacaccaccactcaccgatgtattcgttgcccagtgggaacataccagcctgaatttggaaaaaataattgtgtttcttgcccaggaaatactacgactgactttgatggctccacaaacataacccagtgtaaaaacagaagatgtggaggggagctgggagatttcactgggtacattgaatccccaaactacccaggcaattacccagccaacaccgagtgtacgtggaccatcaacccaccccccaagcgccgcatcctgatcgtggtccctgagatcttcctgcccatagaggacgactgtggggactatctggtgatgcggaaaacctcttcatccaattctgtgacaacatatgaaacctgccagacctacgaacgccccatcgccttcacctccaggtcaaagaagctgtggattcagttcaagtccaatgaagggaacagcgctagagggttccagggcccatacgtgacatatgatgaggactaccaggaactcattgaagacatagttcgagatggcaggctctatgcatctgagaaccatcaggaaatacttaaggataagaaacttatcaaggctctgtttgatgtcctggcccatccccagaactatttcaagtacacagcccaggagtcccgagagatgtttccaagatcgttcatccgattgctacgttccaaagtgtccaggtttttgagaccttacaaatgactcagcccacgtgccactcaatacaaatgttctgctatagggttggtgggacagagctgtcttccttctgcatgtcagcacagtcgggtattgctgcctcccgtatcagtgactcattagagttcaatttttatagataatacagatattttggtaaattg

SEQ ID NO: 1030 - DNA, 3212 bp, Homo sapiens
caggagaatcactgcccttggccacctccaatcaagttctcattaagttcagcgccaaaggcctcgcaccagccagaggcttccactttgtctaccaagcggttcctcgaaccagcgccacgcagtgcagctctgtgccggaaccccgctatggcaagaggctgggcagtgacttctcggtgggggccatcgtccgcttcgaatgcaactccggctatgccctgcaggggtcgccagagatcgagtgcctccctgtgcctggggccttggcccaatggaatgtctcagcgcccacgtgtgtggtgccgtgtggaggcaacctcacagagcgcaggggcaccatcctgtcccctggcttcccagagccgtacctcaacagcctcaactgtgtgtggaagatcgtggtccccgaaggcgctggcatccagatccaagttgtcagttttgtgacagagcagaactgggactcgctggaagtatttgatggtgcagataacactgtaaccatgctggggagtttctcaggaacaaccgtgcctgcccttctgaacagcacctccaaccagctctaccttcatttctactcagatatcagcgtatctgcagctggcttccacttggagtacaaaacggtgggcctgagcagttgtccggaacctgctgtgcccagtaacggggtgaagactggcgagcgctacttggtgaatgatgtggtgtctttccagtgtgagccgggatatgccctccagggccacgcccacatctcctgcatgcccggaacagtgcggcgatggaactaccctcctccactctgtattgcacagtgtgggggaacagtggaggagatggagggggtgatcctgagcctcggcttcccaggcaactaccccagtaacatggactgctcctggaaaatagcactgcccgtgggctttggagctcacatccagttcctgaacttctccaccgagcccaaccacgactacatagaaatccggaatggcccctatgagaccagccgcatgatgggaagattcagtggaagcgagcttccaagctccctcctctccacgtcccacgagaccaccgtgtatttccacagcgaccactcccagaatcggccaggattcaagctggagtatcaggcctatgaacttcaagagtgcccagacccagagccctttgccaatggcattgtgaggggagctggctacaacgtgggacaatcagtgaccttcgagtgcctcccggggtatcaattgactggccaccctgtcctcacgtgtcaacatggcaccaaccggaactgggaccaccccctgcccaagtgtgaagtcccttgtggcgggaacatcacttcttccaacggcactgtgtactccccggggttccctagcccgtactccagctcccaggactgtgtctggctgatcaccgtgcccattggccatggcgtccgcctcaacctcagcctgctgcagacagagccctctggagatttcatcaccatctgggatgggccacagcaaacagcaccacggctcggcgtcttcacccggagcatggccaagaaaacagtgcagagttcatccaaccaggtcctgctcaagttccaccgtgatgcagccacaggggggatcttcgccatagctttctccgatcactgcagatattttaaccagaaatcaggaaagctggattttactcccagctccaccttgggccagctgtgtaaaaccttgcacaggtcccttccccacttgagacttcagtttcttcacctgtagaattaccggcttggagtttgtgacctgtaagaattctgtgaggtagtaaggcaaacattctaacccccactttacaaatgaagaaatagggcaaaggaaggctcaagtacttgcccaaaaccatgtggatagaactggaaacagaacccagcctccgcagtatctgctgcagtatctgctacagtatctgctctggtgtgactatacagtgttattacatcatgcgtgcacttgcagaaacacactaagactgtgaaagaggtagtgaaagaaacaggaagcaacagagagaaacaaggatgtaaagaacctaagcagctgtgactgccattcccaggagctatcgtccagggtgagtgcaatgtgggaatgagactccgccctctccatctgctcagttcccatgcccctctcattgggcacacctgtcgctccactaatgaaatccaggctttaaggctctgtcattttgacttgtgactttcccatagagtgataagagtatggacttcagagtcacagacgggttcaaaccttggctctgacacatgcaagctatgtaactttgtctgtcatttcacccttctgagcctcaatgttattatgcacaaaataggaatcatataagtacctaacctcctaaagttaaatgaaacaatgcttggaaatccttagctccaggcacagagtataaaaggtgatcaataaattatagttctaatagtcatcattgtcatgattatttttattatatctagatattgacaggcttggtgtaaagttaccttggtggtaggccaggtctcttgttcctgttcctgagccttcacctgtaccagaaccaggcaaaggaggctcagcacagccccaggccatccttatttccaagttcttctcagcaaggtctttcattgagagtgcttgcctaagggcacaatgctccttctgcctctcagatgagacacaaggcccttgctatggtgtaaatgcttaggcccccctagaattcatatgctgacatcctaacccccaaggtgatggtattaggaggtggggccttgggaggcaattaggtcagacaacagagccctcatgaatgggattagtgcctttataaaagagacccacagaatcaccacactgaagccttctcagtggaaagagctaagaagcacaggaaacacagaggccgaggtgggcggatcgcctgaggtgaggagttcaagaccagcctgaccaacatggagaaaccctgtctctactaaaaatacaaaattagatgggcgtggtggcgcatgcctgtaatcccagctactcaggaggctgaggcagaagaatcggttgaacctgggaggcggaggttgcagtgagccaagatcacgccattgcactccagcctgggcaacaagtgtgaaactccatctc

SEQ ID NO: 1031 - DNA, 2922 bp, Homo sapiens
aaagtctcctcctttttctcccaaaccacttcttcccccctaccccccgccacgcgaggctgcggcgcacggtatgggtgtgtttgtgtgtatttgtgtggggagggcgtttggagggaaggttaccgggagctccgaggccgctggggaacagggatcccggtgacaaagatggggatatttcctctgtcttccacttggaaacctcaacccccgcttcaggctccctagatactttctggggcccaaccgaaggccgtagccatccaaagcgttcccagcctttctggggagtgaaacttacccccggggttcgtcctagaggagcgtgagcggggaatgcccaggtcaaccgggctgtccgaattccgccccggctcagcctccggcctcagtccgggagagagatctgcctgtcggtctgggctgggggaaacgcggcagtggcctgggccacaggtgagggcagagtaaccagtgggaaggctgcgttttcacgaaggactcgggtgaagctgcagagctgcctttgagccctgactccttggcttcctgggtcggaggagatcttgtaatggagtggttcttcgtctcactagcaagatgcctgatttcctcaggatcaagggattgaagaatgtcccggattccactggggaaggtcctcctgaggaatgtcatccggcacacagatgctcacaataagattcaggaggaatcagatatgtggaaaataagagaactggaaaaacagatggaagatgcttaccgggggaccaaaaggaaaatgctacccagcagttcaagccggatgcgcagtgatggttttgatgaagaaagtcaaagatactattggaggccaaagaatgaaatttctgggacactggaagatgattttcttaaggctaaatcctggaataaaaagttctatgattatgaagcaaacatgccagacagatggggtcacagtggttataaagagttataccctgaagaatttgaaacaaacagtgatcagcaagatattaccaacgggaagaaaacatctccccaggtaaagtcatctacccatgaatcccgcaaacacaagaagtcaaagaaatcccacaaaaaaaagcagaaaaaaaggtcacacaaaaaacagaagaaaagcaaaaaggaagccacagatataacagcagattcctcgagtgagttctcagaagaaactggggcttctggtacaaggaaagggaaacaaccacataaacgcaagaaaaaatccaggaaaaagtctctcaaaaaacctgctttattcttagaggcagaaagtaacacttcacattcagatgattcagcatccagcagttctgaggaaagtgaggaaagagacactaagaaaaccaaaaggaaaaagagagagaaaaaagcccatacctctgtagccaacaatgaaatacaggagaggacaaacaaacgcacaaattggaaagtagctacagatgaaaggtctgctgagagctcagaggatgactaaatgggaaacacttttgttttccacatgactgtggatatttacagttcttactccttgtggttttgccagtgactcttgttcagcacggggcctgaggtcagagctgtcttgtgccatctgtatgttctgacagacgtcttgtcttctattttggcgttaagcttgatccccttttcttgttaaaagggaatctggtattttgttatgaaggtttcttgaagaaattatttttttttgcaattaattacgtttagtgtagagtgcatatacagcaaattaaaggacccagaaagctggatccaatagtgacctgggtacaccaatcggaatattgaatttggggaagtcaagggctgggatcaagaggtggattggaactaatgccatgtaggatggtatgacaaggcaacactgtattgctctctgtttatatagcaggtgtcacaactaacttgtctttagccttggtgctttgatccttctatattttgaccccacaggtgtggtccggtttacttaatcaggacatgggcctaagaacaaaccttttcccttcatgataacatccatagacaacttattagaagggactagagtttttgcaaatttccctgctggatggggcctatagctatacttagtatatgcctaaacatggtaattggatagtaaatggttttctagttccattgctgtatatttgcctaaatggacttgtgttcaaattatttcttcaattgtcatagataatcctgtaccaaatggggaagaattaggaaataatcatgttgtctaatggtactctggattcagggcagcaactgccatttaaatgttgtcttgttcatttctaaatctgttcatgaagtttaggttttccctgaaactaagttgaattatttccaaaatgaaacaggcttctcagggacatatccacttcttcccagtctgcctttggattaaagcaccaagcagagaccacattaattccctttgctatactgtgatccttagtatgttaattcttaagaaaccaacatatcactgaaagaaggctggcagaacgcaagtgcattttttcactgtgggaagaaagatcaagtgacgtattattttttcctggttgtcacttaatgggctgagtaaaaagcttgaaaactcagactttcggtcttggttctgccactcattggttatgaggaggcccagagcaggtaagttcaccttcctggccttactttcctgatgtgtaatacggaattacttcacagtagcatgacagtataagacaccagcagtagatacaactatgatgacattccatgagttggtatttttagttctaactgctaaatttgttctctttacgggacagatttctaataaagtgcttggtcttaaaatac

SEQ ID NO: 1032 - DNA, 4256 bp, Homo sapiens
aaaggcagaaggcccaggtgacaggggatcctggagctgtgctgtggcttgaggagatccgccagggagtggtcagagccaaccaggacactaatacagctcagagaatgtctcttggtgtggctgccatcaatcaagccatcaaggagggcaaggcagcccagactgagcgggtgttgaggaaccccgcagtggcccttcgaggggtagttcccgactgtgccaacggctaccagcgagccctggaaagtgccatggcaaagaaacagcgtccagcagacacagctttctgggttcaacatgacatgaaggatggcactgcctactacttccatctgcagaccttccaggggatctgggagcaacctcctggctgccccctcaacacctctcacctgacccgggaggagatccagtcagctgtcaccaaggtcactgctgcctatgaccgccaacagctctggaaagccaacgtcggctttgttatccagctccaggcccgcctccgtggcttcctagttcggcagaagtttgctgagcattcccactttctgaggacctggctcccagcagtcatcaagatccaggctcattggcggggttataggcagcggaagatttacctggagtggttgcagtattttaaagcaaacctggatgccataatcaagatccaggcctgggcccggatgtgggcagctcggaggcaatacctgaggcgtctgcactacttccagaagaatgttaactccattgtgaagatccaggcatttttccgagccaggaaagcccaagatgactacaggatattagtgcatgcaccccaccctcctctcagtgtggtacgcagatttgcccatctcttgaatcaaagccagcaagacttcttggctgaggcagagctgctgaagctccaggaagaggtagttaggaagatccgatccaatcagcagctggagcaggacctcaacatcatggacatcaagattggcctgctggtgaagaaccggatcactctgcaggaagtggtctcccactgcaagaagctgaccaagaggaataaggaacagctgtcagatatgatggttctggacaagcagaagggtttaaagtcgctgagcaaagagaaacggcagaaactagaagcataccaacacctcttctacctgctccagactcagcccatctacctggccaagctgatctttcagatgccacagaacaaaaccaccaagttcatggaggcagtgattttcagcctgtacaactatgcctccagccgccgagaggcctatctcctgctccagctgttcaagacagcactccaggaggaaatcaagtcaaaggtggagcagccccaggacgtggtgacaggcaacccaacagtggtgaggctggtggtgagattctaccgtaatgggcggggacagagtgccctgcaggagattctgggcaaggttatccaggatgtgctagaagacaaagtgctcagcgtccacacagaccctgtccacctctataagaactggatcaaccagactgaggcccagacagggcagcgcagccatctcccatatgatgtcaccccggagcaggccttgagccaccccgaggtccagagacgactggacatcgccctacgcaacctcctcgccatgactgataagttccttttagccatcacctcatctgtggaccaaattccgtatgggatgcgatatgtggccaaagtcctgaaggcaactctggcagagaaattccctgacgccacagacagcgaggtctataaggtggtcgggaacctcctgtactaccgcttcctgaacccagctgtggtggctcctgacgccttcgacattgtggccatggcagctggtggagccctggctgccccccagcgccatgccctgggggctgtggctcagctcctacagcacgctgcggctggcaaggccttctctgggcagagccagcacctacgggtcctgaatgactatctggaggaaacacacctcaagttcaggaagttcatccatagagcctgccaggtgccagagccagaggagcgttttgcagtggacgagtactcagacatggtggctgtggccaaacccatggtgtatatcaccgtgggggagctggtcaacacgcacaggctgttgctggagcaccaggactgcattgcccctgatcaccaagaccccctgcatgagctcctggaggatcttggggagctgcccaccatccctgaccttattggtgagagcatcgctgcagatgggcacacggacctgagcaagctagaagtgtccctgacgctgaccaacaagtttgaaggactagaggcagatgctgatgactccaacacccgtagcctgcttctgagcaccaagcagctgttggccgatatcatacagttccatcctggggacaccctcaaggagatcctgtccctctcggcttccagagagcaagaagcagcccacaagcagctgatgagccgacgccaggcctgtacagcccagacaccggagccactgcgacgacaccgctcactgacagctcactccctcctgccactggcagagaagcagcggcgcgtcctgcggaacctacgccgacttgaagccctggggttggtcagcgccagaaatggctaccaggggctagtggacgagctggccaaggacatccgcaaccagcacagacacaggcacaggcggaaggcagagctggtgaagctgcaggccacattacagggcctgagcactaagaccaccttctatgaggagcagggtgactactacagccagtacatccgggcctgcctggaccacctggcccccgactccaagagttctgggaaggggaagaagcagccttctcttcattacactgctgctcagctcctggaaaagggtgtcttggtggaaattgaagatcttcccgcctctcacttcagaaacgtcatctttgacatcacgccgggagatgaggcaggaaagtttgaagtaaatgccaagttcctgggtgtggacatggagcgatttcagcttcactatcaggatctcctgcagctccagtatgagggtgtggctgtcatgaaactcttcaacaaggccaaagtcaatgtcaaccttctcatcttcctcctcaacaagaagtttttgcggaagtgacagaggcaaagggtgctacccaagcccctcttacctctctggatgctttctttaacactaactcaccactgtgcttccctgcagacacccagagctcaggactgggcaagggccagggattctcaccccttccccagctgggaggagcttgcctgcctggccacagacagtgtatcttctaattggctaaagtgggccttgcccagagtccagctgtgtggcttttatcatgcatgacaaacccctggctttcctgccagatggtaggacatggaccttgacctgggaaagccattactcttgtgtctgctactgccctcccacagtcaccccaatattacaagcactgccccagcggcttgatttcccctctgccttccttctctctgcactcccacaaagccagggccaggctccccatccctacctcccactgcatcagcagtgggtgttcctgcccttcctgagtctaggcagctctgctgctgtgatctgcacaccctccaacctgggcagggactggggggatgcagtgtgtgttagtgcccatgtggcattgtggcactgttgccccccatggcggcatgggcaagatgaccttccattagcttcaagtcttgttctcttgtctgtggtctgtttaatatgtgggtcactagggtatttattctttctcccatccttacactctggatcattgtgcagacttaatcagggttttaacgctttcattttttttttttttttttttttgagctcaaagagagttctcattttccctattcaaactaatacccgtgccgtgttttttaccttggatttaaagtcaccttaggttggggcaacagattctcactcatgtttaagatcttgttatttcagcttcataagatcaaagaggagtctttcccttttctcttttaccctcaggattctcatcccttacagctgactcttccaggcaatttccatagatctgcagtcctgcctctgccacagtctctctgttgtccccacatctacccaacttcctgtactgttgcccttctgatgttaataaaagcagctgttactccc

SEQ ID NO: 1033 - DNA, 3781 bp, Homo sapiens
ggcagcgctctcctaagctctcgcggctgcgcttcggtcccggacccgggccacccacggggtagtgggtgctcctcggccccggacattgcaagccccagaaggcaagactaactcggtgttgctcctcccggcgctgacttcgaggcccggctatggacggcgagagcgaggtggatttttctagcaacagcataacccctttgtggcggaggcggtcgattcctcagccccaccagcttctgggccggagcaagccgaggccccagtcctaccagagccccaacgggttactaattacggatttcccggtggaggacggagggacgctctccgcagcgcagattcccgcccaggtgcccaccgcctcggacagcaggacggtacataggagccccctgcttctgggcgcccagcggagagcggtggccaatggtgggacggcatccccggagtacagggctgcctctcctcgacttcgacggcccaagtcacccaagctccccaaagcggtgcctggcggctccccgaaatccccagcaaatggcgcggtgaccttgcctgcgccgccgccgccgccggttctgcgccccccgcggactcctaacgcgcccgccccctgcacccccgaggaggaccttactgggttgactgccagcccggtgccttcgcccactgcaaatggccttgccgctaataacgactctcctgggtcaggttcgcagtccggccggaaggcaaaggaccccgaacgggggctctttcctgggccccagaaaagttcttcggaacaaaaactccccctccaaaggctgccctcccaggagaacgagctcctcgagaatccttccgtggttttgagtacaaacagccccgccgccctcaaagtggggaagcagcagatcattccgaagagtctggcctcggaaattaaaataagtaaatccaacaatcaaaatgtggagccccacaagagactcctcaaggtgcgcagcatggtggagggcctaggaggacccctgggtcacgcaggggaggagagtgaggtcgataacgacgtggatagcccagggtctctgcggagaggcttgcggtccacgtcttatcgcagggcagtggtcagtggctttgattttgacagtcctaccagctcgaagaagaagaacagaatgtcccagcctgttctgaaagtggtgatggaagacaaggagaagttttccagtctgggaaggataaagaaaaaaatgctgaaaggacaaggaacatttgatggggaagaaaatgctgtcctgtatcaaaactacaaggaaaaggcccttgacattgattctgatgaagagtcagagcccaaagaacagaagtcagatgaaaaaattgtgattcaccataagccattgagatccacatggagccaactctctgcggtgaaaagaaagggattatctcagacagtaagccaggaggaaagaaagagacaagaggctatctttgaagtcatatcctctgaacattcatatttactcagcttggagatcttgatacgaatgtttaaaaattctaaagaactgagtgatacaatgactaaaaccgagaggcaccatcttttctccaatattacagatgtctgtgaggcaagcaaaaagttctttatagagttggaagcaagacatcagaataatatcttcatagatgacataagtgacattgtggaaaaacacacagcatccacatttgacccatatgtgaaatactgcacaaatgaagtctaccaacaacgaacactacaaaaattgttagctaccaatccatcctttaaggaagtattgtcaaggattgagtcccatgaagactgtaggaacttacccatgatctcttttctcattctccccatgcagagggtgacccgccttcccctgctgatggatactatctgtcaaaaaacacctaaggactctccgaagtatgaagtctgcaaaagagccttgaaggaagttagcaagttggttcgactatgcaatgagggcgcccggaagatggaaaggactgagatgatgtacacaattaactcccagctggaatttaaaattaagccttttcctttagtctcctcttcccggtggttggtaaaaagaggtgaattgacagcctatgttgaagacactgtgcttttctcaagaaggacatccaaacagcaagtctacttctttctctttaacgatgtgctcattatcaccaagaagaagagtgaagaaagttacaacgtcaatgattattccttaagagatcagctattggtggaatcttgtgacaatgaagagcttaattcttctccagggaagaacagctccacaatgctctattcaagacagagctctgccagtcacctctttactctgacagtccttagtaaccacgcgaatgagaaagtggagatgctactaggagctgagacgcagagcgagcgagcccgctggataactgccctgggacacagcagcgggaagccgcctgcagaccgaacctgtggctgacgtcgtcctcatctatcaacgtgtcagcgatggctggtatgagggggaacgactacgagatggagaaagaggctggtttcctatggaatgtgccaaggagataacatgtcaagctacaattgataagaatgtggagagaatgggacgcttgctaggactggagaccaacgtgtagtctctcagatggtcttttgttactgcaagatttgcacgacacttaccgggctggttggttctgggctagttttattgttaattttgtcacagcctatttaattaaaagaacgaaaacacttgcctttaagcttgccaggttgttccgctctctcatgagaagagcttggatacagtgagtttgcacagctcagtttttacctaaccacacacttgcagacctcctgaggtacacagaatagctgagcagttcacttcagggatcaggtcatctctgctcctcctagtttcaccatgttctggcaataaaaaacacatattatatcctggttttctctatccttgcattactaaggtgactgtctctctttatacatccttgtatggttctcccagtattagcaagattgtatatctgtaaagaatgtccagttttgtaaatatttccctgcctttttttttctttttttacatctgattttaatgcttcgttaacttcaaaaggaactggtagagttcagaaggtgagctgttgtttttctaaacctcttcccaggaaggggacattgacacttgaatttttgtcacctttttcctcattagaaggaaagtagaaagccttactgtaggatttttaaaaaaaaatccatctcaccccatattggtcttaaataagtatagactaattaacctaagctacctttaacaacgtagaatttagatgggttcatatatgtgagaaaaacctgaatataggacaggggtcctacttttttccccacctctgtcgcccaggctagagtatagtggtgtgatcttggcccactgcaacctctgcttcctaggttcaagtgattctcctgcctcagcctcccaagtagctgggattgtaagagtatgccaccacgcccagctactttttgtatttttagtagagacagggtttcatcatgttggccaggatggtctcttaactcctgccctcaagtgatccaccagagaggagatcctcggcctccccaagtgctgggattataggcatgagccaccgtgcccagcctactttctaattaatt

SEQ ID NO: 1034 - DNA, 2941 bp, Homo sapiens
ttggagacgcttgcgctttcccgggccgcacttcccacccgggtcttcagaagcccgtggccgctgggtgagcccctgcgtgaacgcacacgcacgcacacggcttcaggttgccccgcggcgccgcgcgcgatatcggctcggatcccgggaggccgtccgcccctttttcagcggatagctgaggccagatcacacctggctgtaggcccaaagcgaacctatcactggcacagaagcttggacctggaaggggactcatggaggagtccgctgtcttttagagatgggaaaactgggcccaaataaccaagtcactggtttcttaggctttcaggcaggaggtctgagagtctgtcttaaagagaccctctgtctggggcccagagcacccctccttcctcaatacacggccacatccaagataatcaaggttagtctcatgggtgacagaaaaataaccatggcagtgaatatactgctgggtcctggttttgctgttaccattcttcaaacagcaggactgggaaaatcccgcctgtcccctgcctgctctgcacgtcattttaacttcatgactgaaaacagcagccctttctagggttatcaacatgaatgtcggtaaatgttctactctaagaacagatgttttactttttttaagtttttagtatgaaaaactgtaaacacgaaattagaggaagagtccagcacctgccatttggccactgtccagacctactgtgtgcttcttggggaaaaactttacagctttgaatggctgagaggtttggaaagaaacagctcagtccccatggcccggatggagagaggatccctgcaggcaggtccccatgctgccaccagattggagccactccttgcttcctttagtcacagtacctgaatgtgcccgcctcctggagagcgtcctggttgcaggcttcccttgccaaccactccagagggtgaaactggctctcttcttgcttctttaaaaagacactgaggcgcatcttggatacccgcaagaaagaggctgtacaaaggcagaaacagacgttcagcatggccgtggctgagctgttggctccggagtgcttctgtcccacctcccccaggaagggaagtccgttggccaggccaattctagagcaaaatctgagagatgctcttagattcccactgtgtcactgcttctgctgagccatggaaacctgagagggtgtcccccaacacacagtgaaatgatgcccactcctcaggaagagcccacgtgggggcaggggcaagaggggtggggaggctcataccgtggcacgcgtcatcctcattcaagaggcccaggaggagcaccaccctccgcatattgcgcgtgcagctctcgttctggtctctgagcatgcccacggcgctctgcacacagcttctcagcagcctggtggtgtccaggatcgacacctgttggtggagacggttgggtcatccgtttctgccactgacacagtgggcaaaagccaaaccgcccgtatgcaatgagggtctcaatgcagcaaacagcacagggcggtggtcctcacggacaaagaagagacgccgacctccgccctgcaccccccaaactgccggtgcagatgcccttgacccccagtaaccagcaacaagaccgtcactgtgtgaggaaagtggggcgccatcctcacccctgcacagcggcggcgactcctctagctcccaatgcaaaagcgtttaaagatgcagctcagaagcatcaccagcagcacaaggggaggtcccaagaaccagaacttacatcactgcctccgagttcagaggtttcctttcccaccttctcagagctttctgtttccatggcctcctctgccacctctgccacctcccctgatgtgctggcctctgtttccatcgcctcctcatggccgtcttccgcccggtgttccaagcccactgcagtcgaagcaaacgtgattgcgttaccactcagaaggtggcacagggactggcagcggtgccatctgggagtctgtgttctcagcctccgagtgcaggcttccccggcccctgctgtggtgctaggtccccagatgagagatcacggtcatgaagatcagcccccaaggcagccccttccttccagcctgggctctggcgtgttctaggtgctcacttccatggctggcctgctcacagagctctacctcagcctgtggtaagcgcacctgctcggccctggtgctctatgatgagccaccagtcagttctgcagatgtgtccccgagctcctgccgagggacgaaacacggtggccctgctcctagtgccatgtgcacgccacgctccacacctgccatctgcccttccaccacctgctcccccaggggctccgcctcgtgactcacgctcaggcaagtctccgggcgcgaacagctggctgatggtgacatgctgcagcctggtcacatcagaaaccatgagggtggatctccggaggtcatcgatgtggacagactgccacagccctgtgaagagtgaagccacccacaactgtctttgtgtctttcccggctgctgctcagccctaagcagggacattgcacaccctggcttgtcattatcttgctgcgcaatgaatgactggcaccctgaagccgaaaccctggaatgggcctgcgcagaaaccacccaacccgatactatacacgacccgattctatgcccatcgacagcttcaccataagcagcaacggtaagacctgcaatggccagcgtgggaaggacgcatggataaggcctgtggttctttcacccatgcactgctgtatttgctgtatcacagttagtgaggggtgggggacactggcaaggtctgccttccattctccacgaaattattcaagtaaacttactttcctgtttctgg

SEQ ID NO: 1035 - DNA, 2695 bp, Homo sapiens
atccagagaccacactaaaatggtggctgacgtggagacagaggaagctcctttctagttatggccacaaggcaggatgctgaggtgttgtctaggctcagttggatctccaagtggcggtaccgttctctccacttcaaaaatacacagaaacatgtggaaatgttctgtcatccagaatgaaaagcatgtgcaccaaattttcacagacctgattcgaatgtagataaaagtgcaaaatccagaggagggaacacgctatagaaatcctgtcttctatactataatttaatcatcgtgtgccacagaatgtctttgcataaattacaaccacaataatagcatcactttcacaaaaggtggcctctaatcgatttgactctccaagagatggctgggtttttcaaagcagagaaatgatgacctgcagtcttaaagagctgttgattgcacctggggctcccgtggccggcgcccatcgagcagcccatcctggctgttcccttgttcagctgattttcttttttatcttgacatttgctaaccgcttggtttttattttccgggaagagaggattattggcaactggcaccacccccatgtctggaggagggacgtttctaggatgacccccagagtggagaaatagccgaggtaacctttttgctataaatttcttcccctgcctccgtcttctgttcctttccttccccccatcccttgaacaaacatgatttttaaattcccctcatcatttttagtgctttggagtcttctcagatgtggacgaaaacagttcgtgagctgcgctgagcagttccggagccctggctccctttccccggggcctaagcccccaagaagagagtctttttcaggaccatgggagcaggttttaaaaggctttctattgaagcgaggccgtcagccagccgtgcgtgtccgcattgtggtggtcccagagccttatggacaatcctttgaaagaatagggttgggaagattctcaggacagaagcggctaatttccatccttggagctttatctcacaaaggatatttgatagaaagaaaaaatggagtctgtggaagctttgctcctatttccaaatgggttgactctggatgcaaaggaatattttcacatttttcccaacagaggaaagcttttagtgccaaaatcctcaaaggagaatgaacatcacacattacacatgtatgtataagggtagaataatatggtacaaaatccagtgagtacaagcacacaatgggcattcagtacaggttaaatgaatatgcaagaaaaattcaaagttgttgttgctgtttataagggtggtgattattaatagatgcaaatgtatactcccttttgtaatcacagcaaggtaaaagtcttatctctgatcattaccatgaggacacttaaatatttagccctggggacaaaatggtttgtaggcaggacgtcctgtgtgtttatgcacacataaaatgccgccctggccccaggactgcaaggcctctgactgcatcatttacattcaggggtggtcctgatcaacatggccccatagaataatagagggaatttcagatagtacagcgttagataataagcgctttccactgactctgtttacatgtggaaattagaagcgctgagtgaaaaagagtagtgaaaataaagacaggaagtatatacacaacaaacaatttttcctctctgcaaatcggattattcccttgcgcaccccctgcaacccccatctatgatgtcaaactcaatggactgttgaactaatagcctgggagtcaccagcgtgagagtgtgtatgtccacgctgtgcaacttgaattaggctggccaccacggctgtgtacagctaccccaggaagagcccctcccctcctcagcatttcagtggaaaacgtgctgactgggacccagctacaggaatcacatttgggcagagagaatggcttatccttttcatgaggggtcttgactcaagaacacttgccaattctgcttgaccgtttcccattctttacggtttttcctatcactccttagactaagaaagaaaaatctgtaggaatgattcggtgggatttctcttttgttcctaaataaaccttatccctggatgagctcgttcacactagggaagttactaccactggctttgaagccaggcagatctgggtgttccttcccatgtctttatttgctttgtgggggatcttttcccagcttttctgctttcatccttcttagtgagagcttcttcagctgcagaacaggggcaataatgcctaccttgctgggttgcagcagagaatgctgcttatgcaggaaaataaaaaaacacatagcacacaatgggagcttaatacataagaattataaacagtcttttgtgtatatatcaatgtatttcatgtccttaatgtttatttaaagcaagtacattcttttgaattaagcataaaaaggtcataaaatgccagagatgtgcttatttgaaatgtttgcaatgctttgcaattgttttaaaataaggagatgatataacagggtgttagctccgccactaattagttacgtaatcttagattatgtcacttccctgggtctcagttgtaaacagttgcttaataaataatgtttgttttgctgtcatcaat

SEQ ID NO: 1036 - DNA, 2686 bp, Homo sapiens
gcgcatgcgcgaactcctggcgggacctacgcggtagaagtttctactaagtgaaaaggaagagcgagggattcttttctctgtggtctacagcagcagcactattattaaaaatatttggaaagacaacctggcaagttttgaaaaagatttttttaaaaacggtagggttccgctcacagtgggaggcggggctcagtggtccagaaacgcctcttcagaagagggcgggctcgccgagaggcggggtctcgggcccactcggatgacgtgccgcgtagaagtatcgcgggaagaggaagggagcgtaactcttagaagtcactatggtgacggggaggtaccaggtatttgagagcaatcgccaccgctttcctggaacttgagtaaatacaatcaagtggcatcttaaatttttgctggaagtggagtcatgagactaaagatatctcttttaaaagaaccaaagcatcaagaattagtaagctgtgtgggctggactactgctgaagagctgtattcatgtagtgatgatcaccagatagtgaagtggaacttgttaaccagtgaaacaactcaaatagtaaagcttcctgatgatatttaccctattgattttcactggtttccaaaaagtttgggtgtaaagaaacaaacccaggcagaaagctttgtcctcacaagttctgatggtaaatttcatctgatttccaagttaggaagagtggaaaaaagtgtagaagctcactgtggagcagtacttgcaggaagatggaattatgaaggaacagcattagttacagttggagaagatggacaaataaaaatttggtcaaagactgggatgcttagatcaactttagctcagcaaggaacaccagtgtattcagtagcgtggggccctgattcagaaaaggttctttatacagcaggcaagcagctaatcattaaacctcttcaaccaaatgctaaagttttgcagtggaaagctcatgatggcattattttaaaagtagattggaactcggtcaatgatcttattttatctgctggtgaagactgtaaatataaggtatgggatagttacggccgcccactgtacaattcacaacctcatgagcatcccattacttcagttgcctgggctccagatggagaattatttgctgttggatcgtttcatactttacgcttgtgtgataaaactgggtggtcatatgcattagaaaaacccaacactggcagcatatttaatattgcatggtctatcgatggcactcagattgctggagcctgtggaaatggacatgtcgtttttgcacatgtggtggaacaacattgggagtggaaaaattttcaagtaacattaacgaaaagaagagccatgcaggttcgtaatgttcttaatgatgcagtggatttactggaattccgtgatagagtcattaaagcatctttgaactatgcacacttagttgtttcaacgtctcttcaatgttacgtgttctccacgaagaactggaacacaccaattatatttgacctcaaagaaggaactgttagtttgattctgcaggcagaaagacattttcttcttgtagatggtagtagtatctatttatattcatatgaagggcgctttatttcatctccaaaatttcctggaatgagaacagatattctgaatgcacagactgtgtctttgagtaatgataccatagcaataagagacaaagctgatgaaaaaataatcttcctctttgaggcatcaaccggaaagccgttaggtgatggaaagtttctttctcataagaatgaaatcttggaaattgctctggatcaaaaaggacttaccaatgatagaaaaattgctttcattgataaaaatagagatctctgtatcacttctgtgaaacgatttgggaaggaagaacaaattatcaagcttggaacaatggtgcatactttggcatggaacgatacatgcaatatcctttgtggacttcaagatactcgatttatagtgtggtattaccccaatacagtttatgtggacagagacattttgcctaaaacattatatgaaagggatgcaagtgaatttagtaaaaatccccatattgtgagttttgttggaaatcaagtaactattagaagagctgatggctccctggttcacatcagcataccaccatatcctgctattctccatgaatatgtaagcagttcaaaatgggaagatgctgtgagactttgtcgctttgttaaggagcaaaccatgtgggcttgtctagctgctatggcagttgctaatcgagatatgactactgcagaaatagcctatgcagcaattggtgaaattgataaggttcagtacatcaattctataaaaaatcttccatctaaagaatcaaaaatggcccacatactactgtttagtgggaacatacaggaggctgaaatagtacttcttcaggctggccttgtttatcaagcaatccagatcaatattaatctctacaactgggaaagggcactggaattggctgtaaaatacaaaacacatgttgatacagttcttgcttaccgtcaaaagtttttggagacatttggtaaacaggaaactaataaacgatacttgcattatgcagaaggtctccaaatagattgggagaaaatcaaagcc

SEQ ID NO: 1037 - DNA, 2714 bp, Homo sapiens
agctcccgcgatcccctgtctgcgcgccgccgccgccaagcccgagcccgagccggggccgccgccaccggtgccggctccgagcggcctcccgcgctccagcccgctgggagctgtccagtgctgaaaacccgcgcggacacagccgatcgcgcccggccggccgcctccccgcaccgagccccgcgccggccgcgccatgccgcgctccttcctggtaaagaagatcaaaggggacggcttccagtgcagcggggtgccggcccccacctaccaccccttggagacagcctacgtgctgcctggcgcccgggggcctcccggggacaacgacggggttcagaaagtgtcagcaactggtggaaggcaaagtagaaactcctggctccctccttcgtctccagttttctccagctggcagggaggacccagacagcgtgccccccatcgatgtcctctggatcaaaggggcccagggaggtgactacttctactcctttgggggctgccaccgctacgcggcctaccagcaactgcagcgagagaccatccccgccaagcttgtccagtccactctctcagacctaagggtgtacctgggagcatccacaccagacttgcagtagcagcctccttggcacctgctgccaccttcaagagcccagaagacacacctggcctccagcaggctgggccatgcagaagggatagcaggggtgcattctctttgcacctggcgagagggtctgactctgggcacccctctcaccggctacaaggccttggactcactgtacagtgtgggagccccagttcccacctctgtgacaataggatcatggccttacccttgaagcattaccgagaaggagaacagagatgggcttgaagagccacgtgctgccggctccaaattcccaaggacaaggatccctctgcatttttgtctatgtaacctcttatatggactacattcagctgcaaggaaaggaaaaccttgattgcagtggtttaaacaaacagaagattgtttttccacatagcatggattctggagatgggtggctaatggtattggttcaacaactccacggaggtaggggtcacgtcttggatccttttgccttaatctcagtgctcgttacttcatggtcccaagatggctgctgtatccccaagaatcatgtctgcgttcaaggaaggaggggtggaggaagaggaagggccaaactagctggacccgtcaccttctatcagaaagtaaaacctcgtcagaagtctgtttcctgctctctccctctgcatatcttcacttagatgcccttggcccgagccagctaccattgcacctctagctgcaaacaaagctaagacagcagggaacagaattgtcatggctgaatagaccaatcgtgttccatctactgagactggcacactgcctcctgcaataaaactgggatcccattaccaagagagaaatgcagaattgtgtaccagttagcttttgctgtgtaacaaaccatccccaaacttggcagctagaaacaaaccctgtattttcccacaatcctatgggttggcaatttgggctgggctcaacagggcagttctgctgctcacacctgggatccctcatggagctaaggtcagctgttacctcagctgggcctggatggtctaggatagccttactcacttgcctggcaggtgacaggctgttggctggaattgcttggttctcctccatgtggcctctccagcaggctagctcaggcttattcacatgatggcttcaggattccaaagagagtgagagtagaagctgaaagacttcttgagttcttggcctggaactgggactaggacagtgtcacttctgctaagttcttttggtcagagcaaatcacaaggctttacccagattcaagggatgagaaacagactacctgtcttgatgaggggaaccacaaagagcttgtggccatttttcacctatcacaaataattttggatgggtatttatttggataaaggtatttccctcttccccctttctctctgtctcatggggcctcactctgccaagttggaaggcactaagacattgtcctggccctcagggtctaggggaagaggtgttggggcaggaagtgagtctctccatgggctggacccactgtagtaggagtgcctccttgtctgcactgctggtatggggttaggccaggtaggacattccagaggggcttctgaaaaccaagagtccctggggaaagggaacagagtaaggcaggccttgttctcactgccctctaagggaacttggtcactcggcacttttaagcctcagtttctccagttcaataataaggacaagagcttttcccatgcattctctttccccgggaaagttgactgaggtgaccagtaatagaattgaaaagggagagtgtcttcagtgcaatgtggcatcctggattgggtcttggaacaaaaacaggacattagtgggaaaattggaaatctgaaaaaagtctgaattttagttaatataccaatttcagtctcttggttttgacagatgtaccatggtgatgtaagatgttgaccttggggtaggctgggtgaagggtatacaggaactctttgtactatctctgcaacttctctgtaaatctagtatcattccaaaataaaagtttatttaattt

SEQ ID NO: 1038 - DNA, 2993 bp, Homo sapiens
agtgctgggggcaggagcctgtggtttatcaagcaccttctgccagctgaggccgtgactttttgtccctcactggaggaggcttcaaggtcagcctcttcttcctttggtcccaagcttgccgtgtctcctcctcattccccacgtccacatgagaaggcagtgttcacaggtgggttggtctgagattgaaatcgcaaggccaggattttctgtctgggcagccccctcgagtcagcctcagaggagcccagacctcttggatggctttcggcgagcctcccagtgggcacagcactcgccaccggacactgcatggactcagcttccacactgcgatgggtatggcctggtccttgcactaccaggggcaaggaggaacgctatgcctggtgggggtgagcaccccatctcatgacaaagcagttctccagggtctgccccacttttctgtaaacctgggggtccagcccagtgcattggctggaaggagaggggacgcctcctgtcccagctcatggcgctctgccgaccccactgtcagccccaaccttggtgctccggggggccccaatgccatagatgcacttcatggggagcaactggggctgttcctgaggaccaagatgggcagagaccctaaagacgtccatggattgacccctgctctctgtggcccctgcctggctggcctcccctcctcacactctccacagttctcatgcaacacagcgcctctaaaaatgctgtcctgaaaatgtgcgctttggggaagagcagcttcctcctcttcgaccaagttcgggtcccttctacccttcagtggctgtaggcagtcggtgagggtcctggacggggtgggccgggggcagggaggggcactgtgggctttggttgctcaggggtcctggcagacacaccaacctggtgtgtttggaaatgcacctggatgtgtgctgacctctgtgtggaggaccacgggtctgttcatcccccactggctgcacccccgggaggctgcagcgtgcactattcggtccctacgctgcagttattcttgtatctgccttgtcactggccttgctgcccatgactccctcaggtcagcccacgtctctgtcaaactttcatcctccgcaattctgcgcagcctgtaaatgcttaaaaaatattgcggaacaggtgagtcacattacagaaaggacgcaacctggaaaagcacagacattccttccccttctgcacctgttagagtaagggaggggcatgagggggtgggacctgcacaaggtgcagctgatagaaatgcagtcttcaggaaaagccctggctctgaaacggcaaaggctgtgtgcctgggaaaaagacaaacgtgtcttatccggagacggcccccctgccccaaaggctgtcacgctgccgttcagttatctattctgcagcgatagaactggcttgacctaaaaattcagtgacggaaaaatgtcatctaatgctgcttagtgcagtcaggcggtcagcagatgagggcagaaggccactggtctttgacagaatatgcggacggcgaaataacaaaacaggcagcagatgagggcagaaggccactggtctttgacagaacacgcggacggcgaaataacaaaacagtattcaggctgcactgtcagcagcagagacaaacaattcttctaaaataaacaagcgagctcccagcagaggcctgtgaagtctcccgttctgcccaaaccacacacatgtggcccacagaggaggctgcagaggcccacggggcactcaagtggccgagtgtgagacccaggccaccggccgtcctccctgtcagaacaaaaggttcatggaaagggccaggaggacacagcaaggggaaccgaatgccactggcatttcttggatcttttgtaccatagtctaagcatttagaggaagcaccgcgagtttgctgccctggaagctgacgtgctccccaaacacaagacgcaggactggaggccttgccccgcagctcgagaggccgttttgggacatatcaaggaaggaaggcttaagcgacacaggacctggctgacttacgcacccgctgtctaaagatggggtgctggccggtgaactggagtggctcacggcagacctggagtgacagtcatgggtctgtacctgtgtggagtcctccatggctgggcttgcagagactgagctggactgcattgcacattggctggaaggagaggagccactgagagacccagcttacggcactctgcccaccccactgcccaccccaaccctggcgctccagggaggcccaatgccacagacacactccagggggacaattggggctgttcccaaggaccaggagggacaaatgccctaaagatgtccatggtttgacccctgctgtctgtgggccctgcctggctggcctccccttctcacactctccacagtcctcatgcaacacagcacatctgaaaatgctgtcctgaagacgcgcactctggggaagagcagcttcctcctctccgagtggagcgggctggccccatgaggcgtgattttcattgtgaaatgtgcttcacgtaacactggggcctttgtcaccatttttaattgtacagtttggaggcattaagtgtgttcatcatcaccaccttccacccacagagcttcttcgtcttcccaaacggaaactctgtcgtcggtaaacactccctcccctcccacagcccctggcacctgccttctccttcctgtctccatgaacctgacaactcttcggaccccacctaagtggagttgggcaggatttgtcctctgtggctggctcgcgtcactcagcggccctgaagactcatctgcgccgcagcctgtcccagaatctccctccctctaacactgattaatatcctgctgcacaaaaaaacaaagatgatcatttgatacccaatatccacttgaaaattggtaag

SEQ ID NO: 1039 - DNA, 2323 bp, Homo sapiens
aatgaggcgaggtcggaacaggatctgctggctccggctcggtttcctcacacaggtctctccagctggatcctcgacgctagggaggaaggggcgcgggactgctgtgggggttttccctccccaggcaggggcaggacctgttccgggcgactgcagggttaagggtatcgtcttaaagagccggatcctcccggctggagcgaggctggatggcgggacgcagcctctcagcctctcgtacccgccctgcgtccgcagtggttgttggcgcagccgccccgtcggtgttccgggctcagtccccgctccccagcgccagacgcagactccgggccaagttctccctccgctcgctgctttctgccgcaggacccggatcaataaagggaaggagagccgggaggaaatgatggagaacagagagaaaggagatgcttgatttcactcgccaaggagtgagtgctcatcggcagacactgggctctggccacgcgtcttagactccaaatctcggctcactggtccctttgaggaggtcgcctggtgttcccgtagccctccaccccaccgtaggagagcgcctgccacgagctccgcgcctcgctaagtgctttgctacgtgaactcttagttttcccaacatccctaagccgccgatacattatcacccacgtattgcggacgagagaaccgcctcggagaagctggctggctcgcttggagttttgcagctagtggcggagcgagcattccgagcaggtactgtgcgatcctccagcgccggccgcagctcacagccccttagctccgccgggttattgtgcggccgcgccttctgcacctgttgcggccctcgctaggcgggaagggagggagaagaggaggacaaaggggatgaccaggtggctctcccccgacggactcccggcccagggagcggatagaccactccgagagagagtgtggctttgagccttggagaggatgctctccttctccagggatcgcctccccagcggacgcagagtttcagggaaatgtccgcctccgccacttgggatggcagtggggagaggaggatctgggtgtccggaggagggcagtgggagaaagctggagctgctggagtcgcagctgcctgcggagcgggcccgggaggaagcggggccgagcgtgcggcgtccacgcgataagctccacaaacccaaagctacacagactgaggtcaaaccatctgtgaggtttaacctccgcacctccaaggacccagagcatgaaggatgctacctctccgtcggccacagccagcccttagaagactgcagtttcaacatgacagctaaaacctttttcatcattcacggatggacgatgagcggtatctttgaaaactggctgcacaaactcgtgtcagccctgcacacaagagagaaagacgccaatgtagttgtggttgactggctccccctggcccaccagctttacacggatgcggtcaataataccagggtggtgggacacagcattgccaggatgctcgactggctgcaggagaaggacgatttttctctcgggaatgtccacttgatcggctacagcctcggagcgcacgtggccgggtatgcaggcaacttcgtgaaaggaacggtgggccgaatcacaggtttggatcctgccgggcccatgtttgaaggggccgacatccacaagaggctctctccggacgatgcagattttgtggatgtcctccacacctacacgcgttccttcggcttgagcattggtattcagatgcctgtgggccacattgacatctaccccaatgggggtgacttccagccaggctgtggactcaacgatgtcttgggatcaattgcatatggaacaatcacagaggtggtaaaatgtgagcatgagcgagccgtccacctctttgttgactctctggtgaatcaggacaagccgagttttgccttccagtgcactgactccaatcgcttcaaaaaggggatctgtctgagctgccgcaagaaccgttgtaatagcattggctacaatgccaagaaaatgaggaacaagaggaacagcaaaatgtacctaaaaacccgggcaggcatgcctttcagaggtaaccttcagtccctggagtgtccctgaggaaggcccttaatacctccttcttaataccatgctgcagagcagggcacatcctagcccaggagaagtggccagcacaatccaatcaaatcgttgcaaatcagattacactgtgcatgtcctaggaaagggaatctttacaaaataaacagtgtggacccct

SEQ ID NO: 1040 - DNA, 2839 bp, Homo sapiens
tttccaccatccattcctccctcttcccccttagcctgtgttcctaaaaacctaaaaccccttcaactaacacctgatctaaaacctaaacatcttattttcttctgtaatactgcttgaccccagtacaaacttgacaatagttccaagtggccagagaatggcacttttgatttgtctatcctacaagacctaggtaatgactccaacttattgatagtgttttatgttcagataatgcccgatgactttgtcatgcagctccaccgattttgagaacgacagcgacttccgtcccagccgtgccaggtgctgcctcagattcaggttatgccgctcaattcgctgcgtatatcgcttgctgattacgtgcagctttcccttcaggcgggattcatacagcggccagccatccgtcatccatatcaccacgtcaaagggtgacagcaggctcataagacgccccagcgtcgccatagtgcgttcaccgaatacgtgcgcaacaaccgtcttccggagactgtcatacgcgtaaaacagccagcgctggcgcgatttagccccgacatagccccactgttcgtccatttccgcgcagacgatgacgtcactgcccggctgtatgcgcgaggttaccgactgcggcctgagttttttaagtgacgtaaaatcgtgttgaggccaacgcccataatgcgggctgttgcccggcatccaacgccattcatggccatatcaatgattttctggtgcgtaccgggttgagaagcggtgtaagtgaactgcagttgccatgttttacggcagtgagagcagagatagcgctgatgtccggcggtgcttttgccgttacgcaccaccccgtcagtagctgaacaggagggacagctgatagaaacagaagccactggagcacctcaaaaacaccatcatacactaaatcagtaagttggcagcatcacccaagacctagataatttttgtcaaaaattgggcaaatggtctgaggtgccttacgtccaggccttttttacacttcgctctctccctagtctctgctcccaatgcagcttgtcccagattttccttctttctctcccgtttgctccttcagtctccatcccaagttcagagtcctccaaatcctccttttccactgacccctctgacctctctcctcttcccctggctgctccttgccaggctgaattgggtcccaatttttccgcagtctctgctccccaaccctataacccttctattacacccctcctcacacctggtctggcttacagtttcgttccgcgactagctctcctccacctgcccaacaatttcctcttagagaggtggctggagctgaaggcatagtcagggtacatgtgcttttttccctattggacctctcccagatcagtcagcatttaggctctttctcatcagaccccactaaatatatacaggaattccaatatttaactcagtcctacaatttaacctggagtgacttaaatgtcatcctgacttctaccctctccccagatgagcgagagtttataccctagcccaatctcatgctgatgactgccagcgtcctgagccaggcctccaagaagacaccagggcagttccccaggaggatccccaatggggataccaaacaggctcccaagatacagctaggcaagattacatggtctcttgcctagttgaggggcttaaaaaggcagcatacaaagttgttaattatgacaaacctaaagaagccacccaaggtaaggacgaaaacccagctcagttcatggcccgcttggtggctaccctcagacgctttacagccctggacccagaagggccagaaggctgtcttattcttaatatgcattttattatccagtctgctcccgacattaggaaaaaattccaaaaactagattccagccctcaaaccccacaacaagacttaattaacctcgccttcaaggtgtttaacaatagagaagagacagccaagtgacaacgtatttcagagctgcaactgcttgcctttgctgtaagacaaaccccagccatgcctacagcacacaaaaacctcagaacaacaaaactgcagcctccaggcactccttcaaaacctccttatggaccttgcttcaaacgccaaaagcccggccactgggcctcggaaggcctgcagcccaggattcctcctaaggcttgtcctgtctgtgcaggaccccactggaagtctgactgtccaactcagattaaagctgctcctagacctgctggagcaaaaacccagggctctctggctgactccttctcagatctcctgggcttaacagctgaagactgacactgcctgatcatctcggaagccccttggaccatcacggacaccaagctttgggtaactcttaaacagtggaggaagacaggaatgtcaggcctctgagcccaagctaagccatcataacccctgtgacctgcacgtatacatccagatggcctggagcaactgaagaatcacaaaagaagtgaaacaaccagttcctgccttaactgataacattccactattgtgatttgttcctgccccaccctaactaatgaatcaaccttgtgacagtcctcccctggacgatgagtctcaggagctccccaccaagcaccttgtgacccccgctcctgcctgcaagagataaccacctttaactgtaattttccactacctacccaaatcctataaaactgccccaccccatctccctttgctgactctcttttcggacacagtccacttgcatccaagtgaataaacagcctcgttgctcac

SEQ ID NO: 1041 - DNA, 1348 bp, Homo sapiens
caggccgaccccggggtccattagaggcgccccaggccgagggagcccgcggcggctggaaggacacgaaagctatgtgaccttctgccagctggaggatgaggctgccttcacatgcagcgccgactgcaccatcaggaggtgggacgtgctgaccgggcagtgtctgcaggtgtaccgaggacacacgtccatcgtgaacaggatcctggttgccaacaaccagctcttcagcagctcctatgaccggacagctcgggtctggagtgtggacaaggggcagatgtcccgggagttccggggccaccgcaactgcgtgctgaccctagcctactctgccccgtgggacctccccagcactccctgcgcggaggaggccgcggccggggggcttctggtgaccggcagcacagatggcacagccaaggtgtggcaggtggccagcggctgctgccaccagacgctgcggggccacacgggtgcagtgctgtgcctagtgctagacacgcccggccacacggccttcacaggcagcaccgacgccaccatccgtgcctgggacatcctgagtggggagcagctgcgggtgttccgggagcaccggggctccgtcatctgtctggagtgttcacgggcagcggggacgcttgcgcccgggccttcgacgcgcagtctggagagctgcggagggtgttccggggccacacattcatcatcaactgcatccaggtgcacggccaggtgctctacaccgcctcgcacgacggcgccctgcgcctctgggacgtgcgcgggctccgaggtgccccgcggccccctccgcccacgcgcagcctctcgcggctcttcagcaacaaggtgggctgcgccgccgcgcccctgcagccggcctgatcccgcggggcccctgcagacgccagcccagacacccagcggctcccagagcgccccgccctgctacccgcggtggtggcgcccgatggccggcgaggggcgaggagcgaggaagcccgggcgggaggagagcccgtcgcaggcgtctggtttttctttggtggccaggaggcgctgggagcgggagtgctcgccctggggaccgcccccttttcccttttagggtggctcctgtcctccctccccatccctgacctggcgaaaggcctagtcctggggaccctcccacctcaggggctgcaggcggactgccccagctcccccagccccacgaaactgggcctttcctgctgagaggaagtgactttttacagaagccactgaacctggttattttggcaaatcgtccgtctcgagggccttggggggaactgaaatatacagcctgaacgtt

SEQ ID NO: 1042 - DNA, 2402 bp, Homo sapiens
agtgcgtccagagcggagggtgacgggagctgcctgtgctggaggaatcactttttaggcgcttgttttggaccattgcacaaacccgggtgcaaaccccaagctcaccagcgtgagtgagctgggccagcagcagggaggagaggggaaggtgggcgaggagggcgccgcgcaccccgaggcccgtgtgggcggtgggaagatcccgggggcggctttggacagccccggcagcgaccccttccccagcccgacaggtgagcgccaggccagccgcggggtggagcccgccgtgcccaccggccaccctccccggtgctaccaccaccgcgcagattatatctgggtgttggcacccagccactattctgccaatgaagtacatcctggtcacgggtggggtcatctcaggcattggtaaagggatcattgccagcagcattggaacgattctaaaatcatgtggactccgagttactgccataaaaatcgacccctatattaacatcgatgctggcactttttcaccttatgaacacggtgaagtcttcgtcttaaatgatggtggagaagttgatttagaccttggaaattatgaaagatttttggatattaatctttataaagacaacaatatcaccacggggaagatatatcagcatgtgatcaataaagagaggcgtggtgattacctggggaaaacagtgcaagttgtccctcacattactgatgctgtccaggagtgggttatgaatcaagccaaggtgccggtggatggtaataaggaagagccccaaatatgcgttattgagctgggaggcaccattggagacatcgaaggaatgccgtttgtggaggcgtttagacaattccagtttaaggcgaaaagagagaatttctgtaatatccacgttagccttgtcccacagctcagtgctaccggagaacaaaaaaccaaacccacccaaaacagcgtccgcgcactgaggggtttaggcctgtctccagatctgattgtctgccgaagttcaacgcccattgagatggccgtgaaggagaagatttctatgttttgtcacgtgaaccctgaacaggtcatatgtatccatgatgtttcttccacataccgagttcctgtgcttttagaggaacaaagcattgtgaaatattttaaggagagattgcacctgcccatcggtgattctgcaagtaatttgctttttaagtggagaaatatggctgacaggtatgaaaggttacagaaaatatgctccatagccctggttggcaaatacaccaagctcagagactgctacgcctctgtgttcaaagccctggaacactcagccctggccatcaaccacaagttgaatctgatgtacatagactccattgatctggagaagatcactgaaaccgaggaccctgtgaaatttcatgaagcttggcagaagctatgcaaagctgatggtattcttgtgcctgggggctttggaatcagaggaacattgggaaaactccaggcgatttcttgggcaaggacaaagaagattccttttctgggagtttgtcttgggatgcaactagcagtgatagagtttgcaagaaactgccttaacttgaaagatgctgattccacagagtttaggccaaatgccccagttcctctggtgattgatatgcccgagcacaaccctggcaatttgggaggaacaatgagactgggaataagaagaactgttttcaaaactgaaaattcaatattaaggaaactttatggtgatgttccttttatagaagaaagacacagacatcggttcgaggtaaaccctaacctgatcaaacaatttgagcagaatgacttaagttttgtaggtcaggatgttgatggagacaggatggaaatcattgaactggcaaatcatccttattttgttggtgtccagttccatcctgagttttcttctaggccgatgaagccttcccctccgtatctggggctgttacttgcagcaactgggaacctgaatgcctacttgcaacagggttgcaaactgtcttccagtgatagatacagtgatgccagtgatgacagcttttcagagccaaggatagctgagttggaaataagctgaaatgaatacatgactgggaataatggggactgcctgtgaggcctctgaaataattgaaggcaagatgaaggaactatctgaagaaatcactacactcttagagaatccctctgttctccagcaaacatgggatgtaaagcctcacagggaatctgataatacatacttctgtcaaccagaaccagaggggtagttttcttttccctccagaggcagcctttggtacttaaaatatctgtagctgattaaatttttcccaacaacctc

SEQ ID NO: 1043 - DNA, 3413 bp, Homo sapiens
ggaaaagccgcgagttcttggctacgtggcgcggttgttggcccggcgcggccagtgctactgggggcgtccctctctggccctcccagggacaagtgacttgatggtagattttgccaagcccctcacatgattctatgaaactcatgggagcgaggaacagctgctgcgcggaggtggcagtgtgtgtgctaaatccctttagttcctgctctgcttttcctccagaaagggatgagcgtctaacaggggccccggtctgaacccgcctgccaaagtgaggtttgctcacatccaacccctgacagctccagggtgctgttactgcgagcagggcaccggccctccggcccgaagcagggcagggacatgagggagaacgcgccctgtccctcccacctcctccggactcggcccctggaggggctgacgctggaagacctgacatcgtcgcttctgatgttcatggcttttgacccatgttcaggtttgaaatctcttacccagtttaagaacgggatgaactctcctcgtttaaaggagagaatgaagaacgctgaacgcaaatctccgtccttgtgcgcataaatctgaggcgacaggaagaatgtggaggcaaacctggctcttctcagtactgctggagccacccaccgctctgccattcaggaactctgcgcgggtgccaggtgccacgcgcggtgctgcccccgcactcccctcgagctgtgcgaactgtaggaaggagaagctggtggggtggagagcaacagggagagacccatgttcggggtcagacgggagcagctgcaggaagttctgggggaggggaagggggattatgaccagatggaaatgaaaggaaacgggagactgtattaataaactagcagctttattgcccttcaggggccatgtcttcacttgagatgtcgaattgcttgagggaggaaaacctgtaagaaatgatggagatcagggaacaggccttggggatcctggagcggggtcacagtgagcattcggtcagccggggagacagacgccacaaagctcagcaggggctcagtttctggcctctcttcgccaccactcagtcctttcagctcctgggtgacctgagcctcagtcgccagccaccctgctcttgtgccagcgccacctccagctccctccttggtttgctgctgcaagcgtctacgggctcgccgccgcccttgccacactcggtgccacaaggcacagcgccagctcgctgaggagggcagggatgcccccttccctgcctcaccctgagaccattcttgggctgcctcatgtcccttgggcccccgctctgccagggctgcgtggctgggctgcccctcttctccaggggctccatgctttccagtggtcaggggcaggtcccctggctgcccagggctctgcatggcccagtcctgcaccatctctccaacctctataaccatctcttctaccctgtcttccccaccgtcccctgcacatccctgctgctcctctttcccctcctcacagcagtttttctgtccatctactttgagtcttttgcttgtccctccctgagaggactccccagttccacctccttctgaccgcgttctcttggttgcctgttctatatggcaccccagtgcttccctgaatacctgcaccagggcagcagtgagctgggtgaagggtgcaaggggtaaagggatcggcgtagcagagagcagggagctgggggagctgggctgcagaagagggagcagcccccagtcccgaccccgggaggaacggcgctggtactggaggcttcggcagtaattggctgctgctcggcagcagttctgtaggcgcccagccacccggctggtcacattggctgcgacattgtgactcaggtcaaaagggtcctggagattcagggggccaaggcgcagaccctcccagagattagaaggcaggccccctgccacaggcagtgcctgaccctcccgcagggacagcagggagccacgaagatcccaacaagatacacaggagaagaactgggctagcagggaacctggaggaggaggaagagtggggaaaggggggtcacttagaggccagaactgatacaggtcctgcaccagagccatttccttagcaggactttttcccttccaaggggctcagcagagtcccaggaagctaggcttctctgatccctataaacaagaggtcaaacctctctccctgcccccacatgatgtccttgcccagatgctgctgctccttgctagccagtgtaaccttgggcaagtcacttaattgctcccaaacatggtttcttcatctgtaaaatggcagtaataatattaggtatctcacaggctttctgtgagaaccatgcctggcacacagttagtgtgatatatgttacctactgttgatgaacatcattactagtcctctaccaggctccccaaactcactgaggggctccacatttatgctgggctccagtcttgaggcatccctggggaaactgcagtcccagccatcgacttccacctgttccccctctcctgtgaaagtaaataaggtgagagtcagtctggaagcaaggagattgagggtgggggtagagagatctcattcacagagctgcttggtgtatctaagtgtgatgaagaagagagaggaaactaacaagatggagagggtggaggctaggccgagtacctgctttctgggtgagctgggacacagtgggcaacacaggagggtccctggtctgaagaaaatagatcaccagcaaggtcagggcgtagttactgagaagggggccactccctgggtaaataagcaataattccggttagatcagaggtgcttctaatcccctcactggcagttttctcaaccccggtgcccattctgacctcccttctctccctgaatccctgcctttgtcctgagaccaactcagccccaagtctgtcctgatccattctcacctgacagcccccgaccctgagcccagcagcggagggtgtacacgaggggccggactcgaccatccagctcagagcagagactcaggaaacgggagttatgcagggccagcctgggacaaagcagggacaagggtgttagcgcttggggatgtcagaacctaccacccccagctttcattccagacttgcataactggagccagctggaataaggccagaacagtttccccaaatgttgctcactgatcttgtgagacagtgtgcgaaaggacaaaggagttcgggaaacacttcatcctgtacgcccatcctggacattcacagcacattattataagactgttcatgagccatggtcacaccactgcactccagcctgggtgacagagcaacatcccatgtcag

SEQ ID NO: 1044 - DNA, 1921 bp, Homo sapiens
ttagatgtttttcatttttcaaaaagaaaaggctttaaaaattttcttgaaatgtgactgtcacttgttttcaaccaaaaactttttaagattttttaaaagaaaaatcgaaatcctgtccctcccccgcttcccatcgcctccggttttcaaaatgaaagcacaagtgcaagagtggggtgcacaggtgcctggcgtgtacacaccacccacacagctgcgtccagccctggctgagggagacgcagtgctgagcagtcagccccgggaggcctctttttcaacttccaatcccactgccatgaatgtgaattccttagggtgcttccaaaaacaggagtctgcctgatctgttggacattgcctttttggtagcccgaatatgaggaattcaggacaggaaagtgtctttttatcaagtagtcagagccggatgcttcccctctcccagtgggtggagcatcgcaacccccagccagagttgatcttttgacaacccagtgacatcccatgagaaggaagaaaaaaaattcaacactgcctctagattgttattttgtccaagagagagatcatggagagagtctctctcgctcacggaggctctgtctttctaggagtatgtgtgtgtgctgtctcatgtgtggacactcacagttgaggctgagatggatatcttggcagcagagctgctggtctaggtggcttttcagcttgacaagtaatgaagctccatttcaggacttcatcgattccgaaacaagcacagtcccccaccccccgccacggaactctactaatactaatcactataattagctaatttaaaagtacggtaatcagactgcttgcaactattttaaaagcccattaatttgaagcccactacttcagaacttcgagaaaatcacaacttaagacaattcacagtagctgtgattctggctacataaaaatatttgaaatattcttccctttagtcaatgttcagggtcttttgtgtaagagaaatccagtttaaaatgagtacccttttcaaagaaaaggctcaagatattaaggatcccttcaccgtgccttcagctttgcagttcagcacttctcgtatgtacagggtgatctcttgttctctctccatcacagggatgttggatattgcagcctttcactctactcctttatttatcctgtgaataacatagtttgtgaactagactgcaatttaaactaatacacatgatgtatctttctaaatattctgtaaagcagatgcttcgctgtcagactggccgctccatcattcgcctccaaatattcaaacgtgggagcttttcctttcagactgtgggcagcgagtctctctctagcaagaatttatctgacaaacatacccaaatagcacaccctctcaagctcaatgcctcaacagttgtttcactgtactgatatctgactgctgaacagtgcctgcccttcacccacccccagcccgagcattaacacagatcttcaggattgggacaaatcccccagctgcttttgcctctcaatccatctcccctcatcgataccaatttcccaggcctgaacacatctgttattttgctctgacattgtgaatttgtgacagtggaaaccctgatatgtgcaactgagcttatagaaataattactgtgaaatggattaattttgataccactttaaactgtgcttgtattcatgtgttgacccttgtcagctgggaaatctgtacattcagtatatgtcagcatttcattggagcctgggggcaacagacaaacttgcttctgatttctctctctctctctttctttttataattgttgaatttggctgttacattttgtcttcttctttacaagaaaacaataataataaagagcaaatggcatccacttg

SEQ ID NO: 1045 - DNA, 1862 bp, Homo sapiens
ccagcgcatggaggaggaggccatgaacggcgaccggactgagagcgactggcaggggctggtgagcgagtacctggtgtgtaagaggaagctggagagtaagaaggaagccctgctgatcctctccaaggagctggacacctgtcaacaggaaagggaccagtacaaactcatggccaatcagctccgggagcgccaccagtcactgaagaagaagtaccgagagctgattgatggagatccatcacttcctcctgaaaaaaaggaaacaggctaatcttgcacaactattgagagattctcaggaccgaaataaacatctgggagaagaaattaaagaacttcagcaaaggcttggagaagtccagggcgacaacaagctcttgaggatgacgattgccaaacaaaggctcggagacgaagcaatcggcgtgcgacactttgcagcccatgagcgtgaagacttggtgcagcagctagagcgagctaaggaacagattgagtctctggagcacgacctgcaggcttctgtggacgagcttcaggatgttaaagaagaacggtcttcctaccaggacaaagtggagaggctcaaccaggagctgaaccatatcctgagtgggcacgagaaccgcatcattgacgtggacgccctgtgtatggagaacaggtaccttcaagagagattaaagcaactccatgaagaggtcaacctcttgaaatcaaacattgccaaatacaagaatgctctggagagacggaaaaactcgaagggccagggtaaatccagcagcagtgctctgacaggagtcctgtctgcaaagcaagttcaggatctgctatctgaggatcatggatgcagcctcccagctactccgcagtccatttctgacctgaaatctctggcaacagccctgttggaaacaatccacgagaaaaacatggtcattcagcaccagaggcaaaccaacaaaatcctagggaatcgggtggctgagctggaaaaaaaattaagaactctggaagtttctggtttgtggagtcttccagggggcaaggacaccatactgttcagcgaccccactcttcctagtggacagaggtcgagatccccactgctgaagtttgtcgagcagcccactgagaacaaagcagatcccaaggatggggaggctcagaagcaagaagaagatgaaagttgtgccgctgctgaggcgttgacagcgcctgaggatgctgggaggcccgctgtcaactccccagcaaatcagagccgcgggaaccaatgcaagctctttcatccttcattaccccagttaccttctgaggaagaagtaaacagccttgggagggaaataattaaactgacaaaggaacaggcagctgcagaactggaagaggtcagaagagagagtcccatagaaggtcagaggagtgagacggggccagccccgccaggcctggccatccagggggagctccctaaatctcacctggactccttcgaggccagccggccagcagccaaagcttccacaccggaagacggcaaagggatcccagagggcggaggcatgaggagcaccgtgaaaacctgaaggggagagggatctgacacaatgacacattgaaagccccagagagggtcaagaatgaagcatcggaatggtgcgctcacgtcgccttctcctgaaatacctccgagtctgcaagtgagaaaacgcgctgatcctgttgcaaactgtgaatattctgatgatgccagtacagtttgatttattaaatgtaggtcctcaaaaaaaaaaaaaaaaaaaaaaaaaaaaaaaaaaaaaaaaaaaaaaaaaaaaaaaaaaaagagaaag

SEQ ID NO: 1046 - DNA, 2342 bp, Homo sapiens
agagaaacttccgcaatgttctgggctgcgaacgaaaaccaccacagcgtcagaaaggagcgggtttgctgagggccccagaaggctccttccaccgtatcatagtctaataaataattttgtcaagccagagaagctaacaaaggtagagacaaggcttaaagaaaagatagtggcggaaatgacggatctgaacaagcatataaaacaagctcaaacccagcggaaacagctactggaggaatccagggagctacaccgagaaaagttacttgtccaggctgaaaacagattctttctggaatacctgactaacaaaactgaagagtacacagagcaacctgagaaggtatggaacagctatttacaaaaaagtggagagattgaacgaagaagacaagaatcagcctccagatatgcagaacaaatttcagtgcttaaaacagcgctcttgcaaaaggaaaatatccaatccagtttgaagcggaagttgcaggcaatgagggacattgctatattaaaggaaaagcaggagaaagaaatacagacattacaggaggagacaaagaaagtccaagctgagacagcttcaaagacacgggaagtacaggcccagctcctccaggagaaaagattactggagaaacaactgagcgagccagacaggaggctactgggaaagagaaaaagaagagagcttaatatgaaggcccaggccttgaagttggcagcaaagcggtttatttttgaatactcctgtggcatcaacagagagaaccagcagttcaagaaggaattactgcagctaattgagcaagcccagaaactaacggctactcaaagccacttagaaaacaggaagcagcagctgcagcaggaacagtggtatctggagtccttaatccaggcgaggcagagactgcaaggaagtcataatcagtgcctaaatagacaggatgttccaaagaccacacccagtcttccccaaggcaccaaatcaaggattaatccaaagtaacttctaaaataacactgattaaataagaactggagcaagtactcttaagtgctacattaacctggttagaaaggctgttggattccagattgctattgtaaaatctccatcatgatgtgttggagtgaaggattagatggttttatccaacagtcctactagatatttggtaaccagcttcccttaactagctttttctttaaatactcgttaataagctattccacaaacctccagttaacctaacacatgaccctaacctagccatttaccatacatcaaactagctaaaggaaaccaacctaaggaagtgaaaacagttgtgatttatttcatctagctaaattgtatttctttatagagaaagtacctttaaggatagcattccaaatagactttgaatagcgttctgccagtttatcctcattccttttgaccaacttagcagacaaaagcagtttttacaagctctttgtgagtttgtgccagtgaccaggtagctccttctagttttctcatgagtgaaaaagcattctgataacagcaagtccagtaagtgctaggcagagtgacctttcatctgatgctaagcccctacaagtttgagaaggtaagaaaagatgaaggagacatatattaggtcagctcttacttttgaaaatgttttatttgaagaaacacctgtagcattgaggtgactgaatgcctccacttatttcaggaaaacgtatccaaaaaaagttgaaatatttggacaactttttttttaagtgccatcgatttccctagcagcattctaaaagatagcaagtaaaatgatgtttgttatcctaaatgctttagttttaggtcatttattaattttcttacaggtgcactttctagtacatgaagtatcctttgtaattaatgtgtgccatatgtttattcccatttagtataactataaattatattttaaattatatatttttaggatagttatattttttttgggttctacgacattgaagttggactagtgatttatttgaatgctgaatcctagtataggggaatataatcttatattttaacaggggtcctctatgggaaaataggatgaactttgtttcccagaaattgttaagtgatgaaaaacttcaaaataattttcctgcattttctgctttatttacatgtaaagtgaattccctgaaaattggatttaaaaagcattctccttcaatgtgcctttaccttgtaactttaacaacttttctgttaaatatgtagttttttattaaacaatgttattaaataaaaacatttatccactgatttt

SEQ ID NO: 1047 - DNA, 3740 bp, Homo sapiens
actaccatttactgcaagggagccagcgcagcatcctctcagctttgctggcctcagcagtgagttgaagctcggcttggccagcctgggagagcagggacggcagggcctgtggatgggacgcatcacaggaaatgaagacattgccaggacctcccagccgagaaaatatgaacaagatgcctcgtgccgctgatgaactccccgctcttagggcctcgagggaaggcaggaagatgggccgctagcccgggcactcccatgcttgttctcagctgcgcttcacccccggagtgtgggaagtccctggctgccgtggtcagaaattgccataacatgccctggctcccgtggtcagaaattgcccattcaataggcagagaggcatgggagcgatatggaaagggctctgggttccagcccagctgcgcagtcaaccatgagacctggggtgtctgttcacctttgtgggccttggttttgttgcctatgcaatgagattgttgggcttctggactccccacgtgtcttccatctaattctaatttctgaggaaggaaatggaaaagtttaccaatatgatgagaatcttatagcccaacaactgagatctcgaatccaacaggaccgcttcttccgaagacagtaaaaggcccacagacatcagtgagaagtctcttcaaaaccattctggagtttccctcaggctccagggcgaggtgaaaactgatggaaagttcagactgagaaggcagtacagcatctcctccagccctactgccagagaacctgtcctaaagtgtggataacagatgcccttgatggcgcctggcactccttcatcagccccaatcttaggccaaggtggacagaggataactccgcaaagcataattctgcagaagataactgacagccacaacagctactagcatctgggagcatgcactattacctgggaaggacatcctttttgacagagggacacaggattaacatgagagatgtatcggttatccatcatgtaaccacttactacaaacacaaaagttttttctgttgttttgtttttgagacagagtttcactcttgttgcccaggctggagtgcaatggcgtgatcttggctcactgcaacctccacctcccaggttcaagcgattctcccatctcagcctcctgagtagctggaattacaggcgtgcgccaccatgcccggctaattctgtatttttagtagagacggggttttgccttgttggccaggctgatcttgaactcctgacctcaggtgatcagcgcccctcggcctcccaaagtgctgggattacaggcatgagacaccgtgcccagcaaacacagaagtttaaagcagcatacgcttataatctcatgggttctctgagtcacgaatttagatacagctttgttagggtcctctggttcaggatttctcataaggctgtgatcaagttgctggccaggaccggagtctcatctgaggttcaaatggaggaggattcacttctacagagaactgatggtgggactcagttccttgaggtcggtcagacagcagcagccctctgttccttgccatgtgggcctctccgatatgaccacctgctttgtgaaagtgtgcaaagctcaagggcaacagagagggcctgctagcaagagggaagtcacaatcttatgtcacacaagcagaaatgtgacagcctatcatctttgtcgtattgcatttgttagaagttaggtcacaagtcccacccacactcgaggggcagggactacacaggctgtggatacaaggagatggggaccattgggagtcatcttagaggctgcctgccagagaggaggcagaaagaggccacccactgagccttgagcagaatcagccctggaaagcaacgcagggacaagtgtcccagccagaccagctttcatccaaaaggttatgtgtcctgcaggttagaaccagaggagcggcatctcaggatgagatgatgccacactgcacacgctgacagcctgggagaatagtgtcagaagagggaaccggtggcagggtgtgtagtggtgattgtgtgctggccgtgtgtgttctcaaaagaaaggaaaggacctggtcaccatttgagggttatgatataaattggggaagggatgatcagcccacccttcactcccctgccaagtcactatatgcctttttcaggaaagacccaccctgccatcccctagccaggaatcagccccacctatatccactgtagtgttgagatatggaattgtccagtggggtagaggtagggaactccaggcataatcggaattcaatgtgtccttcagagatgtccttgttctttgcctcctctgagctccccctcctcaggcagcttcaatgacaaagctgtaaagcactctccctctcctcctctttttaaaacacaatttttatttttaaatatactatatctgttaaggagagggggcaaagttttctgtctttgtaatacccattcaggagtttaatgggttaggagattggttttaactgtgagaaatcatctacctcttgtgctcaagtgatcctcccgcctcagcctcccgagtagctgagactacaggcacatgccaccacaccccggtaattttttaattttttgtagagatggggtctccctttgttgcccaggcaggtcttgaacttccgggctcaagcgatcctcctgcttcggcctccctaagtgctgggatgacaggtgcgagccaccgtgtctggcctactaagcatttctgaaggctatagtttaacatttggtttcaaaaagaaaggaagctttcatttaaaaaataatttactgaattacattctttcataacttccaccctaattagtcacaaagataattctaaagattctttgttttgtgtactaacatttttcttttttgagtcagggtggcactctgttgcccaggttaaaggatggtagtgcagtcatggctcactgcagcctcaacctcctggactcaagcaatcctcccacctcagcctcccaagtagccgggactactggcacatgccaccatgcctgactaattttttgcggaaatggggtctccctatgttgtccaggctaatctcgaactcctgagctcaagtaatcctagcactttgggaggccaaggcgggcagattacttgaacccatgagttcgagaccagcctgggcaacatggtgaaaccttctgtctacaaaaatacagaaaactagctagatgtggtggcacatacctgtagtctcagctacttgggaaactgaggtggaaggatcacctgagtctgggaggtcaaggctgcagtgagctgagattgcaccattgcactccagcctgggcgacagagtgagaccttgtctcaaaaaaaaaaaagacatcactcatataagatttagaaaaatcagagtgacctcaggccaaggcaccacccagtgtggtgagaatgacattcgataatggagagagagtgtgtgtatgtatgtgtacatacgtgtgtatgttatgtacagatatctctctgtataaatagccatgttcagccccttaaaagcctgtaaatatgatgttgtgctccatattcactatttgaaacttcaaatacacaggccatgcagaggagagtttcttgtgtatccctgtttgtcaccaccaataaaattgtgaagttttcc

SEQ ID NO: 1048 - DNA, 3972 bp, Homo sapiens
attaagagcatgctactctgtacttcgctgctgcagaagagagagtgatatttgtgttactacagcatgttgtaaatgtgtgagattttgctcatctcagcttggaaataagaatagggaaaggagagcaacttgaatcagaagctactagaagaacctgcagagttctgaagcagtttatattcttcttacattttgccttctcctagctggaaagcagagggactggaatttttgaaacgggcttttcccataatggcattcttgatttgtgtggccagagcttgcacaggaggaaagcaggctgctgaatttagtcactgatctctattagcggtagcctaaggctatgctgaggtttatatcccatttgtattgttgcagctcaaaagaagattgttcagaggatgacaagtgtattctgagtaggtatgttgttgtttcattttcatatgaaacccatctatgttttttcttgctactattggtcagaaatcaggttaataggtgcagaatatagtacagtgctgcagtatccctgttaaggtagaacaatggtattgcaagcttaaaaaaaaaaagcctggctgcttttattaaataaagctgcattgtatggtatgcacagtgcagtcctaaaaaaatatactgcagtcaacgcttttctggcactattgttgagttggaatgattgaatcatcatattgctttaggggacagaagaatttaaggaggtaccttacagccctattttacagattggaagcatcggtttaagggcactggcagaatcctttgcttgttctccgcggcagccactgctgtgtcagtacagtgtggaatggaagtcttagttggtagtctgttatggaaacgctctttactgttattgtagtaccgtggtgacaacatgccattgaaatggaaaacgagctctcctgctatctggagattcccagttcctgtgcctaaaacatccaggtcaactccactttctccagcatacatatctctcgtggaagaggaagaccaacacatgaaattgtcccttggaggcagcgaaatgggcctctcatcccatttgcagtcttccaaggcaggacctacacgcatctttaccagcaatacccacagttctgtggtgttacagggctttgaccagcttcgacttgaaggattgctttgtgatgtgaccctgatgccaggtgacacagatgatgctttccctgtgcatagagtcatgatggcatctgctagtgattacttcaaggctatgttcacaggtggaatgaaagaacaagatttaatgtgcattaaacttcatggtgtgagcaaagtcggtctaaggaaaattattgatttcatttatactgcaaagctttctcttaatatggacaaccttcaagacacgctggaagctgccagtttcctacagattctgccagttttggacttctgtaaagtgtttctcatatctggggtcactttagacaactgtgttgaagttggacggattgccaacacctacaatctaaccgaagtggataaatacgttaacagtttcgtcttgaagaattttcctgcattgctgagcacaggggagttcttgaaactcccttttgagcgtcttgccttcgtgctttccagtaatagccttaagcactgtactgaacttgagctctttaaggctacctgtcgttggcttcgcctggaagagcctcggatggactttgctgcaaaattaatgaagaacatacgatttccactgatgacaccacaggagctcattaattacgtgcaaacggtggatttcatgagaactgacaatacttgtgtgaatttgcttttggaagccagcaattaccaaatgatgccatatatgcagccagttatgcagtcagacaggactgccattaggtctgacaccactcacttggttacactaggaggagtgctgaggcagcggctggttgtcagtaaggaattgcgcatgtatgatgaaaaggcccatgagtggaaatcgttagcccccatggatgccccaaggtaccagcatggcatcgccgtcattggaaattttctctatgtggttggcggacagagtaattatgatacaaaaggaaaaacggcagttgatacagtcttcagatttgatcctcgatacaataaatggatgcaagttgcatctttaaatgaaaagcgcaccttcttccacctaagtgccctcaaaggatatctgtatgcagttggtgggcgaaatgcagcaggtgaactgcccacagtagaatgttacaatccaagaacaaatgaatggacctatgttgccaaaatgagtgagccccactatggccatgctggaactgtgtatggaggagtgatgtatatttcaggaggaattactcatgatactttccaaaaggagctcatgtgctttgaccctgatactgacaaatggatccagaaggcgccaatgaccactgtcagaggtctgcattgcatgtgtacagtgggagaaaggctctatgtcattggtggcaatcacttcagaggaacaagtgattatgatgatgtcctaagctgtgaatactattcacctatccttgaccagtggaccccaattgctgccatgttaagagggcagagtgatgttggggtcgctgtcttcgaaaataaaatctatgtggttggggggtattcttggaataatcgttgtatggtagagatagtgcagaaatatgatccagataaagatgaatggcataaggtttttgatctgccagaatcccttggtggcattcgtgcttgcacactcacagtttttccaccagaagaaaccacaccatcaccttctagagagtcccctctttctgcaccttaagatcatctctacaactaagatgctgtagttctatctttgcaatgtgtcataaattctcttctttttcccccttaagtagtatatatgttaggattaccctctggtaattgatacagatattggaaaaaagacaacattgatgttatttgtgctctttgtttggcctagaatgtttataaagtggtaacacaaccattctggaaatgtatcccatagaagctgatgtttaacatatgaaaaaaaaagtattgtctataaaatgtttcttcagtactttttaaatgctgtgtattgggtgtaaggtatttgtcatcttacattagtaaacccaataagccaagttgaaggtggattatagtaaatgtacaactgtgctcactaggcttcaagtaaaaagttttcctttcatctttgactgtaagatgtcaaagggaggcagcctgcttgaacaggaaacaatacacaaaaggttgccaactcgcatgagctacctccctcttttcataaagtatttttgacatatctgtcaacccacttgactgtgtgggtgcattgagaacacaaagtttcctagacacacaggagaagtagcttaaattcactaatattaatttaaaaagcagcatgaaccctctacttataaacaagggtttggtgtttttaaagtgtgtatacatacatacacatacacacatgcacatatgtcaaatataatttttttaaaaattgagtggcacatcaaagaaatgtgaaattaaaaagaattcttccaagaagcagcttccattaaaatgggaattcagtatgcacatactgaatgcatatatgtagaaccatacagaatttaggtggataagggctagaaattttgagcaacaaaatttgtcacttgaccagattttatcttcaaaaactgtattctactccttctcctttgctgttgaggtaacttgcatattatatgtattctgtatactcagttcataaggttatttagcacaaagtatagcagcttcacctggagagctgcttttgctcagtaaattcaacttccatgttttatctttttttgttcaataaaaacatttaatgtc

SEQ ID NO: 1049 - DNA, 4967 bp, Homo sapiens
aattgtaaggactctgcattgctccatttctttttaaaaatttttcttcaagaaggattatatattgctcatttctgtctccaccccagaagtcagccttttctgaggtccagtccttgcacctctgttctctcccaccctcacttcctcgcccccttttccctagaaatccccttacttggacagctttgcctcttacctgcattttaatccttgcagcctcctaagcatcggttccctttgatgaacagcactcaccttaaactcaaaaagcaaaccagtcctcttcccactccaactgtcccttttctcccttcttgtctcccttatatcacctttctccaagtgattcaggtcttaaccttggaacccttttctccttcctctcttccatccagtgcctgggttctgtccatttcgccctaggctctgtcatcctctcttcccctggcccactctgctccatgctctcacggccttggcgtgaacttgggataagatgtaaattcccagactcacaattcctgatcttttctcagctgattgcccctcacaaagatgtgtttgtccgtttttcagcctgtttaatctctgtccgtctcatgagaccccctccaacctcatttcctttgagaagccttctctgacagctgaagccaatggcaaacactttgcctcttgaattgtgccagcatttatggtctacaccagaagtcgcaaacagccatatctcattaaaaattgttaaaagttggttgtcatcatgtgaaaaccagatggtttgatgtaacaattctgatttctggcttctcctgaaagttgagaacatctggcaacactggctttgctttcccacgtggcagtgttggtttggtgcagaggagtggttatcgcctgtcggcagatcgtgcactcccagcaggatttgtgcccctgtgctacctatccgactcctctggacaattgcatttgcaacccttgtctataccatcgatctgccatgacttagcaaatatgtcttgtcttgttattgactgttctgtgtttacatgtgtgtcttatattcccttcacaattcaattgccctcttcctgagggtagggagtctctgttaactttacatgcctcctgcagtacctgacacatagtaggtctgttgtttgagaggccagtgcctgaggtggaatttgccttatgacttgcttctaggtcagtggttctcacttgcaccctctgtcaacattataccaggcttgggggtggggtacactctgtccagtgtttactagaaagttccagcagaggtttgaagcatgcccaccccttagcattacagggttgggcttgtggtgaaggcaatggcgggtgtcatttgcagaacccccctgggtgattccagggcatcccctagtggaaggctcacgtggccattttcagcctgtgttgtaacttattgctttagataaaagggacaaagtatttcaggtaagatttgacctctgggaaggtccagacccccagatgcgttttctattggaaattccccagctggggccgggccagagacgaggagggctccccacaattctgagagtggctggtggcctgcacctcatttttgtcccccaccttcctttccctcacccctttcttcagtctttacctcttgctctttccatccatttttacctttccacaagctctcggttctatggatttgtgggattttatttttcttccttccccatgtgcaaatctacccctgctgtgacatgggagagagtgtaagaggacacaccagagtacatactgccttcttccaacccagctttctaacagcagagctgctgagggaccaatggccagtaaaggtgcagagaaggacatgaacccttcctgttgttggaaagatttaagtgtttctccctggagcagttttcacaactggtttgccctcctttgcttctgcgagctgctcagatagcactagatctctgcagcttgcacaggcaggccaaattcaaccagatacttcttattctaattcatatgtccgttctctaaattcttctttctattttactgcttcattgtatttgtgctaagctgcctcataacctgaagataatctaaaatatggctttcctgccatcagcatagccttcagctgctttagggctgcagatgctgcatttctttccactcagaatttttcggaactgtttggggatgcggtgttctgaagcactgcatgccgcggagatgtcgcatctgatggagagtaactgcaacgtggagagttcacgttggccatctccagtcttgtatgacagatgcttaacttgtgtttgaaattttcagagatcatttccatttttgcatagcaaagaatctatttcttgtcctctagctagaaggctttgcatggctagaataaatttcttttcaacgaaacggtatgctctggcaaatcttccttttggttcaaggcagcccactaaacccgctggcgtgtgttgatgaagtgtggtgcaggtgcagcgtgccactgcagcttctgggcagcctgagttggtgccatctaggtacgctcaggcttctgttccacaagtaaccgccccagcctggtccatagtttgctgctccagtagatggcaaataacaaaagcaaatagaacagatgtatcccctcttgcacagcctcacctaccagtcggctagaaaagcccattgggtagttggggagaaaatagcttggtaatgccgtgagtttgttgggtgtctaactgaacaatttgctgctctagataagtgggcggaaaaaccagcctttgggactcccctagaagaacacctgaagaggagcgggcgcgagattgcgctgcccattgaagcctgtgtcatgctgcttctggagacaggcatgaaggaggagggccttttccgaattggggctggggcctccaagttaaagaagctgaaagctgctttggactgttctacttctcacctggatgagttctattcagacccccatgctgtagcaggtgctttaaaatcctatttacgggaattgcctgaacctttgatgacttttaatctgtatgaagaatggacacaagttgcaagtgtgcaggatcaagacaaaaaacttcaagacttgtggagaacatgtcagaagttgccaccacaaaattttgttaactttagatatttgatcaagttccttgcaaagcttgctcagaccagcgatgtgaataaaatgactcccagcaacattgcgattgtgttaggccctaacttgttatgggccagaaatgaagggacacttgctgaaatggcagcagccacatccgtccatgtggttgcagtgattgaacccatcattcagcatgccgactggttcttccctgaagaggtggaatttaatgtatcagaagcatttgtacctctcaccaccccgagttctaatcactcattccacactggaaacgactctgactcggggaccctggagaggaagcggcctgctagcatggcggtgatggaaggagacttggtgaagaaggaaagctttggtgtgaagcttatggacttccaggcccaccggcggggtggcactctaaatagaaagcacatatcccccgctttccagccgccacttccgcccacagatggcagcaccgtggtgcccgctggcccagagccccctccccagagctctagggctgaaagcagctctgggggtgggactgtcccctcttccgcgggcatactggagcaggggccgagcccaggcgacggctgtcctcccaaaccgaaggaccctgtatctgcagctgtgccagcaccagggagaaacaacagtcagatagcatctggccaaaatcagccccaggcagctgctggctcccaccagctctccatgggccaacctcacaatgctgcagggcccagcccgcatacactgcgccgagctgttaaaaaacccgctccagcacccccgaaaccgggcaacccacctcctggccaccccgggggccagagttcttcaggaacatctcagcatccacccagtctgtcaccaaagccacccacccgaagcccctctcctcccacccagcacacgggccagcctccaggccagccctccgccccctcccagctctcagcaccccggaggtactccagcagcttgtctccaatccaagctcccaatcacccaccgccgcagccccctacgcaggccacgccactgatgcacaccaaacccaatagccagggccctcccaaccccatggcattgcccagtgagcatggacttgagcagccatctcacacccctccccagactccaacgccccccagtactccgcccctaggaaaacagaaccccagtctgccagctcctcagaccctggcagggggtaaccctgaaactgcacagccacatgctggaaccttaccgagaccgagaccagtaccaaagccaaggaaccggcccagcgtgcccccacccccccaacctcctggtgtccactcagctggggacagcagcctcaccaacacagcaccaacagcttccaagatagtaacagactccaattccagggtttcagaaccgcatcgcagcatctttcctgaaatgcactcagactcagccagcaaagacgtgcctggccgcatcctgctggatatagacaatgataccgagagcactgccctgtgaagaaagccctttcccagccctccaccacttccaccctggcgagtggagcaggggcaggcgaacctctttctttgcagaccgaacagtgaaaagctttcagtggaggacaaaggagggcctcactgtgcgggacctggccttctgcacggcccaaggagaacctggaggccaccactaaagctgaatgacctgtgtcttgaagaagttggctttctttacatgggaaggaaatcatgcc

SEQ ID NO: 1050 - DNA, 2336 bp, Homo sapiens
agcagcggcgcggggtgggtggggcgggagtgccgggcctccgccccctccgcctgcctttccttcctccctccctcggtccccggggccggcggacccgcgggcaggcactgcccgggctgggcgacgtctggccggctcccggcgaagggcagcggaggagcggcccagagcgcgcagctagggcactggcgaaaccccgggacagtccctctccgtgcgggggcggcgcagagcagtcccatccccggggtcccgggcgcggctgactgccggctggttccctgcgcgcagtagctccccgagccgggctgcaccggaggcggcgagatggtcgcgcgcgtcggcctcctgctgcgcgccctgcagctgctactgtggggccacctggacgcccagcccgcggagcgcggaggccaggagctgcgcaaggaggcggaggcattcctagagaagtacggatacctcaatgaacaggtccccaaagctcccacctccactcgattcagcgatgccatcagagcgtttcagtgggtgtcccagctacctgtcagcggcgtgttggaccgcgccaccctgcgccagatgactcgtccccgctgcggggttacagataccaacagttatgcggcctgggctgagaggatcagtgacttgtttgctagacaccggaccaaaatgaggcgtaagaaacgctttgcaaagcaaggtaacaaatggtacaagcagcacctctcttaccgcctggtgaactggcctgagcatctgccggagccggcggttcggggcgccgtgcgcgccgccttccagttgtggagcaacgtctcagcgctggagttctgggaggccccagccacaggccccgctgacatccggctcaccttcttccaaggggaccacaacgatgggctgggcaatgcctttgatggcccagggggcgccctggcgcacgccttcctgccccgccgcggcgaagcgcacttcgaccaagatgagcgctggtccctgagccgccgccgcgggcgcaacctgttcgtggtgctggcgcacgagatcggtcacacgcttggcctcacccactcgcccgcgccgcgcgcgctcatggcgccctactacaagaggctgggccgcgacgcgctgctcagctgggacgacgtgctggccgtgcagagcctgtatgggaagcccctagggggctcagtggccgtccagctcccaggaaagctgttcactgactttgagacctgggactcctacagcccccaaggaaggcgccctgaaacgcagggccctaaatactgccactcttccttcgatgccatcactgtagggagccatttctgggaggtggcagctgatggcaacgtctcagagccccgtccactgcaggaaagatgggtcgggctgccccccaacattgaggctgcggcagtgtcattgaatgatggagatttctacttcttcaaagggggtcgatgctggaggttccggggccccaagccagtgtggggtctcccacagctgtgccgggcagggggcctgccccgccatcctgacgccgccctcttcttccctcctctgcgccgcctcatcctcttcaagggtgcccgctactacgtgctggcccgagggggactgcaagtggagccctactacccccgaagtctgcaggactggggaggcatccctgaggaggtcagcggcgccctgccgaggcccgatggctccatcatcttcttccgagatgaccgctactggcgcctcgaccaggccaaactgcaggcaaccacctcgggccgctgggccaccgagctgccctggatgggctgctggcatgccaactcggggagcgccctgttctgaaggcacctcctcacctcagaaactggtggtgctctcagggcaaaatcatgttccccacccccggggcagaacccctcttagaagcctctgagtccctctgcagaagaccgggcagcaaagcctccatctggaagtctgtctgcctttgttccttgaagaatgcagcattgtctttgtctgtccccaccacatggaggtgggggtgggatcaatcttaggaaaagcaaaaaagggtcccagatcccttggccctttcctccgaggacttctatcctccccaggcctttgtttcttcggctaaagcctgaggacaaagttctgggagatcggcattgactatgtaagtaacaacaacggcctaaagaagcaacaagaaaggaaccgagtgcctggagaacttcatggagcagagccacttgcctactttggatcatctgtctctaagagagggaaataaacatttcttttgtgtg

SEQ ID NO: 1051 - DNA, 2745 bp, Homo sapiens
aggacagccggcgcgcggccgtgcccacaagttgccggcagctgagcgccgcgcctcctcctgctcgcagccccctacgcccacccggcggcggtggccagcgccaggacgcacatcccgcggacaccgaccccagatgtaaagcgggaccccagcccctcgccccccggcgcgatcgacagtctcgccagcgtctcctctgccaaaacccagggctggaagatgtggcagccggccacggagcgcctgcaggagagatttgcagacacagaagcggcacagagaaggccattgtgaagatcaaggcagaaaccggagttatggcatcataagccaaggaatgccaaggattgctggcaaccacctgatgttagaagagtcgaggacatgttcttctccagagcttttggatggtgtgtggccctgccaacctttacattttggacttccagcctccgaaatgcactttcagaccatgctgaagtctaaattgaatgtcttaacactgaaaaaggaacctctcccagcggtcatcttccatgagccggaggccattgagctgtgcacgaccacaccgctgatgaagacaaggactcacagtggctgcaaggttacctacctgggcaaagtctccaccactggcatgcagtttttgtcaggctgcacagaaaagccagtcattgagctctggaagaagcacacgctagcccgagaggatgtctttccggccaatgccctcctggaaatccggccattccaagtttggctccatcatctcgaccacaaaggggaggccacagtgcacatggataccttccaggtggcccgcatcgcctactgcaccgccgaccacaacgtgagccccaacatcttcgcctgggtctacagggagatcaatgatgacctgtcctaccagatggactgccacgccgtggagtgcgagagcaagctcgaggccaagaaactggcccacgccatgatggaggccttcaggaagactttccacagtatgaagagcgacgggcggatccacagcaacagctcctccgaagaggtttcccaggaattggaatccgatgatggctgaatgaacttgagacgcttcagcaaaggcagcattggtcacggagttcaagggaatagatgagtaagcaacgtttcaaatttgggatgaaaagactgccaaactattggctgaccaaggtttttaaattcagaagagcaattctaaatctaaagaaatgtatcattaaagtaattacgttacattgaaacctgctgctgctgtgactgtgaggagggtgggagtgtggatggggaggaaggttctaggctctcttatttttctcatttcccaatgcctctctgtgggagagctccatgccagttttcaccacgctcaggcaaatactctgcagctgttattggatgggccattccgatctgccttatgaaattccacaagaatgttaggggcacctatgggatctctagtggggtgggcagggtgctgatggggacgctggccgcagggaggaaggaacatctcgggagggccctctgttcctctcccacggcagatgccctcctctgtatgcaaatcagcacagcctttattgagctttacaactaacaacctgatagttggcagttaattcacagttacagataatgcttttatttacataaatataccaagtagtaccctcttattgtattcacttcatctattttcttagaatacttgcaattactaatgaccccttccctttccctcctgctgccctgtccaccctctttccccttctaacatccttagagggatgaaatctcagcatatgttgcaggacaccaaaaggaagaaaacaatcaagcaaataaaataaacagtcaaacaaaccaggagtttaaaacaacaaccccaacaacagaagccttggcaaagaggaataagtgatcagcaagtgaacacactctatgtcaactctccttttatccagctgagatttatggtaacttatttaattaatggtcctgtctgatgcatccttgatggcaagcttcaaatctgatttgctatcaccgaggaaaccttgcccccatcactcagcattgcacttagatacagaatgagttagataaacttggcttgtctagagacccatgtcatcttaacctaaagggaaatcttattgcgttatcataaaattgatgatatcttagggtcagaattgccctttttttttattttgaatgggaagttctcactaaaacaatcctgagatttcttaatttcatggttctttaaatattataaacacagagtcaacatagaatgaaattgtatttgttaaaatacacacattggaggacaagagcagatgactacttttcgaagtaatgctgctccttcctaaaagtctgttttcaatcctggtaatattaggggcactgcggcacctaagaagccttaaatgagagctaatccaatctagagagcgatggtgtcagcatttcggtctgcatatctgtgtgtccgtatctgcgtttgtgtgcgtgtacgtgtgcccctgtgtgtgggcccagttttcaggcatgtagaataagcatggagtcatattgaggaggactcacttcttgaagatatgcttgttgctttacaacatatgtaagctattctttagcataaatgcattcattctttaataaaaatatgtttgcattaataaagctgaggagtttcat

SEQ ID NO: 1052 - DNA, 2955 bp, Homo sapiens
aggaaggcaagtccctggataagaatgacaagatgatcattccaaaaggaaagcagtcaagacagtgcaggaggtgaggccatcttataggaagagcagttgtccagcctctgggagaaaaagctcagtggagatctgacagccttcctgggggatattaacagggctcctgtgttgcagaggaacactactttctcagtgtagctctgagaaagagaaccagaaaaaggatttctcttcagtagaaaaggcaaataccataaagaaggaatcgctgtaacttattgcttgaatggatactaatgatgaccctgatgaagaccatcttacaagttatgatattcagctaagtattcaagaatccattgaagccagcaagactgcactttgtcctgaaagatttgtacccctaagtgctcaaaacagaaaacttgtggaggccataaaacaaggtcacattcttgagctccaggagtatgtaaaatataaatatgcaatggatgaagctgatgaaaaaggatggtttccattgcatgaagctgttgttcaacccattcaacaaatacttgagattgttctggatgcatcctataagacactctgggaattcaagacctgtgatggagaaacacccttgactttggcagtcaaagctggtctggtggaaaatgtaagaactttattagaaaagggagtgtggcccaacacaaaaaatgataaaggagagaccccccttctgattgctgtgaaaaagggctcctatgacatggtgtcgactctgatcaaacataacactagcctagaccagccctgtgtcaagcgatggtcagcaatgcatgaagcagccaagcaaggccgaaaagatatcgtagctctgctgctgaaacatggaggcaatgtccacctgagagatggatttggagttacaccactaggcgtcgctgccgagtatggtcactgtgacgtgttagaacatctaatccacaaaggtggtgatgtgcttgctttggcggatgatggggcgtcggtgctgtttgaggcagcaggaggtggcaatcccgactgcatttccctcctgctggaatatggaggaagcggaaatgtacctaaccgagcaggacatcttcctatacaccgagctgcctatgaggggcattatcttgcactgaaatatcttatcccagtaacatctaaaaatgcaattcggaaaagtgggctaacaccaattcactcagcagcagatggacaaaatgcacagtgtctagaactgctcattgaaaatggttttgatgtcaacactctacttgctgaccacatttcccagagctgtgacgatgagaggaagactgcgctgtattttgccgtttctaataatgacgttcattgcacagaagtccttctggctgcaggtgcagacccaaacttagatcccctcaactgtctacttgttgcagtgagggccaataattatgaaattgtcaggctgcttctctcccatggagctaatgtcaattgttattttatgcatgtgaatgacactcgtttccccagtgtcattcaatatgctctaaacgacgaggtaatgctgaggctattgctgaataatggctatcaagtggagatgtgctttgactgcatgcatggtgacatctttggaaattcatttgtgtggtcagagatacaggaagaggtgctgccaggatggacatcttgtgtaataaaagataacccgttctgtgagtttattacagttccttggatgaagcacttggtaggcagagttactcgtgtactaatagattacatggattatgttcctctgtgtgctaaactgaagtctgcactagaagtacagagagaatggccagaaatccgccaaatactagagaatccttgttcattgaagcatttgtgtcggttaaaaattcgaaggcttatgggtctccagaaactctgccagccagcctcagtggagaagcttcctctaccaccagctattcaaagatacatattatttaaagagtatgatctctatggacaagagctaaaattgacataacttaatattttaaaatgtgatttaaaaaaatgttgaaatgtgattccctcagataatttcttgtaaccattttacatccttaattgtaaagtgtatttaaattcattgacagttttataggttatcatgtgttcttatgggaacaccatgatttatgtctttaaagacatttgcattttttaaagatagtattttgaacttagatttgtatctttgtttgctacaagtcatcaaactctccctatcaagtggctcctacaatatccacaatcaagtctctatgtttaaaaaacagataaccactttctcaaacccacatctgccagttgctggccagattctcctgtctttcacggtcttgctgtgtaaaagagctcctcctgcctgtaagttcacagactgtgatctggcatctgaccctccactgcttttctcaaggtccctgacaatctctttgttggtaaactcagtgaacattcttcagtccctcttccaatcgattcctacagcatctaacattgttgcctgttccttgcttgaaatgatatctctttccttgtttctcgcaaaacctgttctcttgggtgtcctcccacctccctggacactctgtctctggcttctttctgcctagctcatctctagccaatcttacagttatatatcttaagccctcttctctttgttctttaagttatatatcctaagccctctttgctttgttctctgggatattttatccacatccatggtcttaatcattttgctagagactacaaaatttccatccaaagctcagctctttctctcatgttctcctgacctatgtagacaattggcctcatgaacatttgaacacaaagacacctcaaattcaacatgtccccagatgaact

SEQ ID NO: 1053 - DNA, 2393 bp, Homo sapiens
gagaagactgacatgagtcctctgcacggatccgtctctccctccccatcaccccttccttctgacacccagtcccagctgtccactgtcccaggtgcagtcactgttgtgcccttccttggggcaggctggctgggggccagaaaggggccatgaggctgtcttgggcccaaaaagggacaataaggccagttgtatgcttcctgttcctcatagcttgccttggtggggatgtctttgttggagttgattctgagctgctgtgattaggagaccctgaaatacagtggtttaagcaagatggaagcttgtttctaattagtctagattgagatggcccagagctggtagggcagctctgcgtttcttcatacgcaccttccaattctgggtacacagcggctgctccagcgcccaccctcctgtgtgcatccaagcctgggggaagcagaaatagacaagagggcacacccactttttgctaaaggcatgagccagaattggcaggctcacctctgctggcctctcattggctgggactcagtcacatggccacaagcagctgctagggaacctgggaagtgtagtcttcagcggggccgccatgtgcctggcctcaccttgggagttatcttattgatggaggagaagagaatggatatgggggaccagtagcatctctgggagagggggagggagcagcaataactcagtcgtcggatccagctctcattgtcagagtttccggaacagcttgctcctgtttccctcactgtgcagcccagggctgggggcagtgaggagcttgcagctctgtgggaaggggaaacaccccctcccctcggcccctcagacgctacccaatgatgccggtttgcagagttggcctgtggaatggctcatgtttgtgcgtgtgtgtgtgtatatttatgggcatgggtgcatgcttggtgtgtatttgtacatgtctgtattgctgtgtccctgtaaatacatgcttgtgtatggatggaagaggccaggcccaggcctcctcttcctcgggcctgtggccacacctcctgcagctccccaaaatgactgaggcagaaagcccttggggagcctagaaagcaaagctaaaggggatgcagggtctgtctgtctgtctgtctttcagtctgaggaatgagaatcctgacctgagggctgtgcagctgagagcccactacctccccagcccctctcggccccagccgcatcatcccacctgtcccctcccccccacctccagtggggctttctccagatgtcttatggttgggggtttcctgatgggccaggagaggagggcatcttcttgcgacagcactgtctgggttaagtgcccagtgagggcatggtgtggggagctggcctcagaggagccgctggtgggcaagcgtgaagtgggctgaggggctctgagccactttgctcccatctaggggactgccccccatggaactcctttgaagtcacagcagccttcctttctgtttgctcttggggctgagaggtggctcaaacactcggggtccctatggctctgggtcaatctaggccaggctgcaccccatggacagggagtctcagggctcctgatcatgcccaggccctggcctggggcctccctccttggcagctttcccacccccacgcccctggcatcctcagttgctatgggatgcccctccagggcaccagctcagggctaagcgaaggaagataggagcagctcagagctgccaggctctgccttcctcacagacctggtggggcaggtcctgttcacagcagcaggagtgaaggcctggccatcggtggagagggcagctgtcagagggctgggggccagggcacaggattgaagagtttcacatatcatcacagcatacactgggaatttggtgggggcagaagaacccagggccactccctcaatatgaagggaaaccaagctgaatgtgaccaccggcacactgctgccatgtcccatgtccacctttctccccgggaataactggccctgagacccctagacccaaggaggcctgtccatgccaagcatccgggaagcatggctggccttatccacccatgggtcacgtcggttcccaggggcagcatgggagatctttgggggcaacagggagagtctgggtggggagacgggacttgtccaagcagaaggcaggaccctgggaaatgcataatgtaaggacatcaataatagtattattttttttgtaagggaaaatcaatatgtacattctgaaatcattttctctgtaaatggttggatttcatttcacccttaaagggatgcttaaaggagaagataatattaataataaaaacagctacaaagtctg

SEQ ID NO: 1054 - DNA, 2293 bp, Homo sapiens
gatgacaattgagtaatgacaatagaaatagctcacactccataagaccatctttcccgttcctgaagaactcttctgaaatcgacggcatctcaatggagagacagccagggccagtgagaggaaaacttcaaatatttcaaaagacagagaaggatcctcaagctagagcagggtccccggtgcaggagtaccacactgccctggtcgcaggggacctcgaccatctgaagcccctcatggaccagttcttccaggatgccaacgtggtgtttgagatcaataaggatgagatggaatggcaggtgaaatctccagccacgtttggactatcaggcctctggaccctggagtacaagcgtgagctcaccacgcccctgtgcatcgccgcggcccacggccacaccgcctgcgtgcgacacctgctcggccgcggcgcagacccagacgccagccccgctgggccgcgtgttccagaccgcatcctgcgctctccaggcctcaccgcagcgcacggtgcaggcgctgctcaaccacggctctcccaccgtgtggcccgacgccttccccaaggtgctgaagacctgtgcatctgtccccgcagtcatcgaggtgcttttcaactcctaccctcagctctgcttgtcagagtcctggaaggaagtgattcctgaggaagtattccagatgcacaagccgttctaccagtccctctttgccttggccctcaccccacgctgcctgcagcatctttgccgctgtgctcttcgcagactgtttggcaaaaggtgctttgacctcatccccctgttacccttgccaaagcccctgcagaattacctacttttggagccacagggtgttttgcactgaaacgcagaacgctgcaaccaatactgttgttctcctcgctgaccttccatggaggccgtgtgttggagagtgccctgatgcagatggaggtgatgggagttcccttcccacttgctctccgtgggaccgggtgaagcacagaccttgccaagcttcaggttcacctcgaaatggaattggcaacaaaagccctttctgcctctcagggtcgcttgtgagaatccagtgaaatcgtgactatcacagcacttggtctgggaaagtacctttcaacaacagttaagccaaaaggtacagtgagtcctcacttaaggtcttcgataggttctagggaaccagctttaagctaaatgaggtataacaatgccagttttcccaaggttaattgatataaacaagaatgatgttcctacagcatatttctggtcacaaaaagatcaccacacttctaaataaagaccaatacaattctaatagtaaagattgaaataaaggcaagctacacatacctttaaaagagattaataacaagtaagataattatttacccaatttttggtgaatcagtatgtgatggtggttgtcctgctggtgggttagatcaaggaataaatgtttgcaaaacgaaccttgtcaggagcacctcctaccaccacgaagttcagaacagtcaccaatgtggcaggcttgctaggccctctcataccgcatcatttattgtcatgcatttggatgattattgtatgccttatgaatttttactttacaataatttgtattcattcattcattcattcattcatattctaatgtgcttattctagttcagggtcgtgcgtggccagagtccaccccagcaactcagtgtgcagggcaggaaccaggcctggacggggtgctattccatcgcagggtgctcacacacccccacacccacccacccacacacaacactgggacaattcagacacgacagctcacctcacttgctcagctttgggatgtgggtgggaactggagcacccagagaaaacccatacagacagtggccttgcccaggaatcagtcttgtttcttttttgtttttttgtttgtttgtttgtttgttttgagactggcgcaatcttggctcaccgcaacctccgcctcccaggttcaagcaattctcctgcttcagccttcctggtagctgggataacaggcatgtgccagcacgcccggctaattttttatttttagtagagacggggtttctccatgttcgtcaggctggtctcaaactcccgatctcaggtgatctgcccgcctcggcctcccaaagtgctgggattacaggcatgagtcaccatgccctgccgaatcagttttgtttcttatcggtgttataataaaatgacattaaacaaaacattatttaagg

SEQ ID NO: 1055 - DNA, 2810 bp, Homo sapiens
agcaaagcttagagtccctctaagctgaacatctacaacacttctcttctggctctcattctaccttgtggctacagttactggtgatacacttgggtgttgaaggacatttttgaaatcatgagaactcaatgtttgactatgaatgtttcgttataactgcctggaaggttagcgtcaaagaaattgagatttttaaagtcttcttctaggggtttccagcagagccaaatgttagaaaaatctttccgctcctctgaagagtgaagtgagcaaatacaacccagcagtaggttattgaagacagcagccccaggttttggaaggtgataatgaaatgtgaagaagttacatttctcaaacttgaaagttagtgacggcttaccaaattttaatgaaaattaaatatgacttagaagcattgatttatgaaggcttatgatgtcatcggtttcgacagaaagcaaactccagcaggctgtgagcctacagggagttgacccagaaacatgcatgattgtatttaaaaaccactgggcacaggttgtgaaaatcttggagaagcacgaccccttgaagaacacccaggcaaaatatgggtctatccctccagatgaggccagtgccgtgcagaattacgtagaacacatgctcttcttgttgattgaagagcaagccaaagatgctgcaatggggccgattctggaatttgtggtctctgagaacatcatggagaaacttttcctttggagcttgagaagggagtttactgatgagactaaaattgagcagctaaagatgtatgagatgttggtcacccagtcgcaccagcctctgctgcaccacaaacccattctgaagcctctgatgatgttgctgagctcttgttcaggaacaaccacccccactgtggaggagaagctggttgtcctactcaatcagctctgttccattcttgccaaagatccatccattttagaactcttcttccacactagtgaagaccaaggcgctgccaacttcctcatcttctcccttctgattcccttcattcaccgagaggggtcagtaggccagcaagctcgggatgcattgctcttcatcatgtctctttctgctgagaacaccatggtggcccatcacatcgtggagaacacctacttttgtccagtacttgcaactgggctcagtggtctctactcttccctgcctacaaagctagaagatgaggaggatgactttgactcttttatagcggagatgcctgctgtagagactgtgccttccccatttgtggggagagatgaggctgcctttgccagtcgccatcccgtgaggactcaaagcaccccattcacaggcccattcatcagcgtagtcctgtaaagctggagaacatgctggagaactctttacatgttaatttgctgcttatcgggatcattactcagctagccagctacccccagccactcctgcgctcctttctgctcaacaccaacatggtcttccagccaagcgtccgctctctctatcaggtccttgcatctgtgaaaaacaagattgaacagtttgcttctgtggagagagacttcccagggctcctcattcaagctcagcagtacctgctcttccgtgtggacatgtctgatatgacccctgcagcactaaccaaagatcccattcaggaggcttccaggacaggaagtggcaagaaccttttggatggacctccaagagtgcttcagcccttcctgacccacgaaccaaggtggctgaggcaccccccaacctgcccctgccggtgaggaaccccatgctggctgctgccctcttcccagagttcctgaaggagctggcggccttggcccaggaacactccattctgtgctacaagatcttgggtgactttgaggactcctgctgttagtttttttttttttttttttaatagaggttcttgttttgtaaggttttagtgtcttgactgaatgttaaatgcaaagctgcttacaaagatttctactttaatgtttcctgacaatacttgatttgtggggaggggaattttctgtatctttcctctctctctctagccgggcctttccaccttatgttatatatagaatgtaagtctcataagctggttgctcccttggcagttttctttgctctgtttttcctccttatatttttttggttgtcattctcctatccctttgagttactcttcttgcagctcagatcacgtcaagcagatattggggttcagtgatgtctggtgatgtctggaagtgccccatgtcagaattccagctgttcagcagcacaggaagattgtacacctgcaactgtgcgaatggtcctgttgcctcctgcattttggcctctgttctataaaggaagagtaaagatggagctcctcctgcctccatcacgaaagcacatatcatctgtccctttggattttacttccaggacgtgtgtcgtccccagcgtgtgttgccttatggtgccggcagagcctcagctatctgcctgggaagtcggatgtccttggagagaatttggaatgcagataatttttcttatttcttgagagcttactttaatcagcatgacactacctaaacactgaagatggccttatattagtaagatttgcacaaaattaagtatacctatgcaaactattactttggtttttaggagtttgatcagatgaagaagtaatggtatcacatatatatgtaagaagacaaccatcattatttttgtaagtgttttataaaaacaaactgattaacttg

SEQ ID NO: 1056 - DNA, 3555 bp, Homo sapiens
ctggatttccacctgccctcgcatgcccaggacatgctggatggcctgcagcgcctgcgctctcagcccaagctggccgacgtcacactgctggtgggcggccgggagctgccatgccaccgcggcctcctggcgctcagcagcccctacttccatgccatgtttgcgggtgacttcgccgagagcttctctgcgcgcgtggagctgcgggacgtggagcccgccgtggtgggacaactggtggacttcgtgtacacaggccggctgaccatcacgcagggcaacgtggaggcgctgacacgcacggctgcgcgcctgcacttcccctcggtgcagaaggtctgcggccgctacctgcagcagcaactggatgccgccaactgcctgggcatctgtgagttcggggagcagcaagggctgctgggcgtggctgccaaggcctgggccttcctgcgagagaactttgaggctgtggcacgtgaggacgagttcctgcagcttccccgagagcggctggtcacttgtctggccggcgacctgctgcaggtacagccggagcaaggccgactcgaggccctgatgcgctgggtgcgccatgacccgcaggcccgggccgtccacctgcccgagctgctcagcctagtgcacctggacgccgtgcccaggccctgcgtgcagcaactgctggcctcagagcccctgatccaggagtcagaggcatgccgggcagccctgtcccagggccatgatggggcaccactcgccctccagcagaagctggaggaggtcctggtggtggtgggcgggcaggcgctggaggaggaggaggcaggtgaggagcccacccccggccttgggaacttcgccttctacaacagcaaggccaagaggtggatggcacttccagacttccccgactatcacaagtagggtttctccctggcggccctgaacaacaacatctatgtcacaggtggctctcggggcacaaagacagacacctggtcaaccacccaggcctggtgcttccccctgaaggaggcctcctggaagcccgtggcgcccatgctgaagccccgcaccaaccacgccagcgcggccctcaatggggagatctacgttatcggcggcaccaccctggacgtggtggaggtggagagctatgacccctacacggacagctggacgcccgtcagcccggccctcaaatacgtcagcaacttctcggctgccggctgccggggccggctctacctggtgggctccagcgcctgcaagtacaacgccctggccctgcagtgctacaaccctgtcacagatgcgtggagtgtgatcgcctcgcccttcctgcccaagtacctgtcctcgcctcgctgtgctgcactgcacggggagctctacctcattggggacaacaccaagaaggtctacgtgtacgaccccggggccaacctgtggcagaaggtgcagtcacagcacagcctgcatgagaatggcgcgctggtgccactgggtgatgcgctgtacgtgacgggcggccgctggcagggcatggaaggtgactaccacgtggagatggaggcctacgacacggttcgggacacctggacccgccacggcgccctgccccggctctggctctaccacggggcctccaccgtcttcctggatgtctccaagtggacccagccctccggccccacccaggagcactaaaccagggccagggtccccggggaggagtccccacagcggcccctcatcagcctgtggaacggcccctttcattttcgcttatttgttcactcggagctaccattccttccaagctgcgctcaggccaccaggggtgatcagacggcatggcttggaggacacagccttggtctctgtggccaccacactaaactctgagctgagcagtggcaagggcctgagtgccagacgctggcataacagggacaggaagctctgctgcccctggggttcccgagacctcagagaggggagccgggggccgggccagcattcccagagcttgcgagccccactcctgcccctggaccccagcaggggcttttggagcagttgcatgaatgtggggtgaacacggagcgtcccagaaagctgaggctgctggggaaggcaggccccggagatgggatcagcaccaggtcctcgtgggcctgcttctgcccagctcacggcagcgtaactgtggccagccacctcccctctctgggcttcaagctccgcgtccaccacacacggggctggctgtgtgggctttgggtccccactcaggctttgcatgttggtgctgtgtttctgcttctgtggacaaaggaggcccccacccatctcttgcacccagagggcggtgcccacagaggcaccaggaaggagggaggcagggcgtggggcggggctggagggtcccagggaggtgagcagttttgctctcagaagggattgcctccgtctctgtgtgtcagaacaaaggctcttcattagaatggaatttcccaccaggggacgactcttgggtgcattggtggcagcctcctgagggtgaggggtagcatccgatgggcccctgccagcatgcagcccgactccggctggctcaggctccgagtggcttctccctcatcctgaatgaggcacccacctttgcagctaaggagacaatgaaggactctccctgggtgcccaatggcgtgtccctcctgtcacaggctccgccctgggacatggggctagaagtcaggagtcgggcccggccaggcacaggccctggtgttgccccagaggccctgggcagctccggtctcccgccggatccaggcttcctctccaggaccagcccctgggttcctccttaacaccccccgcccctggggaccagaggggcctctgacatccttgggttctgaggacggaaacccctgagcctcttgagcttctgtaggtagggatctgctttgctcccagacctgcctctcatagcttttttttttttttttttttttttgagacggagtctcgctcttgtcgtccaggctggggtgcaatgctgagatcttggctcactgcaacctccacctcccgggttcaagagattctcctgccttagcctctcaagtagctgggattacaggcactcgccaccacgcctgactaatttttgtatttttagtagaaacagggtttcaccatgttgaccaggctggtcttgaactcctgacctcaggtgatccgcccgcctcagcctcccaaagtgctgggattacaaggtgtgggagaagtgagttgaccctggagggccagacagagtggggcctctgggtgctaccaaaggaacaagagcccagagctgaggagaccttcggtggcagatggattggatgaagcaagggtgagggtttctggggccctgggctctgtttccatgtggaaatctgaaatgttttctagacagtgatggaaggaggtcagccaaagggctgtttaaaaacaaagcctccatgtaaaccatttctgcaagaatatttt

SEQ ID NO: 1057 - DNA, 1997 bp, Homo sapiens
cctttcctgtcgtgacttaacgcacgcaagcggctccagggtacgtccccgccacgcgcgctcgcaggatcggtgcgtggtgacgtttcgccggcgcgggcgccatcccggaagcgcgagcaaggccgccagatgtgcaggtgccgccgctaccgacgccggggccgagtttggggtggggctggggactccagggccgcggggaaccggtccgggtcgggcgcggcccccgggctgcggtggggtggggtgcgccactggccacatctggtcattcctgctgcgcacaggcctcagtttccccgtctgctcaatggatacgcaggcggcgctacgggctggatctggatccggatcaggggcataggaattggggcctcctgtgttctgggtgtgtcgtgtaacctggagctgggcgttgcccggtttgtgcctcagtttccctgtattgtaggggacggggcgtgaggggatatttgagcccctccccacttggggtttttcagagcttggatggctgagttaaattctgttaaataacctggatatagaaccgtggtgcttctctgcctctccctgtgagtttcggcaacggagcccgcccctgtgagcctcagtttcactcggagatgattgtgtctgcctcgtaacggtgattgaggatgaaatgaagtgctctacaagtgtttgcccgtaatatattcttagaggcccctgggatgctctcaaaatgttgattcccgggacttcttcacactcctcttggagaaacagcctgtcctgagctccagtcgttatcacctttggtttcagttgccacagacagcactgtgagatcttcattctaccttattttcattttatggttgaaaaaactgattcagaagggtgaagtggctctcccatggtcaaacagcctacctctctgcgtttcttcaataaatctacatttggagttgggatcagagctcttgctgggtcaatttcactgtgtatgtgggccagactagcagtaatcagggaaggcttcttgggagaggaagttgcggggggacgggagggaggtgccaggaacccctcagccctcacatctgggagccagagacagaaaagagtcctgttttgaaggaggagtgtatcccagaaggtcccagtactgtgtctcactggtactagctatgggcctccctctccaggtgtcttttttttttttttttttttcagttgagatgaagtctccctctgtagcccacactagaatgcagtggcttgattttggctcattgcgacctccgcctcccgggttcaagcgattctcctgcctcagcctcctgagtagctgggactacaggtgcccgccatcatgcctggctaatttttgtatttttagtagagacgggggtttcaccatgttgaccaggctagtcttgaactcatgacctcaggtgatccaccagccttggcttcccaaagtgctgagattacaggcatgagcacccggtccaggtatcctctttatacaagatcatgcttctttgggaatgtggagactgggtgtctctgcatggcatgtcataggagttcaataaccatagttattattagagggaagggggttttgctgggtgtggcaccttatttctagaaggtgctgcaaaccactgaccagatacagatcacaaatagatgctcttggcctccatgatatcttggaaaaaagtattgattgctgacatttgtcaatgaggcaatttcccagaaaaaaaaaaatccctgtttcctttttcctggagaaacatcagaagtcaggcagaaatcagctgctgtaagaagccactgtcctgtcacagctggatattgtgcacctgtagtcccagctactcgggagggtgaggcgggagaatcgcttgaacctgggaggcggaggttgcgctgagccgagatcgcgccattgcactccagcctgggtgacaggagtgaaactctgtatcaaaaag

SEQ ID NO: 1058 - DNA, 3035 bp, Homo sapiens
agacgcccagctcggccgccgggacccagggcacggatggagccccgaggcggtgggagctcccagttctcatcctgccctggtccggcgtcttctggagaccagatgcagaggcttctgcagggccctgccccacggccccctggtgagccccctgggagtcccaagtcccctggccacagcactggctcccagaggccccccgatagccctggagccccaccacggagccccagccgaaagaagaggcgagctgtgggtgccaaggggggtgggcacacaggagcctctgcttctgcccagacgggctccccgctgctccctgcggccagtcctgagacggcaaagctgatggccaaagccgggcaggaggagttggggccaggtcctgcaggagctcctgagcctggccccaggtcccctgtgcaggaagacagaccagggccaggtttgggcctgtctacacctgtccctgtgacagagcaaggcacagaccaaatcagaaccccgcgccgagccaagctgcacacagtgtccacgactgtctgggaagccctcccagatgtctcaagggctaagtcagacatggctgtgtctacacctgcctccgagccgcaacctgacagggacatggctgtgtctacacctgcctccgagccgcaatctgacagggacatggctgtgtctacacctgcctctgagccgcaacctgacacggacatggctgtgtctacacctgcctctgagccgcaacctgacagggacatggctgtgtctatacctgcctccaagccgcaatctgacacggctgtgtctacaccagcttctgagcctcagtccagtgtggctctgtctacacccatctccaagccacaactggacacggacgtggctgtgtccacacctgcctccaaacatggcctggatgtggccttgcctacagcaggcccagtggctaagctagaggtggcttcatctccacctgtctcggaggctgtgccgaggatgaccgagtccagcgggcttgtgtctacacctgttcccagagccgacgccgctggcctcgcctggcctcccacccgcagagctgggcctgatgtggtggagatggaggcggttgtgtctgagccctcagcaggggcccccggatgctgctctggggcacccgcactgggtctcacccaagtccccaggaagaagaaagtgcgcttctccgtggctgggcccggccccaataagccaggctcaggacaggcctcagcccggccctcagccctccagacagcaactggggcccacggggggcccggagcctgggaggctgtggctgtcgggccccggccccaccagcctcggatcctcaagcacctgcctcgcccccctccctctgccgtgacgagggtcgggcccgggagcagctttgccgtgaccctcccggaggcctacgagttcttcttctgtgacaccatcgaggagaacgaagaggctgaggcggcagcggccggtcaggatccggcaggcgtccagtggccggacatttgcgagttcttcttcccagacgttggagcccagaggtcgaggcggcgggggtccccggagccgctcccgagagctgatcctgtgccggcccccatacctggagaccccgtgcccatctccatccctgaggtctatgaacacttcttcttcggggaggacaggcttgagggcgtgctggggccggctgtcccgctcccactgcaggccctggagcctccccggtcggcctccgagggggcggggcctgggacccccctcaagccagccgtggtagagcggctccacctggctcttagacgggcaggggagctccgggggcctgtcccatcatctgccttcagccagaatgacatgtgcctggtgtttgtagcttttgccacctgggctgtgagaacgtcagatccgcataccccagacgcctggaaaacagccttgctggccaacgtcggcaccatctctgccatccgctacttccgccggcaggtggggcaagggcgccgcagccacagccccagccccagctcctaggagccaggcccgggccagggagatgcaggatgaggagacgaccacaggcgcccagggcaggacgaggtgccgccctcgcccgggccctctgacccctctcttctaccgcgtccaggaggggggcgtgtcctggtgctgctccctccgactcacctgaggatccagccagtgaccacggccactccccacgcctgggagggaggtgctaaagtctgggtgggtggagggcaggcaggtggctgggtaggagggtggccagattcacagatgagaacacagggcattcggttaatttcagacaggcaatagtggggaggtcattttactaagaagttgttgtttatctgaaatcaaatgcaaccgcaccctgcgtttcttctggggtgcagggggagctgagtggcaggacaggacttggacctcggaggggtctgagcagcaagacactccggctggagctctgggcagaggcaggggagaggacacagggtggcctcaaagaggggatgggcagcctcctcacaggtgggctgggctggcaagggctccaaggcccatcactcttgatcctcaaaggactgtggccaaggcctctgcgggctctggcctgagacagtgaaggctctgcctgcccctccccagtgcagcggcccctgcagggtgggggtctgtggcagagccgcgagcccctccccgggagccctgggtgcaggtgcagagggagaattcggtggcctcagatggagggctgggctcctggggttgtcccgggggctcctgtggggcagctggggacccacagccaagaggagtcagagatgaggtgggaaggtcggtgaggggcccgaggtggcagaggaagggggctgcctggctgggtgctgggtgggggtcctcaagactgtgggagaccctggctgctgagcagagaacacatggatgcagcaccaataaaattctatcttttc

SEQ ID NO: 1059 - DNA, 3347 bp, Homo sapiens
accattctctgtttccttttcgctccgctgtagttacgtgactcacctttcattcagtacctcccttcaaggaaagccctgtctcctgtccttggactgggatcacacagagttcttgggatgaccctggctctcccgcgccagccgctctgctgccaagtgcaagcattcgctcccagatgcttcgcccagttctttgcaaatgtcatccaatcagtgtccaggtgttcacggctcatcactggcttactgctctggtctacatagcttgggacattgctgtttatgcaggtataaaaaaaaaaaaaaagaaaaacaaaagaaagaaggaacggcagcatcacagaatgtgaatcagaatattagtctgtggtactgggagagaaaaagaagattccccagagaggatgaagaccaaacagactgcagacctgccatctctctacactgcacttggattggccatttgctgtatgcacccgggaaaaaaattcagaggaccatgctgttgtgatagctgacctaaagacattctggagagcacatgagtttgatttttacaaatgacttaataatctgggggaccaagccagggctgcagagtctggaagagcccctgccagcggtgagcagaggaggaggagacccagagtcaggggtggtagaggaacggggtttcccaggcctcttttcacagcaattagaggtctgtgttctccttgaggcaggggcgtaactcccacaagtgttaatgagatttaacgaagagaaagggagactccagagctgcatttccagtcggggcttccacagcagcagaagaggacagagttctgctgtttccagccggacctggcagagagtcctggaagcctggaccttagcatgttaccttcatcagcaattccacactccagccggcatcgtaagtccccaacctgtggtcgcctagccccttctacgaaccttgtgaagagaagctgcctgtgccttgggctagaaagttctctcacactctatccagtgcttaagctcgcctgcctaggtttacatcccagctctgctgagtttccagctaagcctagtttcctcctccaaaaaatggagataataaatggcacctacttcacttgcggatctaatgaaagtcaagagcttagcacaatgtttgaccatataaagtacctctgagtgatgatgatgatgaatttgggcctagaattgacatcttagtcatatgaggcagaacctagttctaaggaaacacacctcagtgccatgatagaaacatttcatcatgaaaacctaagcagttgtgcaatgaaaatccctgtcatttacaacaattcccccaccccccacgtacttgggataaattagaaccaggatgggccaagtttctcgtctcgcctcctcttttcctcagtggcaaccgtgtgatttatggctctgacgggagagccaaccaaactcagttgtttcagctgattgtccccgtgagttttcaggttgatgtgaaatccaatggggtgtgaactgaaacccaagatctcctgaaagccccatgcactaagctcagtaagggaccaaaccaaaccaaaccaaagctccctccctcttgcctggcactcctggagctcacaaaaagcctgccacttgtgagcctgtgtgcctggaagggtctgctgcacctggctgggggcccctgggccattgttttcctggcagcagcaaggaggcaggtcttcggctcactcctggagctggccccacaccagcgacctcagaaaccaggcaggctttcatcctggggtctcctaggggttggttacacagagagagtgaggctttgttggaagactctcagaggcctggccaggttttcctctcacagccaagaagcaggttctagttctttccaaacccttgataccttctaaactgaaaagcggctgcccactcagaatttgggctaggccatggagatgctaaaaaccttatcttttaaaagggaattgttactgtctctctgaaaagactgcagggtttctaggagattctgaaatgatgtatacagctagagtctaaaaaggtggaaggagaggtttctgggtagggggttaaaagtgtaagctctggaggcaggcagacctgggagcaagtcccagctcatactcttcatagctgagtgaccttgagaaagtcactcaatccctctgaggttctctttgttcttttgctccctgctcactcttcatcttaccctgtctagcccaacgtttttggtagttcatgttccagtcagaagaaaagaccagtgagaactgggatttataataattacaatcatcaaaattaactgagtacagtgctcagcaatttatatcaatttcatgtaatcctgagaacccttttataaggtaggcattgcactgattcacattttaccagtgaggaaatagaagtttaggaaggttgccaaaaacttagaatgacctttctaaaatatgtgtggttctattagtctttggtttaaaatcttaccatggatttatcttcaggataaaataaaattctttaacacagaaaaaaggacccttccatgctgtgagccttcaggattcagtggttaaccagtatcatctttctaacttcctgacctgcaagtctccctctgaccacactgagctttcacccttccctagctgactgaggtgttcttgcacctccaagaatctgcacacaatcttttcttcttccttcatatccttctggatctggctaactctgactatccttcaagacatggttgggtatcgcttcgtctggagaataacctgtatgcccccaaagatggggataaacaccctttctagatgatctggtagtttctgagtctgcttctaacaaggttaactccaaattcctcagcccaagactgaagggaactcctttcactccttttaccctggactctcacccgtgcagctctctggcagccggaagtccaagatgcccatggactcttagcaagccattcacagtcttcatttagggaattttagtagagtctgctgaatttgtcttaaataggctgactacaatgattttttaaaatgtatacaatcatgcactgcataacaacttttcagtcaacaacagatcaaatatatgatggtgatcccaggacctgaaaatatcctattgcctggtgacattatagccatcagcatgtggtagagcaacacattactcacttgtttgccagttgtaaaaaagaatagcacatacaattacatacagtacgtaatacttgataataataaatgacgatgttactggtttgt

SEQ ID NO: 1060 - DNA, 2608 bp, Homo sapiens
aggagggcccggggccgagacgatggctgaccacaaccctgacagcgactccacgccgcgcacgctgctgcgacgcgtgctggatacagcggacccgcgcaccccgcggcgaccccggagtgctcgggctggagcccggagagccctgcttgaaacggcttcccccaggaagttgagtggccaaacaaggacgatagccagagggcgttcccatggagccagggtaagtacccagcccactgaccccaaagggccctggctgcctcggggaggggggttgaggtctagctctgctctggagcccaccttgaggaaatctcaaggcagacggacagactggttgcttggtgctttgccgatagtctgttggcagatcggcccatattcaggccagtgggcacttggaggaacagacacctcggacgctgctgaagaacatcctactaactggtaagtgagcgctggcctgccggtcagagttaggtaccagtccaaccccagtcttgtggtatcttttattcagggtggcctgttctgtcagccccaccctctccttggtgtttctgcagccccagaatcttccatcctgatgcctgagtcggtagtgaagccagtgccagcaccgcaggcggtccaaccctccagacaagagagcagttgcggcagcctggagctgcaacttcctgagctcgagccccccacaaccctggctccaggtctgctggcccctggcaggaggaaacagaggctgagactgtcagtgtttcagcagggagtggaccaggggctgtctctctcccaaggtgaggccctggacaccacttttgctaccctctccctcctgtcctctggagaggctgaggagtcctgagagagggccctcacaggcctggatcacttaccatggttttcttcttttacattctcttgccggttgctgacagagcctcaagggaatgctgatgcctcttccctcaccaggtgctgctctgggtgtttcctgttctgggagtgggtggaggagagacttggggagggaggtgctgcctgggatggaatctgcccatactacttcctaccagttttagcctcacagcatctgttctaagagatgagagccccagggcagatggagggatctgtgggcaaactgggtctcaggtacctgactttcctctgtgcctccccacctcaccagatccctcaacctgacctttgccacacctcttcagccacagtcagtgcagaggcctggcttggcccgcagacctccagcccgccgagctgtagacgtgggtgcctttttgcgggatctgcgagatacttccctggctcctccaagtaaggttgggttttcccctgctggcctttggggaaagctctccccgctatgacagataggaggtgatgctgagtcagggttgcacccctctcggtggggtcaaggacagcgagcaactctggtcagtgggtctacaaggaatttctgcttgctttctacagggggcctctttccttggtccctcggtgtctcccagggccccatatccttagactatagggctggaggttgtaaaggggtgtggtgtggtggccaaaacttgttgagaggggccaggtttcaggatcagctggccaattcaaactgacctgggagcctgattgcagaaaacaagttcaccagagtaagaagagggtttgggaagacggagcagaacaagcagcgaagaggtattttaagtgggcagctggtgggcgggcagctataggggcctgggactgccaggcagaggaacaggaaggtaagcaaggagggctgtaggcgataaggcctcgcgtgctaggtcgtcttctttctctgaaggccactcagggtggacccatgcagcccactgtccaggccctggcaacgctgagtagcagccggtgggcctggaatacgctgagagccagctggcccctgatctccaggtgacagcctcagaacctgttactactctgcccacagacattgtgttggaggacacccagccgttctctcagcccatggttggctcccccaacgtgtatcactccctgccctgcacgcctcacactggggctgaagacgctgagcaggctgccggtcgcaagacacagagcagtgggcctgggctgcagaagaatagtgagtgtgtggcactggtggcctggagccaaatttagcttgggtgagagttgacaatggtagttttccttcctcaagcccctctgtgcccctagggcaccctggctgtggctgcctccttcatccaagagcagagtccatgttgggccaggagacttcagatccatgtcctggtgctgcctctggctttgtctttcctcagtgggcaggactgggtctgctggtccatctttacccttctctgagctatgcagccttggcctgctgcgtctccggcctgtattctctccccttcactcaggccctgggaaaccagcccagtttctggcaggagaggcagaggaggtcaatgcctttgctctgggcttcctgagcaccagcagtggtgtctctggagaagatgaagtagagcccttacacgatggagttgaagagtcagag

SEQ ID NO: 1061 - DNA, 3103 bp, Homo sapiens
tgttcctggaagaagatgtggttgttgagtacttcaggatgatctgaagatgcagatcccacaggacatgcttacagcccattgcttcatttagcaatgatttagcaagctccactcatgctcagcactgtggaagagactctgaaacagcaggagacaggcattcttgttaaggatgtaaaacatatatgcaaaaaatcagcttgggaacaattggacggcaaaggaacaataacctcattaatgcagtataagctgctgaaatgaaggtgtaggctaaacaattcaacagaactcattcagccaggtcatgtgtttttccagagcattccaagtgatccttggagtgacaggactcccagacaggttacctccatatccagcacgttttgtaaccacaaaatccttatgggagtatcacttagcacccagccaggaaggaatctctcatcccctcagtgaactcagtgattctaatgagctactcattcagtctgggcccacagtccagtgattaagtgtggaaggggaataaaacacaaggccctttgctgctctctaggaaattcagagatggatgtaactcctgcagaagaaacctttgattcacaactgtctcagtagaggattattggtttttctttttagaggaagaacatgtgtgtctctctctgtgtgtgtgtgtgtgtgtgtgtgtgtgtgtgtgtgtgtgtatgagagagagagagagagagagaaggaaagggacatagggagatggagagaagatgagagatgagagattatatttacctgatattttattattttggaaattttatttgctgtcacctgaatcctgacttctgttttgatttagagacatctaagaacagttgctgcagcaaaatgttttctgcacagtaataattaaggcctaaattgggatgggaaaagccttaaaatagtttataacttgtatagcttcacaatggtgatgaaagttatcaacgagctaagtgctcttacatagtttagtgaaaatactaaatacaatttttgttgaaaagcaaatgcagcaaatagcgaaattggacttctttacaaactcagtatcacaaaatttggaaatggatgtaaatgtgaaaatatgtctactttacttgaccattcattatatctaattagcttctaattttatacttataaaaatatagatgtaaagccactgtagccagactgcctctctagattcctcctctctgggcagagcatctctgaaagaaaggaagcagccccagtcaggggcttatagataaaactcccatctccctgggacagagcacctaggggaaggggcagctgtgggcgcagcttcagcagacttaaatgttctggcctgctggctctaaagagagcagcggatctcccagcacagtacttgagctctgctgagggacagactgcttcctcaagtgggtccctgaccccccgtgcctcctgactaggagacacttcccagcaggggtcgacagacacctcatacgagagagctccggctggcaactggtgggtgccactctgggacgaagcttccagaggaaggaacaggcagcaatctttgctgttctccagcctctgctgatgttaacccaggcaaatggtctgaagtagacctccagcaaactccagcagacctgcagcagaggtgcctggctgttaaaaggaaaactaacaaacagaaaggaatagcatcaacatcaacaaaaaggatgtctgcaccaaaaccccatccaaaggtcaccagcatcaaagaccaaaggtagataaatccatgaagatgaggaaaaaccagtgcaaaaaggctgaaaattccaaaaaccagaatgcctcttctcctccaaaggatcacaactcctctccagcaagggaacataactggatggagaatgagtttgacaaattgacagaaataggcttcagaaggtgggtaataacaaactcctccgagctaaaggagcatgttctaactcaatgcaaggaagctaagaaacttgaaaaaaggttaagggaattgctaactagaataaccagtttagagaagaacataaatgacctgatagaactgaaaaacacagcacaagaactttgttaagcatacacgagtatcaatacccaaatcgatcaagcggaagaaaggatataagagattgaaaatcaaatttaatgaaataaagcatgaagacaagattagagaaaaaagaatgaaaaggatgaacaaagcctccaagaaatatggggctatgtggaaagacaaaacctacatttgattggtgtacctaaaagtgatggggagaatggaaccaagttggaaaacacttcaggatattatccaggagaacttccccaacctagcaagacaggccaacattcaaattcagtaaatacagagaacaccacaagatactcctcaaaaagagcaaccccaagacacaatcagattcaccaaggttggaatgaaggaaaaaatattaagggcagccagagagaaaggtcgagctacccacaaagggaagcccatcagtctaacagcagatctctctacagaaaccctacaagccagaagagaatgggggccaatattcaacattcttaaagaaaagaattttcaacccagaatttcatatccagccaaactaagcttcataagtgaaggagaaataaaatcctttacagacaagcgaatactgagagattttgtcaccactaggcctgccttacaagggctcctaaaggaagcactaaatatggaaaggaaaaactggtaacagccactgcaaaaacatatcaaattgtaaagaccattgacactatgaagaaactgtatcaactaacgggcaaaataaccagctggcatgataatgacaggatcaacttcacacataacaatattaaccttaaatgtaaatgggctaaatgccccaattaaaagacacagactggcaaattggatagagtcaagacccatctgtgtgctgtattcaggagacccatgtcgcgtacaaagacacacataggctcaaaataaagggatggatgaatatttaccaagcaaatggaaagc

SEQ ID NO: 1062 - DNA, 2890 bp, Homo sapiens
ataacataacttcccctgacccaaagtcttatgctgaaagaaagcttgactcagatgtgtatccatcttcaaagcaagaagatggttttccaatgcaagagttacaggtgttgcagccacaagcatctcttgagtcatcaacccaaaggctatctgatggagaaattaatgctcaagaatcaacttataaggtgtcaaaggcagatgacagatattctcagagtgtaatcagaagtaattcccgtcttgaagatcaagttattggggttgctctgcaagcatcaaaaaaagaagaaagtgttgttggttcagtgacacaacttaaccaacaaattggccaagtcaataatgcagctacccttgatcttaagaactcaactaatttaatacagactccacaaataaggttgaatactaaagacttaaagcagcaacatcctctcatacttaaggtgcatgagtccaaggtccaggaacagcacgatcaaataattaatgcttcatctcagattcaaattccaaatcatgctttagggcatggccatcaggcatctcttcctaatacacaggtccttttagattctgcctgtgatttacaaattcttcagcagtcaatactgcaggcaggtttaggtcaagtaaaggcatctttacaagcacagcgtgttcaaagccctcaacaaatagtacatcccttccttcagatggaaggtcatgttattcaaagcaatggtgatcattctcagcagcaactccatcctcaaaattctgaagttatgaaaatggacctctccgagtcttcaaaaccattacaacaacatctaacaacaaagggccattttagtgaaacaaatcaacatgattcaaagaatcagtttgtttctcttggatcgatgtgtttcccagaggcagtgcttcttagtgatgaaagaaatattttatcaaatgtagatgatatcttagcagctacagcagcagcttgtggagttacacctactgatttttccaagtcaacttcaaatgaaaccatgcaggctgttgaagatggtgattctaaatctcattttcagcagtcattagatgtcaggcatgtgacttcagattttaactctatgacagctacagtaggaaagccacagaatataaatgatacttccttaaatggaaatcaggttactgtgaacctttcaccagtacctgcccttcagtcaaaaatgactcttgatcaacagcacattgaaacacctggtcaaaatataccaactaaagtaacttcagcagtggttggaccaagtcatgaagtccaggagcaaagttctggcccattcaagaaacagtctgctaccaatcttgaatctgaagaagacagtgaagctcctgttgatagtacattaaataataacagaaaccaagagtttgtttctagtagtagaagtataagtggagagagtgctacatcagagagtgaatttaccttagggggtgacgacagtggtgtgtcaatgaacccagctaggagtgcacttgcactgttggccatggcccaatctggggatgcagtcagtgtcaagattgaagaagaaaaccaagatttaatgcattttaaccttcaaaagaaaagagctaaaggaaaagggtaagttaaagaggaagacaacagtaatcagaaacagctgaaaagacctgcccaaggcaaacgccagaatccaaggggaacagatatttacttaccgtatactcctccttcctcagaaagctgccatgatggttatcagcatcaagaaaaaatgagacagaagatcaaagaggtggaggaaaaacaaccggaagtcaaaacaggatttattgcttctttcttagattttctgaaatccgggcccaagcagcagttttccactcttgctgtacgaatgcctaacaggactagacggccagggacccagatggtttgtacattttgtcccccaccacttcccaagccttcatctacaacacccacacctttagtgtctgaaactggcggtaacagtccatcagataaagttgataatgaacttaaaaacttggaacatttatcttcattttcttctgatgaagatgatcctggatatagtcaagatgcttataaaagcgtctctactcccttaactactttggatgctacttctgataaaaagaagaaaacagaagccctacaggtggcaactactagcccaactgccaatactactggtactgctactacttcctcaaccactgtgggtgcagttaagcaagaacctctccactctacttcatatgcagtaaatattctggaaaatataagctcttcagaatcctcaaagcccattgaacttgatggtcttccttcagaccagtttgcaaaaggacaggacactgttgccatagaaggttttacagatgaggaggacacagaaagcggaggagaaggccaatacagagagcgtgatgaatttgtggtaaagatagaagacatagagacttttaaggaggctttaaaaacaggaaaagaacctccagctatttggaaagtacaaaaagctttattacagaaatttgttcctgtaattcgagatggtcaaagagaatttgctgctacaaatagttatcttggatattttggagatgcaaagagtaaatacaaaagaatatatgtgaagttcattgaaaatgcaaacaagaaggaatatgtcagagtgtgttctaaaaagccaagaaataaaccttcacaaactatcagaactgttcaagctaagccaagtagtagcagtaaaacttctgatcctctagcatcaaaaactacaactacaaaagccccttccgtgaaacccaaagttaaacagccaaaagtaaaggctgagccaccacc

SEQ ID NO: 1063 - DNA, 4404 bp, Homo sapiens
acacacacacacacacacacacacacacacacctgagatggggtagatcattgtatttttgtgtctaccagcaagaaaaggaaggaaaaactaagggctctgtgtatgaatgacaaggataccttcagccagctcattctggatgaatgaatgattacactaagtgtcctccacattcctctgtgggctcacttcatggactcactttgcgtgcttgttaaatgtgctgtgttgctcccaagaccatgtaaagcctactgaccactaacctccctcacagcagaaactagacgtcaggttaaaatgggcaactccgacagtcagtacacccttcaaggatctaaaaatcatagcaatactattactggtgctaagcaaattccttgctccctgaaaatacgtggcattcatgcaaaagaggaaaagtcattgcatggatggggtcacggaagcaacggagcaggttacaagtccaggtccctggcccgaagctgcctttctcactttaagagtaaccagccttacgcatcgagactcggtggccccacatgcaaggtctccagaggtgttgcctactccacgcacaggacaaatgccccagggaaggatttccagggcatcagtgctgctttctcaactgagaatggcttccactctgttggccacgagctggcagataaccacatcacctccagagactgcaacggacaccttctcaactgctacgggaggaatgagagcattgcctccaccccaccgggcgaagaccgcaagagcccccgagtgctcatcaaaacgctggggaagctggatgggtgtttaagggtcgagttccacaatggtggcaaccccagcaaagtgcctgcagaggactgcagtgagccggtgcagctgctgaggtactcacctaccttagcatcggaaacctcccctgtgcctgaagccaggagggggtccagcgccgattccctgcccagccatcgcccctctcccacggactctcgcctgcggtccagcaaaggcagctccctgagttctgagtcatcctggtacgactccccttggggcaatgctggagagctgagcgaggctgagggctccttcctggcccccggcatgcctgaccccagtctccatgccagcttcccacctggcgatgccaaaaagcctttcaaccaaagctcttccctctcctccctccgggaactgtacaaagatgccaacctggggagcctctccccctcaggtatccgcctttctgatgaatacatgggcacgcatgccagcctgagcaaccatgtctcttttgcttccgacattgatgtgccctccagagtggcacacggggaccccatccagtacagttccttcactctcccctgtcggaagcccaaagcctttgttgaggatactgcgaagaaggactccctcaaagccaggatgcgacggatcagtgactggacgggaagcctctcaaggaagaaaaggaaactccaggagccgaggtccaaggagggcagtgactactttgacagtcgctctgatggactgaatacagatgtgcagggatcctcccaggcatctgcttttctgtggtcagggggctctactcagatcctgtctcagagaagtgaatccacacatgcgattggcagcgatcccctccggcagaacatttatgagaatttcatgcgagagttggaaatgagcaggaccaacactgagaacatagaaacatctacagaaaccgccgagtccagcagcgagtcactcagctctctggaacagctggatctgctctttgagaaggaacagggggtggtccggaaggccgggtggctcttcttcaagcccctggtcactgtgcagaaggaaaggaagcttgagctggtggcacgaaggaaatggaaacagtactgggtaacgctgaaaggatgcacgctgctgttttatgagacctatgggaagaattccatggatcagagcagtgcccctcggtgtgctctgtttgcagaagacagcatagtgcagtctgttccagagcatcccaagaaagaaaatgtgttctgcctcagcaactcctttggagatgtctaccttttccaggccaccagccagacagatctagaaaactgggtcactgctgtacactctgcttgtgcatccctttttgcaaagaagcatgggaaagaggacacgctgcggctgctgaagaaccagaccaaaaacctgcttcagaagatagacatggacagcaagatgaagaagatggcagagctgcagctgtccgtggtgagcgacccaaagaacaggaaagccatagagaaccagatccagcaatgggagcagaatcttgagaaatttcacatggatctgttcaggatgcgctgctatctggccagcctacaaggtggggagttaccgaacccaaagagtctccttgcagccgccagccgcccctccaagctggccctcggcaggctgggcatcttgtctgtttcctctttccatgctctggtatgttctagagatgactctgctctccggaaaaggacactgtcactgacccagcgagggagaaacaagaagggaatattttcttcgttaaaagggctggacacactggccagaaaaggcaaggagaagagaccttctataactcaggtcgatgaacttctgcatatatatggttcaacagtagacggtgttccccgagacaatgcatgggaaatccagacttatgtccactttcaggacaatcacggagttactgtagggatcaagccagagcacagagtagaagatattttgactttggcatgcaagatgaggcagttggaacccagccattatggcctacagcttcgaaaattagtagatgacaatgttgagtattgcatccctgcaccatatgaatatatgcaacaacaggtttatgatgaaatagaagtctttccactaaatgtttatgacgtgcagctcacgaagactgggagtgtgtgtgactttgggtttgcagttacagcgcaggtggatgagcgtcagcatctcagccggatatttataagcgacgttcttcccgatggcctggcgtatggggaagggctgagaaagggcaatgagatcatgaccttaaatggggaagctgtgtctgatcttgaccttaagcagatggaggccctgttttctgagaagagcgtcggactcactctgattgcccggcctccggacacaaaagcaaccctgtgtacatcctggtcagacagtgacctgttctccagggaccagaagagtctgctgccccctcctaaccagtcccaactgctggaggaattcctggataactttaaaaagaatacagccaatgatttcagcaacgtccctgatatcacaacaggtctgaaaaggagtcagacagatggcactctggatcaggtttcccacagggagaaaatggagcagacattcaggagtgctgagcagatcactgcactgtgcaggagttttaacgacagtcaggccaacggcatggaaggaccgcgggagaatcaggatcctcctccgaggcctctggcccgccacctgtctgatgcagaccgcctccgcaaagtcatccaggagcttgtggacacagagaagtcctacgtgaaggatttgagctgcctctttgaattatacttggagccacttcagaatgagacctttcttacccaagatgagatggagtcactttttggaagtttgccagagatgcttgagtttcagaaggtgtttctggagaccctggaggatgggatttcagcatcatctgactttaacaccctagaaaccccctcacagtttagaaaattactgttttcccttggaggctctttcctttattacgcggaccactttaaactgtacagtggattctgtgctaaccatatcaaagtacagaaggttctggagcgagctaaaactgacaaagccttcaaggcttttctggacgcccggaaccccaccaagcagcattcctccacgctggagtcctacctcatcaagccggttcagagagtgctcaagtacccgctgctgctcaaggagctggtgtccctgacggaccaggagagcgaggagcactaccacctgacggaagcactaaaggcaatggagaaagtagcgagccacatcaatgagatgcagaagatctatgaggattatgggaccgtgtttgaccggctagtagctgagcagagcggaacagagaaggaggtaacagaactttcgatgggagagcttctgatgcactctacggtttcctggttgaatccatttctgtctctaggaaaagctagaaaggaccttgagctcacagtatttgtttttaagagagccgtcatactggtttataaagaaaactgc

SEQ ID NO: 1064 - DNA, 4334 bp, Homo sapiens
cttcgtagttgtcattcaagaagtttgaagatgttttcaaggaaaattgtgtagtgttcaagttatggaatatacaaatatccctattcccctattccccctcccaagttaaatgccctcttattagaaagcacccctgtgaacccctgggatgactcgatgctttcaacccctttattcctatgttctgtttgccttcagaatgttctttctatggttttctttctgcattttggtaccattttcccttagctgtttctcaacaatttttccttattcctagtctttttaaggggataatactcttctattttgcagttttattctttatggcacttcatttctctaccgccaccatgttttttgtttgtttactctttcagatagaatcatttggttaagagtgtcttatttttccacaagcacaaatctctgattgttcctttctttaatattgtcaaaatctcactgctattactcattggtataagaatttgatttttttaatgtcttaagatctttttaacccagatcttgacatcacttctctgacgttttgtttattttcattgtaatttgtgtgtccaattgaagaatgttcaaatgagttgagggtgggtcaacatactgatggagaactctagacaaaaattgctgccagggttcaacctgatcttcagtttaactgccatggctgctcacctctttaagtctgttagctcaacagccacatatttttctttaaggtttgccattctgtggacactagaccagtatctaaaattattatgtgtgctttacttgtttttgttttttgaccagggtatatttgcagggtgggagttgcattgtaattatgaagaaaccaaattggtaataaaaagtcatttcaaacattgctttctatgctgtcaacttaagaactctgcttttgagttaggtgaaatctacatacccactcttcagctgcagagtagaattattcaccattatttattcatgccttgcttgggatatagaatacaatggattatttgaccttgtctttttaagatgaaaatgtaaagtaaatttcttttaaatagtatgatatcatcataccttgtttgtctttttacagatactattcgttacttgtccttgcatgacaacaaatacatcagatactttcctggacatagcaaaagggtggtggccttgtccatgtcacctgtggatgacactttcatttctgggtctcttgataagaccattcgactctgggatctccggtctcctaactgccagggcctcatgcatctgcaggggaagccagtttgttcttttgatccagaagggttaattttcgctgcaggtgtcaactctgaaatggtcaagctttatgaccttcgttcttttgataaggggccatttgctacctttaagatgcagtatgatcgaacttgtgagtggacaggacttaaattcagcaatgatggcaagctcatcctcatttccaccaacggcagcttcattcgtctgattgatgcattcaaaggagtggtgatgcacacatttgggggttatgccaacagcaaagctgtcacactggaggcttcatttactccagactctcagtttattatgattggttcagaggatggcaagatccatgtctggaatggagagagcggtataaaagtagctgtgttggatggtaaacacacaggcccgattacctgtttgcaattcaaccccaagttcatgacttttgccagtgcgtgttccaacatggccttttggttgcccaccattgatgactgaccctgttgctgcttggctatttctgtatagtgagggcggccagcaggaagaaactcagagggaactgagataatagtgggattggatcatttgactgggctggagaacatccttttacatggccttcccatggatgtgctgtacatctgctcaaaagaaaataattactttgatgagcgtcttcaaaaggactcttggtgcaacagactcaattggaactcagcttttctaactgtcactgcaccaagctctgctggaggagtgaccagactcacgatttggtatagtggggctctcaagcatcttcaatttgaatgtacatgctgctgaggagccggtgaagtcatcagttccgcgcatcccttctaccctccaactgcatgggaagccaaagtcctggttttgaaatgcttgggcagctcagccgcttgccctcaccctgcatgtcttgttactgggtctccctgtgtacttgtggcattatccacaaccatcatgtttcttaggtgccaaacatttacagaaacattttcatatatcttggggtcagagaaagggacagatacagaaggaccttgcttgcaggaagccatgcagttagtttctgcagttagtcgtgtgaggctaggtggttgggcaggcctcgggctgtaggtgttgggtgggaaaaagacccaagggcctgaaagggagggaaaggggagggtagcgggagggtagcaggtgagttcctagggctggaaggtttagcagcagcctggtgcagtgccctgtcatcaagacaaacccacggtcctcctgggtgcctaccaagcttggtttgtacaaaagcaaggtgggagtctatttttgtacatgagatacatcacacttacctgtgggccagtattgtgaagtgagtctgagttgtttacactgatgccttccctgcccaccacaaattgtgtacatagtcttcagatgataccacccctttccccagctcccaaccaagagctggttctaggcctgtgttatatgtcatatttagcgtttttatatatgacctttgatttctgttgtttgtattttagcacagtgtatgcaccttcatttaaatacatctgtgtgcatacagatacgcatatatgtgtgtgcgtatgcatatatctctcatctgtagtttccaagagttcagctgaagcagatggagtcctgcagcccaggagacaccctgcatccctgctaatagtgtttgccacaagtattagtgagtcttccttattaatattttcatttcagaagactgaagcaaagctgatagtgtttgctgtttctttggcagctaagtgagggtcttgggatgacttgctgtgttcctcaagctgcactttggggccatctctgcagtattagccccctttttgcctggtggtactctgtctgtgcctgtgtgtgtgtgtgatagtcactcttgcatggcttccatgtctggtttgtggcatttggggataaggtgctgaagccagagcatttgcagtttgtttgaggcctcgttgccaatgatagatcactcctgttgacctggtatgtctgcttgcttgctgcttttccttgctttctcttggaagaggagaggactctggtcaggcccaggctgagtgagatgagctgcagctggctcatggccttcttagagcagagagaggagtatgtcattttactaagttcctaaacaaacatttatgcaggcaacactccttgcagatccagaaactgaggcacaatagggttatgacttgctcaagaatatgtagctgctagggggtaaatcaaggcatcacaatttctgttcagcgggcaggaataggctgtgaattgctagcactttttttttttaagcaattactttttgacttgttcctctgaaagtgcaagaggcgtacacctttcccaaatgtagactagaatctgcaggatgccacccactgtatagttctgctttcccagagaggaagaacttttagaaaccaaatgatcttaattgttattgcccacccctggcttttccgggtagaaaattcacagtaggaatgattgttaagagagagtgcttggaaccatgggttaacaggaaaggctacctaacttcacatatctgcaaccagagcagccaccaagcattacttagcagcaggaaaatgattgtatttgagttcctgtgtgtccaaaactgaggcaccatgttctttgaaaacatgccacctcaaggctgggcgcggtggctcacacctgtaatcccagcactttgggaggccgaggcgggcggatcaccggaggtcgggagtttgagaccagcctgaccaacatggagaaaccccatctctactaaaaatacaaaattagccgggcgtggtggcatgcgcctataatctcagctacttgggaggctgaggcaggagaattgcttgaacccaggaggcggaggttgcggtgagttgagatcgtgccattgcactccggcctgggcaacaacagcaaaactccgtctc

SEQ ID NO: 1065 - DNA, 2207 bp, Homo sapiens
gaaggatgcctggcccacaaatatgcattcagtgcacatttcttgctacagttctgctaatcctataaaacatatgcactatgatggatgtgtctgggtgccaggaggacacaaaggagcactaactcatccagaccagaagcttcccagaggaggtgattcccaaggtgaaatccgaaagataaagggagtgagttatccaggagaagagaaaggaaaagcatattccagacatcaggataggacagtggaggcaaaacagcatatgctatatatatatggaattcacaacactctggtatgactgattagtaaaaagtaggaaggcagaccaagagaaataaggagacatggtaaggtgagtgggcaataatgcatgatctgaaaaataataatgcatggacttagtgtggttcacatatcaggagcttctccaatagccaggctatgaggcactaaaatgaggaaatatggtttccaaacttcgcaaatacttatagtccagccacaggggatatactgataagctcagctcaaatgtcacctcctcagagatgctttctcaaccacccttagttccatgaggactgcatcattgtttaggccactcctgtatccccagagcacagaacattgtctggctcatagtaggtgctcaaaagttttgttgaatgaatgaacaaataaacgtgtaaggaagtcaggcacagcacttgcccacaggaagcttataagatgagcggcatgccattgggagtttgaatgatatatggagatccaaacagggcatcagaggactgctcagaggagtcagggaattaagaaaaaattgggagccagtgagccaagatgtgttaaaagcaagtgatcaagcttagattgcagtgttagttaatagagcatatgtgtccctgcctgatgcattaccttccctgcagtagttagccttctgggaccctgaaaagcatgcagaaaggttgacagcttacaatcaataccatgttcactgatgcaggaagcaacattatcacatccaagatattgcccccacacccaggctgcagcactaaatattccccataacaaggcaaagggaagtgacaagagctattattctcaaccctcccacttggaaacaagaggtgagacaaaccttcccctagatgttcttagggaaaggcaagacccccaaagaaatctttcagagctgagcacatgcctaatacagcaagacagggatgggagaagattggcattttcatttgcctgggtgtccacaatattgcaggggaagctctgtgggcagctgggaaatacaacaataaattggagggggatgaacaatagggtcagtggggctgtgtgctgagtgaatgctggattttattctacatgcccaattcactccaataagataaacttgacttcctccagtgtggctttcttatttcagcttctctgactgtggcataattgaaagtcatatttcatctagaccattggttttcaactccaaatgcaggtggcttatgaagactcagcctgaatatataaagagaacagcaaacaatcatagttgcatattaaagacaatctatttctccgtaaaggaaagtaaagtgagtcatattacatacaagccacaatacagaactgatctgaaatacactgcggaatggcctttcagtctatgctggactctaacaggaaaaaggcagaaggtggtcaatggtgcatttatttaaacccctcatttcctccctgacgagaagaaggacaacagttcttatttttcatattatttttgaaaaggcagaaaggttaattatatattgacatgatttggatctgtgtcctcaccataatctcatgtcaaattgtaatccccagtgtttgaggtggggccaggtgggaggtgattggatcgtggaggtggatttctcatgcatggtttagcaccatcttcttggtgctattctcgtgatagtgagtaagttctcacgagatctggttgtttaaaggtgtgaagaacctcccctctgtctctcttgctcctgttcctgccatgtaagatatgctggctccccctttgccttctgccatgattgtaagtatccagaggcctctccagaagctgagcagatgtcagcaccatgcttcctgtacagcctgtggaaccatgagccaattaaacctcattcctttac

SEQ ID NO: 1066 - DNA, 2898 bp, Homo sapiens
agattagaaacttcgggtggagagggcggcggcgttgaatgtgtggcggaagcgctgggggtcacggctccgcgcgccgccggacagccggcggcgtctccacagcatgaattacccgggccgcgggtccccacggagccccgagcataacggccgaggcggcggcggcggcgcctgggagctgggctcagacgcgaggccagcgttcggcggcggcgtctgctgcttcgagcacctgcccggcggggacccggacgacggcgacgtgcccctggccctgctgcgcggggaacccgggctgcatttggcgccgggcaccgacgaccacaaccaccacctcgcgctggacccctgcctcagtgacgagaactatgactttagctccgccgagtcgggctcctcgctgcgctactacagcgagggtgagagcggcggcggcggcggcggcagctccttgtcgctgcatccgccgcagcagcctccgctggtcccgacgaactcggggggcggcggcgcgacaggagggtcccccggggaaaggaaacgtacccggcttggcggcccggcggcccggcaccgctatgaggtagtgacggagctgggcccggaggaggtacgctggttctacaaggaggacaagaagacctggaagcccttcatcggctacgactcgctccgcatcgagctcgccttccggaccctgctgcagaccacgggtgcccggccccagggcggggaccgggacggcgaccatgtgtgctcccccacgggcccagcctccagttccggagaagatgacgatgaggaccgcgcctgcggcttctgccagagtacgacggggcacgagccggagatggtggagcttgtgaacatcgagcctgtgtgcgtgcggggcggcctctacgaggtggatgtgacccaaggagagtgctacccggtgtactggaaccaggctgataaaataccagtaatgcgtggacagtggtttattgacggcacttggcagcctctagaagaggaagaaagtaatttaattgagcaagaacatctcaattgttttaggggccagcagatgcaggaaaatttcgatattgaagtgtcaaaatccatagatggaaaagatggcagtgggatcaactattctgctgttcatagtttcaagttgagtcgaaaccatgtggactggcacagtgtggatgaagtatatctttatagtgatgcaacaacatctaaaattgcaagaacagttacccaaaaactgggattttctaaagcatcaagtagtggtaccagacttcatagaggttatgtagaagaagccacattagaagacaagccatcacagactacccatattgtatttgttgtgcatggcattgggcagaaaatggaccaaggaagaattatcaaaaatacagctatgatgagagaagctgcaagaaaaatagaagaaaggcatttttccaaccatgcaacacatgttgaatttctgcctgttgagtggcggtcaaaacttactcttgatggagacactgttgattccattactcctgacaaagtacgaggtttaagggatatgctgaacagcagtgcaatggacataatgtattatactagtccactttatagagatgaactagttaaaggccttcagcaagagctgaatcgattgtattcccttttctgttctcggaatccagactttgaagaaaaagggggtaaagtctcaatagtatcacattccttgggatgtgtaattacttatgacataatgactggctggaatccagttcggctgtatgaacagttgctgcaaaaggaagaagagttgcctgatgaacgatggatgagctatgaagaacgacatcttcttgatgaactctatataacaaaacgacggctgaaggaaatagaagaacggcttcacggattgaaagcatcatctatgacacaaacacctgccttaaaatttaaggttgagaatttcttctgtatgggatccccattagcagttttcttggcgttgcgtggcatccgcccaggaaatactggaagtcaagaccatattttgcctagagagatttgtaaccggttactaaatatttttcatcctacagatccagtggcttatagattagaaccattaatactgaaacactacagcaacatttcacctgtccagatccactggtacaatacttcaaatcctttaccttatgaacatatgaagccaagctttctcaacccagctaaagaacctacctcagtttcagagaatgaaggcatttcaaccataccaagccctgtgacctcaccagttttgtcccgccgacactatggagaatctataacaaatataggcaaagcaagcatattaggggctgctagcattggaaagggacttggaggaatgttgttctcaagatttggacgttcatctacaacacagtcatctgaaacatcaaaagactcaatggaagatgagaagaagccagttgcctcaccttctgctaccaccgtagggacacagacccttccacatagcagttctggcttcctcgattctgcattggagttggatcacaggattgattttgaactcagagaaggccttgtggagagccgctattggtcagctgtcacgtcgcatactgcctattggtcatccttggatgttgccctttttcttttaaccttcatgtataaacatgagcacgatgatgatgcaaaacccaatttagatccaatctgaactcttgaaggacatgaatggcctaaaactgattttttttttttttccgttaaaatgtgtgtgtcaagatacggagatttcagggttaaagtatatttcagttttctttagggcaacatatatttgaatttaaaagcactttattt

SEQ ID NO: 1067 - DNA, 3197 bp, Homo sapiens
gactcttagctgaacgcggagctgcggcggctatgctgtggagcggctgccggcgtttcggggcgcgcctcggctgcctgcccggcggtctccgggtcctcgtccagaccggccaccggagcttgacctcctgcatcgacccatgtgtgcctggatgattgatagcttcggaaatgaggaacagaggcacaaattttgcccaccgctctgtaccatggagaagtttgcttcctactgcctcactgaaccaggaagtgggagtgatgctgcctctcttctgacctccgctaagaaacagggagatcattacatcctcaatggctccaaggccttcatcagtggtgctggtgagtcagacatctatgtggtcatgtgccgaacaggaggaccaggccccaagggcatctcatgcatagttgttgagaaggggacccctggcctcagctttggcaagaaggagaaaaaggtgagtggctgttggacaggaaacaattcaggttatgagactctgccacctgccagcccaactcctgctctatttcagaaaacaggtttgcatacttgctaacctacctttgaagcagttgcttctattaggattttcaacaggagcatatgaaatacaacagggcattattaaacactaggcctctggggaaagtgacaatgtttgccagtaaattcttcaagccacctgtgagtgttctgacctctcctgcctctgcttttggcctgtgttccttatccagctgcttacgttggtgcactttgttgctccaggaagagacgcttagagaagacctggtgttggccacaagtctcagtaatggaaggcgtgtggtcccttttgcttctttgattaaaaataaagtaaaactcattggagatgattgtgggtatttcagcaacccaagaaggacacttaggtactgtaagtaatttgaaaagtaagatacttctaggattaagagccgccatggccagggcatgaacaggagacctgtgatcatgtaactgtaattggtaataagggctcaagacccattcagattttttagaccagatgctcaaagcagtcatctctctctagtttgtactgttatggggggactttgtgagagaaggcaggtaatgaaatgacccctaagtgtacctctttctcacagctcctcgggtttctgtattttcctacaggatccttcctgatcctctgtaactgtaaggcattatgcattttagcatccccttctctttggtaacacagcaaccatttcctaggcttctactgtgtgtgaagcccatgctaactcctgggcaggaagaccttcagtaaaaggcttagaaatggagtttatcctatcaacaaaagagagcaaggaaatgatgtaaaggcagtctattttcagagccagagaggaactgggagattgtagatagtttgtggttttcaattagaggcactgaaattgggggcagttggtgtcacaatcctaaaagaagttgtgagaagtgtttgtaggttagtcaggtagagtagacattagtagattctcttaataagttagaaaatgtttagctgaaacaggtatctttctgagtgctgacaggcctttaaacctgaactttttctttttccccattttaagttcttgtgggtctaagtcttgggtgctgaaacccatacctcacaggctcccgtccccagggaaggccgccctacctgctggattgttgggcaaccacgcagtccctgatttttgccaggtggggtggaactcccagccaacacgagctgtgatcttcgaagactgtgctgtccctgtggccaacagaattgggagcgaggggcagggcttcctcattgccgtgagaggactgaacggagggaggatcaatattgcttcctgctccctgggggctgcccacgcctctgtcatcctcacccgagaccacctcaatgtccggaagcagtttggagagcctctggccagtaaccagtacttgcaattcacactggctgatatggcaacaaggctggtggccgcgcggctgatggtccgcaatgcagcagtggctctgcgggaggagaggaaggatgcagtggccttgtgctccatggccaagctctttgctacagatgaatgctttgccatctgcaaccaggccttgcagatgcacgggggctacggctacctgaaggattacgctgttcagcagtacgtgcgggactccagggtccaccagattctagaaggtagcaatgaagtgatgaggatactgatctctagaagcctgcttcaggagtagaacccacacttgttctggcctggtgttcagtgcgactgcagtcagtgttgagtggtgccatgtgggccgctctattccaaaggaatcatggattagacccaagggctgagctcctctagggcaggacctgcaccctgtgtgttggcaccagcatcgggtcttggactggggcagaatccccagtggaaccggaagagctggactgatgagaaacatcagaagaacacatactaccttgttttcctaatgccagaagggtgaccagtgaagattcaccgtcaaaccatgaaagtcctttcttggatccactttatcttgattagtctgcattttactagttcactggatccctcctctaggggcctggggactttcactgatgctcttcctgattctagagcaaagatgtgggaaggggaaatggaggaatgccctcctgtctgtgtcgttctctgtgccacagctacagatgcagaaggtttctctggatagcacacctctgaatgtaaatcatgataaaatggatatttggaaacttactcctaagctgtgatttagggtgtatttctacttctggactgcctcaatatcaagggctgagacttttgaattttgaatattcgttgggtttcatgttaagaagcctgtggtctaggagtgctattcagtgtttcttttcctgataaacactttgaatattttttttgtgtttttgtttccttttctgaagctgttcctccttttaaatatttttaatcacattgataaaatctatccttcaccacctctggttctactatagttgatttttattttaaatgtttaattgtatttgattaaacacttaactggattttggaataataaaactctcgtccaatttggctttt

SEQ ID NO: 1068 - DNA, 2461 bp, Homo sapiens
gtagtccggcccgagccgctcgcgctaggagagcgggcttcgggcacttgacatggcggcagtggcggcgactgcagcagcgaaggggaatgggggcggcggtggcagggccggggccggggacgccagcggcacgcggaagaagaagggcccggggcccctggccacggcgtacctggtcatctacaatgtggtgatgacagccgggtggctggttatagcggttggtctggtccgagcatacctggctaagggtagctaccatagcctttattattcaattgaaaagcctttgaaattctttcaaactggagccttattggagattttacattgtgctataggaattgttccatcttctgttgtcctgacttctttccaggtgatgtcaagagtttttctaatatgggcagtaacacatagcgtcaaagaggtacagagtgaagacagtgtcctcctgtttgttattgcatggacgatcacggaaatcatccgttactccttttatacattcagtctattaaaccatctgccttacctcatcaaatgggccaggtacacacttttcattgtgctgtacccaatgggagtgtcaggagaactgctcacaatatatgcagctctgccctttgtcagacaagctggcctatattccatcagtttacccaacaaatacaatttctcttttgactactatgcattcctgattctaataatgatctcctacattccaatttttccccagttatacttccacatgatacaccagagaagaaagatcctttctcatactgaagaacacaagaaatttgaatagttcctgctttctgcacctcccaccaaaacaaacttttcaatgatcaaaaaatgctgcagattttttgagttcccaatacgtttcatagaaaataagtaagaactatttttaaaatattcaaacaaaactaaaacaaaaatccagtgtcacatgggcctgagattttattttagaaaaaggttgttacataaaacaccctggccagttcatttcagcatgctctttcaaccagaagttcttaatatttatgatggcactagaaagggatttggcattttatgtccttctgtgtccttcatgtatctgatcaatgaagacctgtaacactaagtacttgagagttacagtctgaataatgaagtcgtaccagctgaatagcccagcttgcagtatagttatgtttcagtctgcagtgtgtttagcattcccttgtcaaagtgcttgactgcatgctggaaactttgtatttttgaagcggcaaactctgttctctggaatgctctgaagttatggctgggacctatcccctcacatctaatgaatgaattataaaatgtatatgtctatgaagcttcggggtagtgcctgtaatcagaaaacaacttagaacccttttgtttgtttccaattgagtcattactgcctgccactaagaaacgtgcttgaatctaataagtatgtgtgtaccgtaaagaatatatcttatctggagctcagcctcaatcatgtcttaacaaaatgacaggtctcagaaagggggagctcaatagctcaaaagtgacaagtccttttcacagcaccgttctcagaacacctctgagcaacgtgtttgccagtagctattctcactgatgcactgatggccctgaagaagcggatccagtcacataggaaaggaggctgtgttagtgaaagcacatggaaggtgttgctttagaaaggtagtcaggaaaaccttctggagacccccaaccttctgataaaagagtctctacctccagggaaagccttcttaccacactggcatatcagatgaaagcattgcactgtacctctcgtaacacagcaatacagtcctcttgaggcactcaagcctgagaggaagctcaggatctgacatgttcttccttttcctcacaagtcatcatgattttttattttaaaataatctggaagtaatgggaacttagtttttcctgaactccaaccagaatccaaattggttagatgaggccaggcgcggtggctcacgcctgtaatcccagcactttgggaggccgaggtgggtggatcacctgaggtcgggagttcaagaccagcctggccaacatggtgaaaccccatctctactaaaaatacaaaaattagccaggtgtggtggcgcctggttgaggcatgagaatcgcttgagtccgggaggtggaggttgcagtgagccaagatcatgcctactgcactccagcctgggcaacaaagtgggactctgtcttaaaaaaaaaaaaaaaaaaatcggttagatgagaaagcatgtatattttctatatacaaaaacaagaaaggcgttttgagcccctgtgctcaggcccactcccacactgtggagtgtactttcattttcaataaatccccttattccttccttgc

SEQ ID NO: 1069 - DNA, 3660 bp, Homo sapiens
agcactgggagggttggtgttgctgctcagcacgggggctcagaagccctccccacgcccccattatcctcagcttccccaggctccatccagcaggagggagcagacggtgggccctgcctcctggccttgagaccagaagacggcccagggtttgaagcaggtgaaagtctgagctacttctgcaagtgcagcctttgttccaaggaagcagggctgccccgcaccccggtgtgcaggggggcagctggcttttcccgtctgcagagctccgtctccccaggaggggcgtcctgtctcgggccagcatgaccgccgtctccctgctgctgaaggggagggccccctttctgtgggccttggcctctgtctgtcaaatgacgacgagttctgtggatagaacaaggttagaaacgccacctgacagagcggcctgcaatgcccatcactgtcctggagccagacaggtggaggagagacctcagggctgggccgggtcagctgactccagagtggacaccaggcaatgcccagggaggggactcctggaagaagccggcctcttgacttagggttaaatgtcctctggtttgaagacacaagagtctgcatttgcccaatacttggggttctcagcttttctccaacctggtcatcacagagtgaccagcattggcctggcaatggtgccttcacatgggagcgaaaaggaccagcctgaggtgaggaggatgggtcctgtgtccccactctcccctgagcccggggcgttgcagtggccttgaccttcagccctgggcttcttcctacccgagtccccggcagtgtccctcagcccagcccggcccgttcagcctttgtctggggccagtcactgagggtggcttccccgggacgtcccgggctcccttgaaggagctgctctcagcgcgattctgcggacggatggcggcatctgtgctgagccctccactgtcttgagctcttctaatatcacactgagcactgggcgttgttcgtcccactctacggatgagaaagtcggggctcatgtaggtggaggaaactgcctgagcaccagaacccggggaggcgccgaggctggaccgagcccaccctggctgtgcctgtgccgagctgagcctgctgtggctgtgttgctgcacatttaccaggcagggactcagtttcccctggggtacaactgagggctgggctgggggatcacaaagagggaggcagcacgaggtgcttgtgggggctctgggctgcacgttccagcaggagcaggggcgacggcccacgtctctgaacaggctcttttagtggtgctgggcgggacccgggtgtgcccctcccgtgggccagagcgactctagggcccaggcctggactcttgggctgcaggtgagagccaggcggcggggcagggagtcagaggcagaggcaggggcgaggcagctcctcccggctgcaccccgagacactggaggaagctgtctctgagctcttcctcctgctgtccagaccaggcgctgaaatcaaagacagaactgatactgaccacaaaacctctcagagccacttcattggagaagattagggtcaggcagctgcgggcagctcacagccggcacggggcttccctctgggaggctgggatttgatctccctgtgcaggattttccataggaagagtcagtcccgtgcgcctcctttaagccttaaccaaagcggggttcctccatcaggcctgcgggggcccaaggcccccagctgttgcccgtgtgcacacctggaaccacgtctaagtccttgccgtccagaggccttttctcaccacccacgctcatcctcagcccttcctgccttcagccatgcccgaggctctgccctgggtaataggtctgccctgggtggaggcgctgccctaggtggtgggtctgcactgggtggcgggtctggagtggccaaggcaggtgcggccctcctgggcccttcagtcggctggggcgagagttaaccaacagtctccatggcggggaacaggagggacctgtcccgtgagaggggagtcagggaggactcttgggaagatggcctttcattcaaggcctgaatgagaatcagccagatgtgctggggccaggcaggtggggacgagtgcgcgggggggggctcagcatcttctagaaccaaccacacacctgcaagagagaagacagggtagacccctgcggccccctggggctgagacggctttaggatggtactccagttgcccccatcctttcccgagaccctcctggacctgagctccgggatgcaggagcgccccggtgttccgtccttgtcctcacgggactcagagcctccctccacgagatgctgctgggctcacctgtcctggtggttttcctgagccaggaatagagtcttcacctgacctaacctgaggccatgcccaggccactctgaagtgagacccgacggcctggggaggttcaggggctcataggtggctgcgcccaaccctgccacacttctcctggacctatcagaggtgcatgctgtggtcagtgcctggagacagagcagctccaggccacccacccttccggtctgaagcgtctcaccccacacaaggccccagcaccacaagcccattctccccgttccttggagcagaccctggtggcagcatctacaggggggtcccaggcagcctcaccgcaggcaccacggaggcacggaagagctgccttgcgccagcacagggcacgcagggacgtctgggtgccccggctggcagccactctccccgcaggcagggtctagtgtatccgtgtgcgatgtctgtgattgggctttgtgctgggagcgtaatgaggagcctccccggcctccccagaccccgtcgctgatgggggaagggcacgtggccatcataacacatacatcaccaaacgtgggcttccagcgcggaggaagcaaattaaacgctgcaaacgagcgtcagggtaattatccccaccagggctgggacagggtccaggcctccctgagaacggggcagacgcatgttgagcgcttaagagacggggaactggggcaaaggtgctggtgccacaacagcccagacacagaggagggtcgaggccgccccacacccccatctgctgcgaggaagagaacgatttggagaggagctgaaagtcaagtgagtgcagcccatgaggggaagctcgttggtttaattccagatggttaggaggctcagagacaccatcggagccgtgaatattcatgagccggcagccttgcccaggtagccgaggcctggctggtggctgcgttggctccgctcatttttgaaacgacacagcacttctggattggagacgtgatgagctatttgtagacatgtccttgttgataaggaaacggcactggttgacagaactctccaccctccggcgcggctgggctcttctcccgggggtggggcgggggcattgggggcccgggtttggggaatggggcatcaagaagctgtgagggtagagaagggccctgggctgggtcaggctgaaatgggtccgtctccccagcccttggctctgtcatcatgggagtaacagaataataatgtcaccccat

SEQ ID NO: 1070 - DNA, 3939 bp, Homo sapiens
gattctgtcaggcgctggcggcggcagcggcggtgacggctgcggccccgctccctctacccggccggacccggctctgcccccgcgcccaagccccaccaagccccccgccctcccgccgcggtcccagcccagggcgcggccgcaaccagcaccatgcgcccggtagccctgctgctcctgccctcgctgctggcgctcctggctcacggactctctttagaggccccaaccgtggggaaaggacaagccccaggcatcgaggagacagatggcgagctgacagcagcccccacacctgagcagccagaacgaggcgtccactttgtcacaacagcccccaccttgaagctgctcaaccaccacccgctgcttgaggaattcctacaagaggggctggaaaagggagatgaggagctgaggccagcactgcccttccagcctgacccacctgcacccttcaccccaagtccccttccccgcctggccaaccaggacagccgccctgtctttaccagccccactccagccatggctgcggtacccactcagccccagtccaaggagggaccctggagtccggagtcagagtcccctatgcttcgaatcacagctcccctacctccagggcccagcatggcagtgcccaccctaggcccaggggagatagccagcactacaccccccagcagagcctggacaccaacccaagagggtcctggagacatgggaaggccgtgggttgcagaggttgtgtcccagggcgcagggatcgggatccaggggaccatcacctcctccacagcttcaggagatgatgaggagaccaccactaccaccaccatcatcaccaccaccatcaccacagtccagacaccaggcccttgtagctggaatttctcaggcccagagggctctctggactcccctacagacctcagctcccccactgatgttggcctggactgcttcttctacatctctgtctaccctggctatggcgtggaaatcaaggtccagaatatcagcctccgggaaggggagacagtgactgtggaaggcctgggggggcctgacccactgcccctggccaaccagtctttcctgctgcggggccaagtcatccgcagccccacccaccaagcggccctgaggttccagagcctcccgccaccggctggccctggcaccttccatttccattaccaagcctatctcctgagctgccactttccccgtcgtccagcttatggagatgtgactgtcaccagcctccacccagggggtagtgcccgcttccattgtgccactggctaccagctgaagggcgccaggcatctcacctgtctcaatgccacccagcccttctgggattcaaaggagcccgtctgcatcgctgcttgcggcggagtgatccgcaatgccaccaccggccgcatcgtctctccaggcttcccgggcaactacagcaacaacctcacctgtcactggctgcttgaggctcctgagggccagcggctacacctgcactttgagaaggtttccctggcagaggatgatgacaggctcatcattcgcaatggggacaacgtggaggccccaccagtgtatgattcctatgaggtggaatacctgcccattgagggcctgctcagctctggcaaacacttctttgttgagctcagtactgacagcagcggggcagctgcaggcatggccctgcgctatgaggccttccagcagggccattgctatgagccctttgtcaaatacggtaacttcagcagcagcacacccacctaccctgtgggtaccactgtggagttcagctgcgaccctggctacaccctggagcagggctccatcatcatcgagtgtgttgacccccacgacccccagtggaatgagacagagccagcctgccgagccgtgtgcagcggggagatcacagactcggctggcgtggtactctctcccaactggccagagccctacggtcgtgggcaggattgtatctggggtgtgcatgtggaagaggacaagcgcatcatgctggacatccgagtgctgcgcataggccctggtgatgtgcttaccttctatgatggggatgacctgacggcccgggttctgggccagtactcagggccccgtagccacttcaagctctttacctccatggctgatgtcaccattcagttccagtcggaccccgggacctcagtgctgggctaccagcagggcttcgtcatccacttctttgaggtgccccgcaatgacacatgtccggagctgcctgagatccccaatggctggaagagcccatcgcagcctgagctagtgcacggcaccgtggtcacttaccagtgctaccctggctaccaggtagtgggatccagtgtcctcatgtgccagtgggacctaacttggagtgaggacctgccctcatgccagagggtgacttcctgccacgatcctggagatgtggagcacagccgacgcccatatccagccccaagtttcccgtgggggccaccgtgcaatatatctgtgaccagggttttgtgctgatgggcagctccatcctcacctgccatgatcgccaggctggcagccccaagtggagtgaccgggcccctaaatgtctcctggaacagctcaagccatgccatggtctcagtgcccctgagaatggtgcccgaagtcctgagaagcagctacacccagcaggggccaccatccacttctcgtgtgcccctggctatgtgctgaagggccaggccagcatcaagtgtgtgcctgggcacccctcgcattggagtgaccccccacccatctgtagggctgcctctctggatgggttctacaacagtcgcagcctggatgttgccaaggcacctgctgcctccagcaccctggatcctgcccacattgcagctgccatcttcttgccactggtggcgatggtgttgttggtaggaggtgtatacttctacttctccaggctccagggaaaaagctccctgcagctgccccgcccccgcccccgcccctacaaccgcattaccatagagtcagcgtttgacaatccaacttacgagactggatctctttcctttgcaggagacgagagaatatgaagtctccatctaggtgggggcagtctagggaagtcaactcagacttgcaccacagtccagcagcaaggctccttgcttcctgctgtccctccacctcctgtatataccacctaggaggagatgccaccaagccctcaagaagttgtgcccttccccgcctgcgatgcccaccatggcctattttcttggtgtcattgcccacttggggcccttcattgggcccatgtcagggggcatctacctgtgggaagaacatagctggagcacaagcatcaacagccagcatcctgagcctcctcatgccctggacagttctgcctcctgccctgtcccagtggaggcagtaattctaggagatcctaaggggttcagggggaccctacccccacctcaggttgggcttccctgggcactcatgctccacaccaaagcaggacacgccattttccactgaccaccctataccctgaggaaagggagactttcctccgatgtttatttagctgttgcaaacatcttcaccctaatagtccctcctccaattccagccacttgtcaggctctcctcttgaccactgtgttatgggataaggggagggggtgggcatattctggagaggagcagaggtccaaggacccaggaatttggcatggaacaggtggtaggagagccccagggagacgcccaggagctggctgaaagccactttgtacatgtaatgtattatatggggtctgggctccagccagagaacaatcttttatttctgttgtttccttattaaaatggtgtttttgg

SEQ ID NO: 1071 - DNA, 3113 bp, Homo sapiens
gctagtgcccctcccctcccgctctgtgccccgccgggcggggaccgtgggagccgcggacaagcccaaggccggagcggttccaggaggaccctggtctgcacctgtggttgccaggtaggtggatgtgagagaccctacccttctggttctctagaagccatcccatcgccgctagcatcatgctgtcccctcagagagctttactctgcaacctcaaccacatccacctccagcacgtctccctgggcctgcacttgtcccgccgtcctgagctacaggaggggcctttgagcacaccccctcctccaggagacactgggggcaaggagagcaggggcccctgcagtggcaccctggtggacgccaattccaacagcccagctgtgccctgccggtgctgccaggagcacggtccgggcctagaaaaccggcaggacccgtcacaggaggaagagggggctgcctctccctcagacccaggctgctcctcctcactcagctcctgctcagatcttagccccgatgagtcccctgtctcagtctacttgcgggacctccctggtgatgaggatgcccaccctcagcccagtatcatccccctggagcagggctccccactggctcagcaggccctggcacctgctcaccggacagcttctgctgctctcctgattcctgctccggagcttcttcttcacccgatcctggcctggactcgaactgcaacgccctgaccacctgccaggacgtcccttccccaggcttggaggaagaggacgagagggcggagcaggatctccctacctctgagctcttagaggcggatgatgggaaaatcgacgctgggaaaacggagcccagttggaagattaacccaatttggaaaattgacacagagaaaactaaagctgaatggaaaaccactgaaaacaataacactggttggaaaaacaacgggaatgttaactctagctggaaaagtgaacctgaaaaattcgactctggttggaaaaccaacacaagaataactgattctggctcgaaaacagatgcagggaaaattgatggaggatggagaagtgacgtcagcgaggagccggtgccccaccggacaatcacgtccttccacgagctggcccagaagcgcaagcggggcccagggctgccccttgtcccgcaggcgaagaaagatcgcagtgactggctcatagtcttctcgcccgacaccgagctccccccctcggggtcgccgggcggctcctcggcacctcctcgggaagtcaccaccttcaaggaactccggtcccgaagccgggccccagccccgccagtcccgcctcgagaccccccagttggctgggctttggtcccgccccggcccccacccccgcctgtccctccccgaaggaagaagaaccgacctggactgcagcccatagcggaggggcagtccgaggagggccgggctgtcagcccagcggctggcgaggaggccccagccgcgaaggagccgggcgcgcaggccggcctggaggtccgtagttcgtggtccttcgccggtgtccccggagcccagcggctgtggatggcagaagcccagagtgggactggtcagctgcaggagcagaagaaaggtcttctgatagccgtcagcgtctccgttgataaaatcatctcgcatttcggggccgcccggaacttggtgcagaaggcccagttgggtgatagccggctgagcccggatgtggggcacctggtgctgaccaccctctgcccggccctccacgccctggtggcggacgggctgaagcctttccggaaggacctcatcaccgggcagcgcaggagcagcccctggagcgtggtggaggcgtcggtgaagccaggctccagcacccgctcccttggaaccctgtatagccaggtcagccgtctagccccgctgagcagcagccgtagccgcttccatgcctttatcctgggcctcctcaacaccaagcagttggagctgtggttttccagtctccaggaagatgcagggagctggtgggagcagttgacccaggcctcccgggtctatgcctctgggggcactgagggctttcctctttcccgatgggcaccggggcgtcatgggactgcagctgaagaaggtgcacaggagagacccctgcccacagatgagatggcaccaggcaggggcctctggttgggaagactatttggagtgcctgggggccccgcagaaaatgagaatggagccctaaagtccaggagaccatctagctggctgcccccgacagtgagtgtgttggctcttgtgaagcggggggcacctcccgagatgccttctcctcaggagcttgaggcctcagcacccaggatggtgcaaacccatagggcagtgcgggctctctgtgatcacactgctgcaagacctgaccagttgagcttccggcgtggggaagtgctgcgtgtcatcaccacagtggatgaggactggctccgctgtgggcgggatggcatggagggtctggtgcctgtggggtatacctcccttgttctgtagccctgggaccctttcctgcgtatgtgtctccttcctgtcacctgggaatggaatggccagtgaacaccatcccagaagcattttccctctgcaaaatgacgtttcttcccacgtctgtttctgctaatatttaaaataaactttccttcttccctcctatacccacctgtaaggtgaaatctgctcttcttccaaatatataaaaaaggaattgccctccaggtaatccctttcctttttcccgtctatataagggaatgtcttccttcctatctatctgcaaaatggaaatctagacctccttcttcatccataagtggactgtgccagtacaatacatgcctcagcccccaagcctagaaggacctctagtctccttcctgtgtggaatcttccccactccatccctcccaagttgcctgtattgataatgtactcactcatgctgtactaggtgctgaagcctggacacccttggtgggtgggcctgtggtgatggtttgcatccttcctcctttgtcccaataaagtatgggagttg

SEQ ID NO: 1072 - DNA, 3895 bp, Homo sapiens
ctccctgcagccgccaccgcagccgccgcctgggccgctccgtgtccccggtggagccgccgccgccgccgccgggagctcgatgcggacggagcccgggccgagccatggggatcctcagcatcacggaccagccgcccctggtccaggccatctttagccgagatgtggaggaagtgcgttccctactctcgcagaaggagaacatcaatgtgctggaccaagagaggcgaactccattgcatgctgctgcctacgtaggcgatgtccccatcctccagttgctactgatgtcaggtgctaatgtcaatgctaaggacacactgtggctgacccctcttcatcgtgctgctgcctcccgaaacgagaaggtgctggggctgctgctggcacattcagcagatgtgaatgcccgggacaagctgtggcagacaccactgcatgtggctgctgccaaccgggccaccaagtgtgctgaggctctggcacccctgttgagcagcctcaacgtggctgacaggagcgggcgcagtgccctgcaccatgcagtgcatagtgggcatcttgagacggtgaacctgctcctcaacaagggagccagcctgaatgtctgtgacaaaaaggagcggcagcctctgcattgggcagcttttctagggcacttggaggtcctaaaactgctggtggcacggggagcagacctcggctgcaaggaccgcaagggctatgggctgctccatacagctgctgccagtggccagattgaagtggtgaagtacctgcttcggatgggagcggagatcgatgaacccaatgcttttggaaacacagctttgcacatcgcctgctacctgggccaggatgctgtggctattgagctggtgaatgccggagccaatgtcaaccagccgaatgacaagggcttcacgccactgcatgtggctgcagtctcgaccaatggcgctctctgcttggagctactggttaataatggggctgacgtcaactaccagagcaaagaagggaaaagtcctctgcacatggctgcaatccatggccgtttcacacgctcccagatcctcatccagaatggcagcgagattgattgtgccgacaaatttgggaacacgccactgcatgtggctgctcgatatggacacgagctgctcatcagcaccctcatgaccaatggcgcagataccgcccggcgtggcatccatgacatgttccccctgcacttagctgttctctttggattctctgactgttgtcgtaagcttctttcctcaggtcagttgtacagcattgtgtcttcactcagcaatgagcatgtgctttcagctgggtttgacatcaatacacctgacaaccttggccgtacctgtcttcatgctgctgcttccggagggaatgttgaatgtcttaatttgctgttgagcagtggagctgacttgaggaggagggacaaatttggcaggaccccactgcactatgcagctgctaacggtagctaccagtgtgcagtaacattggtgactgctggggcaggtgtcaacgaggccgactgtaaaggctgctctcccctccactacgctgccgcttctgacacttacaggagagcggaaccccatacaccttccagccatgatgccgaagaggacgagccactgaaggagtcccgcaggaaggaggccttcttctgtctggagttcttactggataacggtgcagacccctccctgcgggacaggcagggctacacagctgtgcactatgcagccgcctatggcaacagacagaacctcgaactgctcttagaaatgtcctttaactgcctggaggatgtggagagcaccattccagtcagccctttgcacttagctgcctacaacggtcactgtgaagccttgaagacgctggcggagacgctggtgaatctggacgtaagggaccacaagggccggaccgcactcttcctggccacggagcgcggctctactgagtgtgtggaggtgcttacagcccacggcgcctctgccctcatcaaggagcgcaagcgcaagtggacacccctgcacgctgctgctgcctctggccacactgactccctgcacttgctgatcgacagtggggaacgagctgacatcacagatgtcatggatgcctatggacagaccccactgatgctggccatcatgaatggccatgtggactgtgtacatctgctgctagagaaaggatccacagctgatgctgctgacctccggggccgcactgccctccaccgcggggcagtgactggctgtgaggactgcctggctgccctgctggaccacgacgcatttgtgctgtgccgagactttaagggccgcacgcccattcacctggcctcagcctgtggccacactgcagtactgcggaccctgctgcaggctgccctttccacagatcccctggatgccggggtggattacagcggatactcgcccatgcactgggcctcctacactggacgtgaagattgtctggagttgttacttgaacacagcccgttttcgtacctggaaggaaaccccttcactcctttgcactgtgcagtgattaataaccaagacagcaccacagagatgctactgggagctctgggtgccaagattgtgaacagccgagatgccaaaggacggaccccccttcacgccgctgccttcgcggacaatgtctctgggctccggatgctgctgcagcatcaagctgaggtgaacgccactgaccacactggccgcactgcgctcatgacggcggctgagaacgggcagaccgctgctgtggaatttctgctgtatcgagggaaggcagaccttactgtgttggatgagaacaagaacacggccctccacttggcttgtagcaagggccatgagaaatgtgccctcatgatcctggcagaaacccaagaccttggccttatcaatgctaccaacagtgcgctgcagatgccactccacattgctgcccggaatggtctagcttctgtggtacaggccctgctgagtcatggggccacagtgctggctgtggatgaagaaggtcacaccccagcactggcctgtgcccccaacaaagatgtggcagactgcctggccttgatcctttccaccatgaagcctttcccacccaaggacgccgtcagtcctttcagcttcagcctgctcaagaactgcagcattgcagccgccaagacggtgggtggctgcggcgccctgccccatggggcctcctgcccctacagccaggagcggcccggcgccattgggttagatggctgctactctgagtagccccctccagtgtccctcccccgccggtggcttgatatctaattctatttatttagaaaaagtctaaacatttagggcactttaaaggagaacacgactgggtggagggggcggaggggaaggaagccctggggagcagctgctcacccctttgccacaccatcttggcctggcaggggtctgggactgacagggagcaccccaggcccttggtacccccagggcgaccccttctgccaagtgtcccaaaatgattgctaaatgcctggctcccccactctttgactccatctcttggttccctctttctgctgccagctcccccgactcttccctggggactcctctctgtgtcccccttctcccctgcccctactgccaggcagatcccctcttcttccatacccatgccctgcatgacctgtgatgctgcagacaccaccatcctgtgtgcaggtgtgtgttggggggcacggaggggcatgttccatgtcctgttgcaccctccaccctgtgacccatgtactcggttgtaggaagtaaagagaactgagcac

SEQ ID NO: 1073 - DNA, 2924 bp, Homo sapiens
tgttgatctttcttgtgggtgtccacctagcctaaaagccaagtgaagaagaacataaaaaagcagaagaggaaaaatgaagaaaagaggaaaaagagggtggggccagagaaataaagagtaggattagtaagtgaaagaaaaagttgctttgttgtgtggggggggtgttcttgcttgctatactcaattttgctttcccgtgtctgctgtacacaaaacacctgatctctgcaatgtattgctcctttctttcattcacctgtgatgcataagactagattattttcggcatatctactgtttgcaaagtgttactactgaaaaatatccctgaaactgagctctttgggtggataagcaaaggaaaaatagaaaataattaaggtaagggaaaggctaaaggataagcctgtgtataaatgggaaatggataagctcaaatgcattatctggtttcaatgtaacacccaagatttaacaaactcagtgctagaagacttgaaaataagtgtaatttaccaccatctattgagcagctattatgagccaggcactgtgctagggctggggatacataagtgaataatgcacagtcccagaactcagattatttggttttgttttaccaaatccaaatgcagtacctgcatttctcttttccaaactgagatggctatcaaacatgtctttcagaaagtgtttgcaggtgagaagatgcgcaaggtgaaggaaagttttcctgacccagatcttagaaggaaaggagaggatacattttgctttgtggcatatttattgtgggcaaaaagctactattgcctaagggaagtacggctgaccttagcccatccctggggcatatcttgtgcgtgtggtggggagacaaatcaggtagggaacaattccttctcgccttacctctctagcttccatgttcttttatggaacaaatcagattaatactaatgttaaggagagctttaaaggagaaagagaatcaataaatcacagcctgaaagttgtgtatgttgtgtgcaagctcagaggggcagtcttcttcaatttgccttgtgctggtgaattgcttgaatgaacttcggtatttcttaacaccaggtactggagcccaccttctttctctccctctggtttcctctttaaatcacagcctgaccccagtctttatagtccattgtaagtggaagttatagctctattcttcacccacaccttgctccctatcattgatacttagaagaaagtaacaatttgcagtactggctgaactcctttgggaaagtttctggagtgtatcaaataagaattcatcatagtaacatggtcgttactggctgaacaaaattctttttgagactattgtacttagtcattaaataattgtttactaaggcaattttcatgtttctggaattcagtgtaatagttaacagctgtatatgtctcacaaaagaaactacttaggttggaaacaatggaaggttgtgtataattaattcaatcaggtcatgaatatttatgtaacatatggcattttaatttatatgttcccattctcatacttcattactatacagcagcaacaagataaatttcaggttttttgtttttttattaagtgggccatgtctaaaagttgtcacattcctggttgaatattatggacaaaatttccccattaaagtagttttgtctttctcaaggattatcctttagggttgggtggattaaaaacattacattagtgcttcttgagcatacaagtcactagggatcttgtgaaaatacagattccttttagtaggtttgggatgaggaatgaaggtcttcatctctcaaatctcccaggtgatgtggatgctgccagtccatcgaccacactttgagttgggagattctacatcttttgagaaatatccacactgaagcctatactcttaaactttcaaagactctgtgttcatgtctgtgttctgcaagaattttttcttttaagaaataaactgcataaagtaaaatcagaaaaccataacactggttttccaaatttgccacaaatactgtaatactctgtagagtaaaatgcaaagattattcctgttacaagttttctctgtatcaagtgcaggaaaggaacatgggtagagtcatgtaccattcttatcagtcaggagatgacacgtggtaaatttctcttcttgattttcctcttgattatactcacataagggagctccattttaacaaagatgaaattctgttcacagttaacaagaatttagcaacttcttgcttggcaaaatctgagacaaccttacaaaaacatcctacattaaattcagaattttgggtagctgcataagctgaagattatggaaaacctgagctgaaaatggcacctggatctgtaacttcttgtcttgaactcttttttgagctttattctgtgagagatcttcccctacagtgattttttctgtttctcctcagtcgctggggtctcagtaaggggtggaggattggtgtaaatgagacagtcacataaattgtctaatttgagcatgccaagtgatttttgtcagcctcttttggtcataaaattttggtatagctattgtgaaatatagtgtcataaatttgtcataagccattaatgaaggaagagaagcagaaatttatttctgtgggaatgcactcaaatatcaagcagatggtgttctacaacatttatttgggaaaatgtgtatctgttacataatctgaaatatgtctttttcacatttaaaaatatttgggtcatgatttagagtttttattggattgttttttaaactgagaggaagaagaaaggtaattgtattttaaaacatttgacatgttactaataaaatttatttctggtg

SEQ ID NO: 1074 - DNA, 2538 bp, Homo sapiens
atgaccatccttttattagaatccttgggatgctactagtctggatttgcagaattcaccaaaatgaatgacttttgctattacctgtcaagttgatttcatcttctgtgtccagacagctatccaaaccaatataaccaggaaatttactctggattcctcagatcagtagatgaatggttttgttgttgttttgttgttgtttgagacggagttttgttcttgttgccctggttgcccaggctggagtgcagtggcgtgacctcagctcaccgcaacctccgcctcctgggttcaagcaattctcctgcctcagcctcccgagtagctgggattacaggcatgtgccaccaccacacccagctaattttgtatttttagtagagacggggtttctccatgttgatcaggctggtcttgaacccccgacctcaggtgttccacccacctcagccttccaaagtgctgggattacaggcatgagccacccggccaatgaatggtttttaaaacaaaaatcacaatgagcctgttgccttttattggctttggttttaggaggagaaactttaaaagcttggagttgaaggataatggttcaacctttcttggcgtgtaagtgatttatgacctcctaatttaacgaaagtaacaacagcgaagacaagccacttattagcgtttcctggcaattccatcagggagataggggttggggccttgagagcccaagaattaaacaacagctgaatgttattcaaaatctaaattcattatacacattgttgctttactaaaatctttactaaaatgtgatcaagaaagccttggcagggcacggtcttgaaagatgagtaccaactcatcttgggcaggcagatatcttgccaggcagatagggtggggagagccttcagggcaagggaggagcaagggcaagagtcttgaaggctgaagagtgagcaggatgtggagaggaagtttcaggctccacagggtcatgggggcaggcccagagcaaggaagagagaaaggagggtgatccagggaggtgagttgatgagaggaggcagatgtactaagtccatacatgagtgcagtatttgacagtttgcaaagcaccttcatacccactatctcaccaggtcctgctagctcagtgatgaggtgggacacctaacgtcctcacttccaggtgatgaaatggaggcctggaggagtttctaaagtcgtacaactcctaagtggtggagccaggattagaatgagatattttgacctctggacactgctctttccaccataaactgatatgttccaggagcattgaagaaagcttcctagcatattgggaagaaaactcatggttggggtgtggctgggtggatggatgggcggatggatggatggatggatggatggatggatggatggatggatggatcaatgggtggatgtggagatcagagtctcaagagaaaaagagttaagagtccagcagttgtgcaggtgagatgggggattcaaacgtctatcaggaaggtggatttgtgagatacagaggcagtggagtgaatagaacttcatgtctgaccacatgtgagaatgagaaagaaataagagtgtaatggccggacacagtggttcaggcctgtaatcacagcacttcgggaggctgaggtgggcagatcacctgaggtcgggagtttgagactagcctgaccaatgtggagaagccctgtctctactaaaaatacaaaaaattagctgggagtggtggcgcatgcctgtaatcccagctactcaggatgctgaggcaggagaatcacttgaacccaggaggcagtggttgcggtgagccgagatcacgccattgcactccagcctgggcagcaagagcgatcaaaaaaagaaatgagaatgtaggataacacccaagttttgaccttggatgattaaaggaccacaaaggaaaacaaacttaaaccttacagccaaagtggtaaaggtagagatgatgaatgttaacttcgaatatgtctaatagtcagttgatatcaatggatctggaattcaggaaaagtgtctgagatatccaggagattcattaggtcatcagcgatcaaaggttagcattttattatagatgttcactgtgttattataaataacgttaaaaaagagaaaaataaaaaggaaaggtcttaaacatgtaacagttgcagattggctcatttatgttacagccatatattgaaatgcaattcagaccttaaaaatgagtgctggctttgggaggccaaagtgggcagattacttgaggtcaagagtttgaggccagcctggtcaacatggtgaaacctcatctctaccaaaatacaaaaattaaccaggtgtagtggcatgtgtctgtaatcccagctgcttaggaggctgagtgaggcaggagaattgcttgaacccaagaggcagaggttgcagtgagctgagatggtaccactgcactccagcctgggcaacagagtgagactccgtctc

SEQ ID NO: 1075 - DNA, 2771 bp, Homo sapiens
ccttgtttatatgttatctttctcttggctcccatgacaaaacactgtcctggctttcttcctatctctggctgtgtcttccatctcctctgatgggccaccttcttttacctggtccactggatgctgggtttctcaaggcttgatcttgaggcctttcctctttttactccaaactctcagcttgcatgatctgcacccaaggcttaaatatcacctacaccttaagactcacaatgtttttctctctttcagacctcttcaaccagctgcttacctattatctcccctttgatgtctcaaaggtacctcaaattcaacatgaccaaaaacagactcctattttccttcctaaatcatattctccctatgccaatgacaggcgtctcagtgaatgctatgatcatccctcagaataggagagaacactaacaatcatcttggccattcctttcctccccgctcttccatttagctaacatgtcaccatagttgattttaaatactaaattccaagcatttctagactttgcctatttctctccatctacggaaaattaaagctacctttcttgctctattgcaatggcctcttcaaaggtttgctaggatctgttttgcccacattgaagccagaaggttcttttgtattatataaattggatctgttgtcccctttcctaaaccctcccacagcctcccattgctcttaggtaacctccaaactccttcgcatggtgtgcatgtcctgaggtccagcttctgcctaactagctctccagactcatcatatgccatgatcccccggctccatgaagctgggtcccacgggacactttccagtctcatacttgccatgctccctctcacaagagtgaatttgtatatggtattccctcagtctagaacgcttttttctgttcttctttgcctagtctcaacttggtgagaaggcctaagatggtagtgaagcagattacaacaatttccatagatgagaggggctacaatatgaaaaacgaaattgaggcatagatggtccctccttttttgagacggagtctcactcttttgcccaggctggagtgcagtggcgcgatctcggcttactgcaagctccacctcccaggttcaggccattctcctgcctcagcctcccgagtagctgggactacaggagcccgccaccacgcccggctaattttttgtatttttggtagagacggggtttcaccgtgttggccaggatggtctcgatctcctgacctcgtgatccgcccgtctcggcctcccaaagtgctgggattacaggcgtgagccaccgcgcccggccagacggtccctctttttaaaaagggtcttaccttctatccaaccatccttcctacccttttctattatgaaaatgcccgtaggtttatcagtctgaattcagagaacgggaagaatctacagcttcatgaggacagaagccacagtactgattactcttttgtcactgtgatcagtgcctaccacacatttatatttgttgggtgaatgaatggaagaaacataactataaaaaaattaacagggtgtctattttgtgttaggactagtggtagtataaatattagcaataagaacgccctactgtcagagtttataatcaagagaaaatagatgaacctgccaggctcaagtcactcttctgtgaattgcaccatgaaagcaatatatacaaagtgctcaggcgataaatatatcagagtgattaattctgccctggaaaattacagaggagatatgtgagcagaccctgaagggtaaaaagatttcctcattttttcaacaaatatttattgattgcctaatgagctaggccctggggaaataacagaaaacaagacaccagtcctctcttttggagccctgcatcttaagacaaataagtacacctcaggtcgctttaagcactatggggaactcaaagcagggtgatgggcgagagtggttgcttggggtgtgtgcatgggcatgttatctttaggggagccagagaaggcctctctaagaaggcaacctgagggaggagaggacaatgttaaaaaagagccagtcacagctcagtgtcctggaggggttggagtaagcaggaagcattccaggcagagggaagagaagtatagaggccgtactgctgtggagcatctgcaggaaatcctgtgtggctggacgacagcacaaggcaaaaggggtacgagtggtgggaggcatgaggttggaaaggaaatggctaggagatcacagggctttgtaggctattctggagtaaatggcagaaggcaggccacgttttctttgttaattagcttctagctaattcttcacgaaaaaaacacctatgtaccatcatgactatgagtcctcagacttttcaaggcaattttagttttcgtatgttaataagatactatagtacaacaaaagggctgggcgcggtggctcacatctgtagttccagcaatttgggaggccgaggtgagtggattgtttgagcttaggagttcgagaccagcctgggcaacatgatgaaaacctgtctccaccaaaaatacaaaaaattagccaggcatggtggtgtacgcctgtagtcccagctacttgggaggccgaggtgggaggatcacttgagcctgggaggcagaggttgcagtgagccgagatagtgccactgcactccaatctgggtaacagaatacgaccctatcaaaaacaaacaaacaaac

SEQ ID NO: 1076 - DNA, 2396 bp, Homo sapiens
tcactttcctcttaccgaatcaggcctggacttgctttctggctgggttactttccctctgatgactggctgcctaggccagggctcagggcgtctgagggtgcttagtagaactctgggcccagcagctctgagagagaggctggagggtcagtcctttgtccagaccctgactgtgggcagtcctgttgccttccattgggaagaaggtgtgcctcttcccaccagaacctcgtgaatgctgcatgcacactcttcatggacagtgtcgtccctaccccacagatgggaacaaggactctggtgtcacacagcctaagctaggcttagtgcccagttcttgctcccccatactaactgctaccctcctaagggagatatactcccttaaacattttgagcaaattgaggttggcttccgttttctgatctagggcaaaaaaccccatttgtttgggactttaggtcaaacaaatccattcctttcctgaaatcctcagtgagttagtcctgtctctgctggtggccatagatttcaagagttgctctaaacaaacgtccaggtcttggtggaaactgtccctgggccagtcagagaaccagcccagactccctgccagtggctggggagtggtagaaatttggctcgcccccccatccccaccctacccacaggcccagttgtgtctgtaccagaaatgaggagtgatgccaagcctaggcctggcccagccttagcttctgcaatgcaacctatgtaatcacacccattttacaaggaggaaactggggccatacaacaggttcatcatgcctagtggcgtataagaagaccccgccaccggtccctccacgcaccacttcaaagccgttcatctcagtcacagtccagagcagtactgagtctgcccaggacacctacctggacagccaggaccacaagagcgaggtgactagccagtcgggcctgagcaactcgtcggacagcctggacagcagtacccgaccgcccagcgtgacacggggtggagtcgccccagcccctgaggccccagagccacccccaaaacatgcagctctgaaaagtgaacaagggacgctgaccagctctgagtcccaccccgaggccgcccccaaaaggaaactgtcatcgataggaatacaagagaggactagaaggaacggttcccacctctcggaggacaacggacccaaagcgatcgatgtgatggcaccctcctcagaaagcagcgtcccctctcacagtatgtcctcccgacgggacacagactcggatacccaggatgccaatgactcaagctgtaagtcatctgagaggagcctcccggactgtacccttcaccccaactccatcagcatcgatgccggtccccggcaggcccccaagattgcccagatcaagcgcaacctctcctatggagacaacagcgaccctgccctagaggcgtcctcgctgcccccacccgacccctggctcgagacctcctccagctccccagcagagccggcacagccaggggcctgccgccgagacggctactggttcctaaagctactgcaggcagaaacagagcggctggaaggctggtgctgccagatggacaaggagaccaaagagaacaacctctctgaagaagtcttaggaaaagtcctcagtgctgtgggcagtgcccagctactgatgtcccagaaattccagcagttccggggcctctgtgagcaaaacttgaaccctgatgccaacccacgccccacagcccaggacctggcagggttctgggacctgctacagctgtccatcgaggatatcagcatgaagttcgatgaactctaccacctcaaggccaacagctggcagctggtggagacccccgagaagaggaaggtgagcatggagcagtgcggaggggaagtccagggacaaattcctggtcggcaataacgctgcccacatcggaagagaagaaaccaccccctccggtcccaaagaagccagccaaatccaagccggcagtgagccgcgacaaggcctcagacgccagcgacaagcagcgccaggaggcccgcaagagactcctggcggccaagcgggcagcttctgtgcggcagaactcagccaccgagagcgcagacagcatcgagatttatgtcccggaggcccagaccaggctctgagaccatgcaggaggaaagaaacgattttaaatcattaaaaacacaaaaactaagtgcgaacggaacagagttttctcaacctttgctatggttattctgtctagagaccctgagccaactttcaaattgacgcatacaagggctcacaatttggcttttttgggtccctcccagctttaggttatgaagattttactcac

SEQ ID NO: 1077 - DNA, 3211 bp, Homo sapiens
aaagcattgcagaaacaagcagaaaactttctactacttaggacaagaattacaatatatttatttcattcactcactgtgccttttaggaagattattgatctataaacaaggcagaaaactatttcctattaagctgaagaataaaaaaggtttggtatccctcatagatctgcttgttctttttacccaacttatctattactcaccaagttgtccaaagatgacatcagctgcccattcagagaattactctcctgcaagtatggtgactgaagttctgtggatactcagtgatcaaaaagaatgtgcagtggaatgcttatataacaacattgtaatagagacacttcttcagcctattcacaatttaatgaaaggaaatgaggcatctccaaattgctctgagacagctttaattcatatagctggtattttggtaagaattgcatctgtagaagaagggcttattttactcctttatggagcaaatatgaactcttctgaagaaagtcctacaggtgctcatataattgcccagttttcgaaaaaacttctcgatgaagatatttctatattttctggatcagaaatgttgcctgtggttaaaggagcttttatttctgtgtgtcgtcacatatatagtacatgtgaaggtttgcaggtgttaatcacttataatttgcatgaatctatagcaaaggcatggaaaaagacaagtttgctatcagaaagaattcctactccagtagagggttctgattctgtttcttcagtaagccaggaatcccaaaacattatggcttgggaagataatttgttagatgatttactacattttgctgccacccccaaaggattactacttcttcaaagaacaggtgctatcaatgaatgtgtgacatttatattcaatcgatatgcaaaaaaattacaggtcagcaggcataaaaaatttggctatggagttttggttacacgagtggcatcaacagcagcaggtggcattgcactaaaaaagtcagggtttattaatgaacttataactgaattatggtccaatctggaatatggaagagatgatgttagggtaacccatcccagaactactccagtggatcctattgaccgaagctgtcaaaagtcttttttagcactggtgaacttgttatcctatcctgctatttatgagcttgtaaggaatcaagatcttcctaataaaacagaatattctcttcgtgaagtcccaacatgtgttattgatattattgatagacttataattttgaattctgaagctaagattcgttctttattcaactatgaacaatcacatatctttggtctaaggttattaagtgtgatatgctgtgatctggacactcttctcctgttagaggctcagtatcaggtatctgaaatgttactaaatgctcaagaagaaaatatcttggagatttctgagagccacagggactttataattgatggcttatcagtggagagaaatcatgttcttgttagaataaatcttgttggtgggccattggaacggattttgcctccgaggttactcgaaaagagtgataatccatatccttggccaatgttttcatcatatccattgccaaactgctatctgtcagacattacaagaaatgctggtataaaacaagacaatgatcttgacaagcttttattatgcctcaaaatatctgataaacaaactgaatggatagaaaactgccaaagacaattttgcaaaatgatgaaagccaaacctgatataatcagtggagaggccttaatagaattacttgaaaaatttgtgcttcatctcactgaaagcccatctgaatgctacttcccttcagtggagtatacagctactgatgcaaatgtgaagaatgaaagtctttcatctgtgcagcagcttggcattaaaatgactgtcaggtatggcaaattcctcagtctcttaaaagatggtgcagaaaatgatcttacctgggttttaaagcattgtgagagattcctgaaacagcagcaaacttccataaaatcttctcttctctgcctgcaagggaattatgctggccatgactggtttgtatcttctctgttcatgataatgttgggagacaaagaaaaaacattccaatttcttcatcaattctccaggcttctgacttctgcttttctttggttgccaaggctacatatttctagttaccttcctaatgacactgtagaatctggcatccatccagtatatttttgcagcacccattatattgaaatgctactgaaggctgagttgcctcttgtgttttcagcttttcacatgtctggttttgcaccatcacagatttgcctgcaatggataacccagtgtttttggaattacttagattggatagaaatctgccattatattgctacttgtgttttccttggtcctgattatcaagtgtatatctgtatagctgtattcaaacatttacagcaagacattctacagcacactcaggctcaagatctgcaagttttcctaaaagaagaagcactgcatgggtttcgagtgagtgattattttgaatacatggaaattttggaacaaaactaccgaacagtgctgctgagagacatgcggaacattagactgcagagcacatagatcatgagacacacggtttaaatttaggttttatttatttttaaacacagcaggggggcttgatgtttttctgtgtctgtaacaacatttactttgtgaatatacatattgtaaatactgagaagtataacgatatatttaagtaggtatgagctcaatttgtgaattcatttttgtaaatttgttgttttgtaaggttattatagaaacagatctagcttacttttagttcttattcatgtttaagagttagtcctggccaggcgcggtggctcatgcctgtaatcccagcactttgggagtctgaggtgggcggatcacgaggtcaagagatcgagaccatcctggccaaaatggtgaaacctcgtctctgctaacaatactgaaattagctgggtgcagtgatgcgcctgtagtccctgctacttgggaggctgaggcaggagaatcgcttgaacccgggaggcggaggttgcagtgagccaagattgtgccactgtactccagccaggccacagagtgagactctgtctc

SEQ ID NO: 1078 - DNA, 3352 bp, Homo sapiens
ctacatcctgaatattcatgttttctcatctacagatatttgtcttcccccaaactaaaagaaaaaaaactaccctttactctcttttctactcagttactcttttgtgctatgttagaaacttgaaatatattggtgatgtggggattttgtccctgactgcccactgtacaggacaagagagtacagtgtttcagttggaattcaggactcctggttttgaggtagaggatgatcactgcagtacttggtttggaattgccacaggggtagctaaaccaaaggagggttatatccgcaagggaggtgtaagaaggcaaaataaggaaaaggaggaatgggttttctatttgttcagtttcatcaactaatttatacacttaatacaacttcagtgtcaattgctattaagaaatttttagttgggctgagctggttctcttgtgaaattgtgctggttatctttaagcttatcagttatttgtccaattaaacacttttcaccagtatttagtccgagttgtacagacgatgtatttggattttgtcatggttcatctacagactcaaaacataatcattttaaagtaccttgggagtgtgtagagtaacttctataatagctttatgatcctgatgatgttttttaaacacaataaagttggatcttccatgttacaatcacagaattaaaaccagtatttaaagtggaaaagtattaaaatattatggacaaatatgctggcttgatttgttttccttaaccctgagatattgccctactctgaatagttaagagcttgaaattcagtgttcttcccgtaacccagttagggatcaagaaaactactgagttgcagcctaaattttttttttttttttttttttggagacagagtcttgctttgtcacccaggctggagtgcagtggtgggatcttggctcgctgcagcctccacttcccaggttcaggtgattcttgtgcctcagcctcctgagtggctgggattacaggcatgaggcactatgcccggctaatttttgtatttttagtagagacagggtttcgccatgttggccaggttggtctcaaactcctgacctcagatgatccacccacctgggcctcccaaagtgctgggattacaggcctcagccatcgcgcccagctcagtttttttttaacaaaatataacaggaggaatatatcaagtacatgacatgtaataaatattttgtgtatcttttgtcatatgtattacacatacgtgtgtaatgggttacagtttacaatgaatttcttactgtggatcacatccagaagttttaaaagattggtagagaagccatattcacttgggtgtttctaaaatggaagcacagtgctggtgaatgatacacacttattttgtaattgagctgtatgcatttaatcataaataaataatctcatttatttaaatctcgtttaagctcagctccacttgttgcactcaggtaatttatgccctagaacaaccatgaaatgggaagtgtggacttccatttcactcagtcagtggattcatattgaaaggcactgagcatatttctctcctagtgttcaaagatacatgccatccaaacaatgtgatctgtaaacaaaagccaactacttaatctggtgggatgctggagggaaaatctgacttgtgttgaatttgatgacagagaaatattatgtggtcctcattcctagagggattttctagggcacttttaactgtgcagtttttctttagacttgactttggcatataacctgcaaataaggtgtagttctaactagcagtttcaaatgaggttgcttttataggatcttccagattttcttgccattattcgaacttggttacaacagagttcatactatcatttatattgtctaccttttaagacacattttctgtgaacgttccacatctgtatactttgaatagccttgcacaaataccataagtgaagctactttatttggcctcttcattctctcttcctatagaattctgtgaggttagtactagaacaaatctttaagatctctgaagttattagaagatgccaaaccaggattttcctgtcacccaggctctgtggttgatgaggtggtgtgtgagggtatctccgccgtgtctgtaccggcactatgccttttctgactcctccccactcaacagtcctgtggaggtggtagcggtgattggtggtaccacccctgttttacagatgagggaacaggttggggttacaaacctactgattccctgactcttaagtttttttttttcccattagactctactttttaatgcctatgtgtaatatctagaatatagtgtttgatggactagaaagagctaacatgcttgaagactagcaattttggtgtatgggtcttagtcccacacttcaatattggcttcacaaaattccaaatacacatggttccttaacaatggttcgatttatgactgttcgactttatgcaaagcactacaaatacagtacactccaacttaccatggggctgcgttccgataaaccagtcatatatggaaaatatcgtaagtcaaaagtacattttcagccgggggcagcggctcacacctgtaatcccagcactttggaagactgaggcgggtggattgcctgaggtcaggagttgaagaccagcctgtctaacatggtgaaaccccttgtctctgctaaaaataaaaaagttagctgggtgtggtggcatgcacctgtgatccccagctactcaggaggctgagtcaggagaattgcttgatcccggggggtggaagttgcagtgagctgagattacaccactgcactccagcctgggtgatacagcaagactctgtctccaaaaaaaaaaaagttttcaacttacgttattttcaacttgcagtgggcttatcagcacatagccacatcataaatggaggtgcttctgtcaaaagtacgttattgttttattttcaacttacagtgggcttatcagtatgtagccccatcataagtcaaggggcttttataacgatgtgtcttacaaaatcccaccagatacagaaaggagggcagtaaagatgaaatttgatcacaattaggtgcttaaactttcttcctgtcctccagctcagaggatgaaacaggaaactgagtcataaaacactactacaaacaagcccaaggattttatcccagattttcaacccaaggatgagctgcaatataactatcactgttttgttggctgcctgccacagaatgaccactgaggaaataaagcgagctttggattcactgc

SEQ ID NO: 1079 - DNA, 2923 bp, Homo sapiens
ctagcttcatggacacagcttacagatgtggggagcagatatggtggaatctccaccaccaagagggcacaaggtctttgtgtaaacatggctcaaagggttgcccctgcagacacctactgtacctttatttggttttggaaattttgtatgtggcaccctttaaaaaatgccctttgaaagcactcttttgcactttacttgctaactttgtagaaactctgcatacagcaggaataaaatagttcaaagcactaagctgcatactctaccaaatggaacaggtgcatgtgttggtatgtgcatagatgcttccccaaatgagtcaaatcagtcacacagagggatcaaacataaccttgggctgggggtgggaaaattttctacataacccattccctgagacatttggccaagaatgtgatgaacaaaatcaaagaagatcctctatggtgattgatcgattaaatatgtgtgcaaagtgtttagaaacctatgaaatactctcgcaaagatgctgagagagaataagaggttggattcctcttcatataaactaattttggaggaggccagttggtttgaagttacttgaatgttaccttttttagatggggccaaatggcatgtagaatacacgtgataggtcaaagctgctacacattctatacatgcatcagcacagccccccctttccaatctgcactcccattccagcataaacctaggagaaatgtttcgatttcacacaaagaaagagcacacgttcaccatcttcagtgggggctgtcttttgcttcactggcaagcaggcactgaatttttcttgcatgacaaatctggaggtttactggtgagagagccaatgggcattttttcctggaaagagtacagctccatacccagtcctaacccaacagtgatatttatcactttggggcagggctgtatagagtgtgtgtgtgtgtgtgtgtgtgtgtgtgtgtgtgtgtgtgtgcgggttggggtggtgttgggccatctctggcctgttactaaggtaactaggactatttgtgttccagcagtcatagcctgtgattgtgggtgcatcagttctctgcctagatctcttgttaccttgtctgcacatcaagggagggagttgagcacagatacttgtcaagggccattgtagttgtgcagttctctaatgaaacactccctagtccatgagttcacaaaatttattaagattaaattataagttggatttgtgaataatgactaattaattgtcttgcccattttaggttaaggtgagagcttagtctcttgccctttgggatttgtcttttgggggattaatggagaccagatgtacttgggagactggtgtccaaattcggatcatgccctgtgtaggctctctctatcctcccttatagctctttagtgtactgtcaccgggagggctcatgctgtgagggcattttttgcatggtgttaagactagttaaagaattttaagctgttgttatttgcagtcaattgtagtacttcatgtatcatgaattcaagtactatgatcagacagacatctctctctctctctcacacacacacacacacacacgcacacatacacacacacacacacacacctgaggaaatggctgctttgggttctataaggaccattccatgtttaaagtcctagttgagctgaatgctaagaacctgcccccttgcctccctctgagatgatatcatttcctggcttcgtcaatgctgcctgtctatttgcatgctgggttctgaggactagtgagaaggtgaccagagtttgggtggggctggtttttacccactggatttggtgagaatatgaagcatccagtgtgtaccagggtttctgaaccacgggaaaggcgtaggaaaacaaacattcagagcccctgtaaaacgagaaaggaaaaaccagccagtgttgcattccacatctctgcttgttgcattttgctaatatggggttattctttctcactgttaggatgcaattgtgtgcaaagacagtggctgagtgaacagtaagagctggctagtaatggccttaaaaagaaaaagggtaactctctgaaacaaagatcactttagtgtggcattgtggatgctgttaattctgcatagggaaactttggaacagcatgctaattacatggctgtaagcaaagccctgtcctctgtctctgcaccataccttcattggacttcaccaacccatccatactccatgtaaacctcagttctctcatgcctgccctaagtcagttgacatcagtgcagtggcattgaggagaaatgagaggtgtctctgattttactgaaagtgattatcattttcacaggtgcctgagatttggtatctactttgtgttcttgattcttaggtgaaaaatctgaaatagttccctgtgcattaaaataaattattttgagaggactcctgctccgtcgattcagcagacctacgctgcagaaggtaactgcggaagctctcttttgctgtcggggctctgagcttgaagggagaaggtgcagtggtgcctagaagtgatatgcaaaccacctcacatgccagcccctggcctccttcccatcccagagtcacagacaggggacccagtgacaatgatgataaatccatgtgtggaggtgttttacttatttttctttccgtaggatttcatggtgctttaaaaaaaaaggcattttacagaaaataatgtggggggagggagatttcataatgttcttagggaaagtacaaaacaaatttgcttgtgacatttcaataagctgtgctgctattgtctttatttgatgatgtaatttttttttcaatgatggagaaaaattgcaacaaagaccttctggaagatcc

SEQ ID NO: 1080 - DNA, 2989 bp, Homo sapiens
agtgctgcccctgtgcggcgcccctttcccgctccgccgcgcactgttgtcatggaggaaccaagatggcggctctggcctacaacctgggcaagcgggagatcaaccactacttcagcgtgaggagcgccaaggtgctggcgctggtggccgtgctgctgctcgcagcgtgccacctcgcctcccgccgctaccgaggcaatgattcgtgtgaataccttctctcaagtggcagatttcttggagagaaagtttggcaacctcacagttgtatgatgcataaatacaaaatcagtgaagcaaagaactgccttgtagataaacatattgcatttattggagattccagaattcgtcaattgttttattcttttgtaaaaataattaatccccaattcaaagaagaaggaaataagcatgaaaacattccttttgaagacaagactgcatcagttaaagtggattttctgtggcatcctgaagttaatggttctatgaaacagtgtatcaaagtgtggactgaggattccattgcaaagccacatgtgattgtagcaggagctgccacatggtccatcaagattcacaatggtagcagtgaagcgctttctcaatataaaatgaacatcacctccatagcaccacttttagaaaaattggcaaagactagtgatgtttattgggtcttacaagatcctgtttatgaagatctattaagtgaaaataggaagatgatcactaatgagaagatagatgcttacaatgaagctgcagtcagtattttgaatagtagcaccagaaattctaaatcaaatgttaagatgttcagtgtttccaaattaattgctcaagaaaccatcatggaatctttggatggcttacatcttcctgaatcgagcagagaaactactgcaatgattcttatgaatgtgtattgcaataagattttgaagcctgtagatgggtcctgttgtcaacctcggcctcctgttactctcatacagaagctagctgcttgttttttcactttatctattatcggatatttaattttttacataattcatcgtaatgctcatcggaagaataagccgtgtactgatttggaaagtggagaggaaaagaaaaatattatcaatacccctgtgtcttcattagaaatacttttacaatctttctgcaaacttggcctgattatggcatatttctatatgtgtgaccgtgcaaatctgttcatgaaggaaaacaaattttatacacattcatctttctttattccaattatctacattttggttttgggagtattttataatgaaaatactaaagagactaaagtattaaatagagaacaaacagacgaatggaaaggctggatgcaacttgtgattttgatttatcacatttctggagcaagtacatttttgcctgtatacatgcacattcgagttctggttgctgcatatttatttcagacagggtatgggcatttctcatacttttggataaaaggagattttggaatctatagagtatgtcaggttttatttcgtctcaatttcctggtagtggtgttatgtatagtaatggatcgaccttatcaattctattactttgtccccttggtcactgtatggttcatggtcatatatgttactttagcactatggccacaaataatccaaaaaaaagcaaacggaaattgtttctggcattttggcttactgttgaaactaggctttttgctgttattcatatgttttttggcatactctcagggtgcatttgagaagatcttttctctttggccattgtccaagtgttttgaactgaaagggaatgtatatgaatggtggttcagatggaggttagaccgttatgtagttttccacggaatgctgtttgcttttatttatctggctttgcagaagcgtcaaatactttctgaaggaaagggtgaacctcttttttcaaacaaaatttcaaattttctgttgtttatttcagtagtttctttcttgacctattccatctgggctagcagttgtaaaaacaaagcagagtgcaatgaactccatccgtctgtttctgtggtacagattttagccttcatcctaataagaaacatccctggatatgcccgttcagtttacagttcattttttgcttggtttggaaaaatttcattagagctatttatttgccagtatcacatatggctggcagcggacacaaggggtatcttggtactgatacctggaaaccctatgctcaacatcattgtcagcactttcatatttgtttgtgtggcacatgaaatttctcagatcactaatgatcttgcacagattattattcctaaagataactcatctctcttgaaaaggttggcatgtatagctgcatttttttgtggactcctcatcttatcatccattcaagataaatcaaaacattaggttccaaaaattctaaaaaacctaaactcttcaggctacctttgtgtgtctctagaagagaaaagcatctatctggagatataaatgtgtatgtaaatataaacgtttgtggcaagaggacagttctgtgacatctgttgaacatatgtggttgtatatattggaaatgtacatatccaatatgaaatactaaaacaaacaaacaaacaaaaaaccagaatgcattgtataggattgcatgtgaagtcttttctactgaatctatatttccatttgtaagtgattttaagttaacatatgaaggcagggaaatgattacctttccagtaaaaagtatagataatttaattaacttagtgacaccaccaagtgttttgatataactaaatttgtggtaataagactgtctgcacctgtattcattgtggaacttcctctttcattggaaactttcttgctcaagaatgacggcagtattgttttcttatatgtgcaatgaagtggaatgataaacagtatgcctttaattt

SEQ ID NO: 1081 - DNA, 3531 bp, Homo sapiens
gattcaacttttaacactacatcaaatggaattttaagtcatcatgaccctttgctacaaatcaagacttcccagggaactgttccaactgctttggcatttgagcgcctgggcagttctgtattaagtaacagcataccacctcagtcttcaacataccgctcagctcaagagtctgcaccccatcttttacaacctcaatttagtttgttgccttcagcacttgggggatcccagcagactcctcaagcctacagttcaactctctttactagttctactgcttccattgaaagagctcttcttcgagaatgtagtgttattaaacaccatcagcggccttcaggtacccagtcaattcaggcacaactgactggttcacagcactccttacatagttatctatcaaattcaagtgtagttaattttcaggaaacaaccaggcagtcatctttatcctgtagcccaattggagattccactcaggtgagcaacggaggattacaacagaagacctcccaggtctcagtggaacttgctcagtcttactcatctgcgattccatcatcagggtatcctccttctactacaaaaataaaaagctgttctacagaacaaccactgacaccaaccaagacccctaaacctcaaagtataattcctcctgtgcaaacactaagctattccaaacctttacataatcagagttctgtaatatcgggccaagcacaaatttattctacagcgcagctaccaagccttttatcagttagtcagtcccaaaattacggtttagtacagccacataatgtgccatctattgttcattcacaggtttataggtccagcaaggttgagaaattgccacccttgtataaaacattgactttttctgggtcatctcagactataactcctgaaaatcagacgcttaattattcatctaatcagcaagaggtattgtcttcagttacaaatgagaattaccctgctcaaacaagagatctgtcttcagtaagtcagtctcaaagttactcatctggtcactctcagggtttatcaccagttagccagacacaggttagctattcatctcaatcacaagttttgtcagttgttagtctttcagaaagctatgcttcaggggagtccctaacattaacagccccttctctttcttattcttctgcctctcgggctcagaatttgccaaactctagcccgacccagaattatatttctatgcattcttcccaaaatgttcagactcaagagtcatcatctccccagtcccagaagtttttgcctgctgtccagtcatcatcttttgcatcctctactcattgtcagacattacaaaataacataacttcccctgacccaaagtcttatgctgaaagaaagcttgactcagatgtgtatccatcttcaaagcaagaagatggttttccaatgcaagagttacaggtgttgcagccacaagcatctcttgagtcatcaacccaaaggctatctgatggagaaattaatgctcaagaatcaacttataaggtgtcaaaggcagatgacagatattctcagagtgtaatcagaagtaattcccgtcttgaagatcaagttattggggttgctctgcaagcatcaaaaaaagaagaaagtgttgttggttcagtgacacaacttaaccaacaaattggccaagtcaataatgcagctacccttgatcttaagaactcaactaatttaatacagactccacaaataaggttgaatactaaagacttaaagcagcaacatcctctcatacttaaggtgcatgagtccaaggtccaggaacagcacgatcaaataattaatgcttcatctcagattcaaattccaaatcatgctttagggcatggccatcaggcatctcttcctaatacacaggtccttttagattctgcctgtgatttacaaattcttcagcagtcaatactgcaggcaggtttaggtcaagtaaaggcatctttacaagcacagcgtgttcaaagccctcaacaaatagtacatcccttccttcagatggaaggtcatgttattcaaagcaatggtgatcattctcagcagcaactccatcctcaaaattctgaagttatgaaaatggacctctctgagtcttcaaaaccattacaacaacatctaacaacaaagggccattttagtgaaacaaatcaacatgattcaaagaatcagtttgtttctcttggatcgatgtgtttcccagaggcagtgcttcttagtgatgaaagaaatattttatcaaatgtagatgatatcttagcagctacagcagcagcttgtggagttacacctactgatttttccaagtcaacttcaaatgaaaccatgcaggctgttgaagatggtgattctaaatctcattttcagcagtcattagatgtcaggcatgtgacttcagattttaactctatgacagctacagtaggaaagccacagaatataaatgatacttccttaaatggaaatcaggttactgtgaacctttcaccagtacctgcccttcagtcaaaaatgactcttgatcaacagcacattgaaacacctggtcaaaatataccaactaaagtaacttcagcagtggttggaccaagtcatgaagtccaggagcaaagttctggcccattcaagaaacagtctgctaccaatcttgaatctgaagaagacagtgaagctcctgttgatagtacattaaataataacagaaaccaagagtttgtttctagtagtagaagtataagtggagagagtgctacatcagagagtgaatttaccttagggggtgacgacagtggtgtgtcaatgaacccagctaggagtgcacttgcactgttggccatggcccaatctggggatgcagtcagtgtcaagattgaagaagaaaaccaagatttaatgcattttaaccttcaaaagaaaggagctaaaggaaaagggcaagttaaagaggaagacaacagtaatcagaaacagctgaaaagacctgcccaaggcaaacgccagaatccaaggggaacagatatttacttaccgtatactcctccttcctcagaaagctgccatgatggttatcagcatcaagaaaaaatgagacagaagatcaaagaggtggaggaaaaacaaccggaagtcaaaacaggatttattgcttctttcttagattttctgaaatccgggcccaagcagcagttttccactcttgctgtacgaatgcctaacaggactagacggccagggacccagatggttcgtacattttgtcccccaccacttcccaagccttcatctacaacacccacacctttagtgtctgaaactggcggtaacagtccatcagataaagttgataatgaacttaaaaacttggaacatttatcttcattttcttctgatgaagatgatcctggatatagtcaagatgcttataaaagcgtccctactcccttaactactttggatgctacttctgag

SEQ ID NO: 1082 - DNA, 2341 bp, Homo sapiens
ctgacaaaaacaagcaatggggaaaagattccctatttaataaatggtgctgggaaaactggctagccatatgcagaaaattgaaactgaccccttccttacaccttatacaaaaattaactcaagattaaagacttaatgtaaaacctaaaactataaaaaccctagaagaaaatctatttaataccattcaagacataggcacaagcaaaggtttcatgacaaaaacatcaaaagcaattgcaacaaaagcaaaaattacaaatgggatctaattaaactaaagagctcctgcacagcaaaagaaactatcattagagtgaacaggcaacctacagaatgggagaacatttttgcaatctatccatctgacaaaggtctaatatccagaacctgcaaggaacttaaaacaaatttacaaggaaaaaaacaaccccatcaaaaagtggacaaaggacatgaacagacacttctcaaaagaagacatttatgtggccaacaaacatataaaaaaaagctcaaccttactgatcattagagaaatgcaaaggagaaccacaatgagataccatctcatgccggtcagaatggtgattattaaaaagtcaaaaaacaacagatgctggcgaggctgtggagaagtaggaacacttttacattgttggtgggaatgtaaattagttcaaccgttgtggaagtgtgtgtggctattcctcaaagatctagaactagaaatactatttgtcccagcaatcccattactgggtatatacccaaaggaatataaaccattttattataaagatacatgcacatttttgttcattgcagcactcttcacaatagcaaagacacaatagcaaatgcccatcaaagatagactggataaagaaaatgtggtacatatacaccatggaatactgtgcagtgcagccattacagcttttggtgatacagtgaatcagatttttcattaattcttttaattggttattactgaacgtgaaaaagtaatgtttgtattgaaatcttgagtctggccatgtttctattttaaattcataaagaattctaacaagaggaattccaagaatgtcataaatggatgtttctccatggatgaaggaactgttttattcacttgctgataattcagcctaatccagtttgacatcatatagataagtagttgaattatggatttaaaatacatatcattttctaactccaaaggtaatacttatttaaatggttttgaaaatatagaaaggcacaatttctttttaaatctgttattctccaccaccactcaatctgtctatcatctatctctccattcattcttccatttgtttatatctgttaatctttgtatgtgttcatgtatagcttttacatgattggaatcataatgcatattccattttgaagtctgcttttttttacacaaaaatatgttgtgaatattttcctatattatgaaatatcattagctgagcttttagaattgactgcatgttttggtaccatttagatatagtttaagatacttagaagttatgtggctttgccactatggatgaatcttatttactcaatattaattacttacaaataacctcacctaaacactactcagccataaaaaggaatgaattaatgacattcacagcaacctggagactattactctaaaggaagtaactgagggatggaaaaccaaacattgtatgttctcactcataagtgggagataagctatgaggatgcaaaggcataagaaggatacaatggactttggggacttaggggaaagggtgggaggggggtgaaggataaaagaatacaaattgggttcagtgtatactgctcaggtgatgggtgcaccagaatctcacaagtaaccacttaattacttacgcatgtaaccagataccacctgttccccaaacacctatggaaataattttgtttttttttttaaaaaaggaatgagatcatgtcctttgcagggacatggatgaagctggaagccattatcctcagcaaactaacagaggagcaggaaaccaaacaccacatgttctcacttgtaagcggaagctgaacaatgagaacacacggacacagggatgagatcaacacacactggggcctgatgcaggggccgtagcggggagagcatcaggataactagctaatgcatgtggggcttaatacctaggtgataggttgataggtgcagcaaaccaccatgggacacgtttacctatgtaacaaacccgcacatcctgcacttgtatccagaacttaaaatattttaaaaatctttagagaatac

SEQ ID NO: 1083 - DNA, 2767 bp, Homo sapiens
aaattcattttacttcgacaaaggttgaagtatgtagcaggcgagcgtcagggacaagtgcagctatctctttgatcacatcgctttaaacatttttcagctttaagcttgtcttacaagtcagctctatcagtctattaattgtttcactgtacctaatatcttacacgaaggcaccttgaaaaacagcaggagaaagcacatttgtttaagtcctgcgatggctagcacggcagctaatctccttgcaaattataatcatagttgtagttcatccattaggctggaaaagacaagattcccaagtggccttggtgccttttccagttcccgggagacccaccaaccctcggcgtgtgttgcctgcgcacccggagcgttcttgctaatcaggtcaatgattagcgcctggctccagggacctgccaagagtgttagggagcctccaaacggagcacgctcacggagaatctcccgttcagaaacatcgcttagtcctcatttactcactgggaacctcggaggatttcagctgatgtttttctctccttagacagtgaggagctcaacataacagggaaaaggagcacaggatgcagctacttagagtgtgttgattgaaaacttcgatctccccaccccatcacggttgatttgacggatttctcacctcgttcacagagaaaatttcaattaaggcacatggagacggacctctacctgcaatgccccccttgcacttggacagaaccatgtgactatttataagctatgacacatgagcagacatgacatggcgggattgatggagcaatgacctcatcttttctcctgccaaatattatgaaagaggactcaagtcactcacctgagggacactgggtgaaagtcagtaatgaagctgaaaggtcgctaaatgctggcaagtgagatggattatagtgtctagactttttcctgaggtcattctatatccagcagatatctttcagtatatagtctattcagaacaatgtgctagtgactattgagtgtggttacattcttttttttttttttttttgagatggagtctcactctgtcccctaggctggagtgcagtggcacaatcttggctcactgcaacctctgcctcctgggttcaagcaattctcctgagtcagcctcctgagtggctgagactacaggcgcccaccatcacggccaactaatttttgtatttttggtagagatggggtttcgccatattggccgggctggtcttaaactcctgaccttgtaatctgcccaccttggcttcccaaagtgctgggattacaggagtgagccaccaagcccagccagttacattctttaaacaaggagtggacgtaccctgaaacaagagattagtcaaagagattttgctattcatgggacctaaaaggtggctgtacttccctttactgcttttccatacacagcaatgcacgctgtatgggttcttataggtcagagagtgaaagagaaccaggacctataaaagaatacaagtctctaaaatcagaaagtttattatttaaaaaaatagttacgtgccagtctgcttataatttatttttatgactgagagtgcctttcataagcacattctggcaaactataaaacaaataaattgaaattgaataaaacctttagacattagaagtgtagcaccagatttagtacataactgcaaaacttaaacatgcaattttacatctgcaagcacattaaattgaaagaaactttaacttaatttagatacattaattgatacaaacttttctggtatatagcacttcttggcgcattgagtattcttaatctttaaggcacatgaatataataccttaggaaagatctgttctccacacatttcctctataaagtgccaaaaaaaaaaataacgaagagccagtttgtcttccgcatcagtgtgatttagcatacataaataagtatcttttcacacaaaataaaaggttcagaacccaaagtgtctgatttttatagtgctttttctttccttttaaaaagatagcaagatgagggtaagaggtaatttaagagaagtaatcatcttctaacagccagcttgcagaaactaaaacaaatatcaatgatgtaaaaatgttgttttgacactttggtaaatgaaagtgtgagatgagtaagaatatattataggtgcttgtatatcaaaggcctgtgaaaatgtctgattataaaggagaaagttaatgatctctaattgtgttgtaatgtaaatgcagtatcaccgtaatgaagagaacagatttgcatgttaacaaaagaaatattagaggagtgagtgtaggatgtttgggataattaattccatcctccactcctacatacatatgcatatacaaactcaattcaattttaaagagaacccgaagaaccaaaaatagactgaacacacttgatgttgtatgggagcttaaattactatttttgttgttctctgtgactatctcatttagtttctattgtgtttgcagtttcttccaaggtgatttttaatggattgagtaatgcataaaaatttgcagaagtatgcagaaagtttgtatgcagggccatgtagagcttttatcctacagtaaatcctagtagtttgctggtgctgtgtgattttttttgtttgtttagggtttttgtgtgtgtgtgtgtgtgtgtgtgtgtgtgtgtgtgtgtgtgaagcttatttattccatttc

SEQ ID NO: 1084 - DNA, 2520 bp, Homo sapiens
acacctgccaagcatcacacctgccaagcatcacacctgccaagcatcacacctgcgatgcctgcacgagctgggtgcggtccgcgcagctgcagtaagggggcgacccggcgtctgttagtcggcggttcatctccttcgtgcctcgatgagctttaacgccattttcctccattctctttcttcacctcttgagtgagtggccatgagctgggctgcaagagtcctggggagcagccagagagcgggcgccgcgggagcgaattgtttttgcccaaggatggttctgtgtctccgccaggcggcatgtgacctgctcgggcgcgggtggcccttcacccctgtgattgtggccagaagtacctctcacctggacctgcggaccccgggcgcagtcctggagctgagaactggaggttgggggaaaagcagggtaaaggggagagaaaagggggtcagctgcgggacggagtgccgtcccagctgtagtttcatgtttggtggagcaacccctgttcctttcctctctctctctcttaattcctcttaactgtactcacgcttccttctccttcccctggtccgcttcatggatgctgagctgcctggccagaacctacccagcttctttgctggtcagatttgtcggtcttttgtgtgtctgcagcacctccttccacacgggcccaggagttctctatacgcgctctcaccgcaggtcttggaattccaagccatttccaattccaggtcttggaaatggctgtgcaatttgtcttcactgttaggtttccaagatggcaactatcaagagtgaacttattaagaatttcgcggaagaggaggccattcatcacaataagatctccattgtaggaactggatcggttggtgtggcttgtgctatcagcatcttattaaaaggtttgagtgatgaacttgtccttgtggatgttgatgaaggcaaactgaagggtgagacaatggatcttcaacatggcagcccttttatgaaaatgccaaatattgtctccagcaaagattacctggtcactgcaaactccaatctagtgattatcacagcaggtgcacgccagaaaaaaggagaaacacgccttgatttagtccagcgaaatgtatccatctttaaattaatgattcccaatattacccagtacagtcctcactgcaaactgcttattgttactaatccagtggatatcttaacttatgtagcctggaagttgagtggatttcccaaaaaccgtgttattggaagtggttgtaatctggactctgctcgttttcgttactttattgggcaaaggcttggcatccactctgaaagctgtcatgggctgatccttggagagcatggcgactcaagtgttcctgtgtggagtggtgtgaacattgctggcgtccctctgaaggatctgaacccagatataggaactgataaagatcctgagcagtgggaaaatgtccacaaaaaagtgatttccagtggctatgagatggtcaaaatgaaaggttatacttcttggggcattagcctatctgtagctgatttaacagaaagtattttgaagaatcttaggagagtgcatccagtttctaccctaagtaagggcctctatggaataaatgaagacatattccttagtgtcccatgtatcctgggagagaatggtatcacagacctcataaaagtaaaactgactcttgaagaggaggcctgcttgcaaaagagtgcagaaacactttgggaaattcagaaggagctcaagctttaaagttgcttaaagctaattctgtagattgaagatgaaatagtagttatggaattgtatatgtcaaacttttgaataaatttgaatttctaaaagttggaaaaatagaggaaagagtgacctatttagtatagccttccagcttttttttttttcttttttgggagggtctcattctgtcacccaggctggagtgcagtggcacggtcatggctcactgcaaccttggcctcccgagctcaggtgagcctcccacttcagcctccagagtaggtgggaccacatgcgtgtgcctccatgcctgcctaatttttgtatctttttgtagagatggggttttgccatgtcatccaagctggttttgaactcccaaagtgctgagattacaggggtgagccactgtgcctggccttagctttgatttagtatccagatgatagatgacactttttttttttttttttaaagtgacggcatcaaagatgtttttggtacttctcagtacttgccttgtatgtatacgtaattgccatctggtccacaagaatgtgtttactgtgttacacaaatcctgattcatcaggtgcatagtaattcttctctatggcttaatacctatgttcatttacatgctatctctacaatgtaaaaataaaagtgtatatatatacacacacacacacagagtaatctaaatgttcctaacactagataaaaccttgatttg

SEQ ID NO: 1085 - DNA, 2416 bp, Homo sapiens
atcgggacattcgcaggacgcagaacgccgacggcttctccacctacgtgtgcctggtgctgctggtggccaacattttgcggatactcttctgcctctctatccgggcagattggaaggtgtctgctgctcttcctatgaagagggcctggtggaggggtggagagaaggagtccaggcagctggtgtcaagaactctgcttctgactctggtcactgagtaatcacgtacctgcttctttgcctgtttggaaggcgctttgagtccccgctgctgtagcagagcgccatcatgatcctgaccatgctgctgatgctgaagctgtgcaccgaggtccgtgtggccaacgagctcaacgccaggcgccgctcctttacagctgcagatagcaaggatgaagaagtcaaggttgcccccaggcggtccttcctggacttcgacccccaccacttctggcagtggagcagcttctcggactacgtgcagtgcgtcctggccttcacgggcgtggcgggctacatcacctacctgtccattgactccgccctgtttgtggagaccctgggcttcctggctgtgctgaccgaagccatgctgggtgtgccccagctttaccgcaaccaccgccaccagtccacggagggcatgagcatcaagatggtgctcatgtggaccagtggtgacgccttcaagacggcctacttcctgctgaagggtgcccctctgcagttctccgtgtgcggcctgctgcaggtgctggtggacctggccatcctggggcaggcctacgccttcgcccgccacccccagaagccggcgccccacgccgtgcaccccactggcaccaaggccctctgacagtggggaggacgaggatgtgggaccgccagccgcgggcactggtgggccctgacctccccgcggggagggtgggtgccgtggcccctgcaggtgtggcagagatggggcatgggcattggggtctccatcagcctctgtggggtgtctcagggtgggcagtgggggtggggctgggacgctgtttgtgctcagcggggacagccagggttgatctggccccgagggttttggatgtttttaggatgacataaaaagcaagtgttttccccatttcctcttatgaaacaccgtctgagcccaaggtacacattgggcggcctgcaggaacctgctccaggtggacacacgggccagcagccgcgaaccttgaagctggggtgaccgcaggagaccctgtaaggcctgtgagcggagccctcgaccccgtgacaccctggccagacaccctgcttggactggggtggcctctgctacccaggggtctggcacgggggagggctggggctttctctgcctggtacacacggaaaggcggctgtgcggacgcagggtcaccgtgctccgggttttctgacagtcggtgtttcctgggcctttggagtggctgcgaggcctgaacgccttgtggatccgctgtgtccagcccggctgagcatcgccagggctagctcatgctgctcttgtcagcctctggttctcctcgagtccttggggacgtggcagatgccagcgaccatcagacaacgtggaggccctcatgggcaatggctgagggggccgggctgaggctgtgcacatgcaatctgcacgccactcttgggctctgctggcggagatccccttccttctgggtgcagactgcacctccggatgcagttttgatgtccatcttccaggagagagacggtctcgggtccagggagtggagggggctgcccctgccgtgcaggtcctggccgatggcgccttaccctgctgccctgggcttttggcctgaagcaaattcctgagtggggggtactggggcctgccgcatcctgtcctgtccactgcccacccccgtgtgctggctccctcacttctggctgcagtgggagccgccagtctgacccttgtcaccgcacgctctgcccccaccccgttgcaagaggtcacaccatgtcagcagccttgcactgaccgcagccggcccccaggcctcagagttctggatgcttccgtgcggctccaacaggcatcgtcttcccttccgcaggtggaggggccgcttcccgcaggcatctgagctctgtgccggggccgtggccatgggaagatgttccacgctgcctcctcctcgagttttcctcggaaacactcttgaatgtctgagtgagggtcctgcttagctctttggcctgtgagatgctttgaaaatttttatttttttaagatgaagcaagatgtctgtagcggtaattgcctcacattaaactgtcgccgactgcaggcgcagtgactgctgaatgtaccctgtgtggcgacttggaatcaataaaccatttgtggatcctg

SEQ ID NO: 1086 - DNA, 2472 bp, Homo sapiens
tttttgtttttgtttgagacagagtcttgctctgtcacccaggctggagtgcagtggtgtgatcttggcttaccacaacctctgcttcccgggttcaagtgattctcctgcctcagtctcccgagtagctgggattacaggcacaagccaccatgctcagctaatttatgtttttttttgtagagatggggttttaccatgttggccaggctggtcttgaactcctgacctcaggcgatccgcccacctcggcctcccaaagtgctgggattacaggtgtgagccactacgcccggccagcagcagctggttttacaaacttcttgccaacagctggtgccactttttactccaaggagcgtaactcagatcactgtctctgtagtttgggtttcttcccaaccttgagcaatggaattcatcagtttcattctagaatgtcttctttagtgcttggtctggaaaactgggcttggcttatggactaggttactgtgcttcagttgaaattgattgaaatatttgattgaagtaactgaaataactaaaatatttcagtgtgttcatccactctgtgacaatgttcttttataacaggtaatgcacaggggaccaggcaggtacaactcactggcccaggaaaatccaatttttattgtaccactttatttccactctttttcttcttttttgctgcttgtgtaaaatcatcatccttgaagagtcatttgttccagcctatacagactcacactctgtattcacactggaatcccactgtctgcttataccgagaatgttttgttttttgagatggagtcttgctctgttccccaggctggagtgcaatgaatggcacaatctcagttcactgcaacctctgcctcccggggtcaagtgattctcctgcctcagcctcccaagtaactgggattacaggtgtctaccaccacgcccagctaatttttttttatttttagtagagacggggtttcaccatgttggccaggctggtttcgaactcctgacctcaagtgatccaccctccttggcctcccaaagtgctgggattaacagatgtgagcctccgcacccggatgataatgtttttctgatagtggagggctctggagtcagacggctgtgtttaaatctagtctctgccacgtactaactggagggccctagccaagttgctttgtctctatgtggttttgcttccccatgtgtaaatagggctaataatggcacctaactcctagagttgttgagaagattcagcaagtcacatacaaagcactcagtgcctggcacataataagtgccatatattatttatttacagacagggtcttgctgttgtcccagctggagtgcagtggcacaatcacagctcactgcagcctcgaactcctgggctcaggtgatcctcccaccccagcctcctgagtagctgggactacaggcacatgccaccatgccagggtaattttttaattttttgtagagacggtttcaccatgttgtccaagctggtctcaaactcctgggctcaagtgatccaccctcctcagcctcccaaagtgttgggattacaggcatgagccactgtgcctggccttaatatataaccacaatcagaatgattgcattaatacattgttggtttttttttattcaatgaagtacttttaagcccgtggctcatttggaattgaagatataagacgacaataataaccatcccttccccatggccagtcactatcctgactttggtatttgtcattcccatgcatgttttcacacatttacaacatatgtatccaaataagcaatatgtggtgctttttatgaggttttgaagtgccgtggtttgccacggttactacgggactgaatgaaggaggatgaacgcagaaatgaaaacttaaaagaaactgttttaaaagaaggggtcgggggaagaagaagaggactccctgcttctactgagcaaaagcagcagctctgagcttctacagccctttgtatttactgggtagaaagagcagggaagaggaggtaatgattggtcagctgcttaattgatcacaggttcacattattgctaacaggcttcagatgtacctaatcacaagaaaactgcgcttagggagtggctgccctccgcattccttctgggcggcagatgcagtttgtcagtttgccaacattctgcatttatgagaacagtttgctgtttacccatgtagcctccaggatactgagttgatcacgaccctcactctttcagcctgcaacattgaagctttatataaatgcactatcctgtctgtgtcctcccataatgtgctcttttcactcattgttatgtgtctgagatctattcatgttgacatatgcaactgtgtgtcatgcatttttaactgctttaaactcaccattgggtgaatacacagtttatctgtt

SEQ ID NO: 1087 - DNA, 2787 bp, Homo sapiens
atgatccagtgcccatgattgaaaactctcgtggactgttggagctaccagggatcttagaactgatctggtccactcgctctttacagagaagcaacttgccgtgcctctcctcaggaagccatgcctggtgccacccgcacatcacttctaggctggcccttgcaacagtgtgccatgggcctctgtgatcccttagtctaccccagcagacagggagccctgagggcagaggcttttttgtccctctctctttgtgcctcaagcacctcagttagggcctgggctggaccaggctttagtaaacgtttgataaaccatgaagagataaaacttaaacccagctgaccagattccaggagcacgtttcctccctccccattcccacttcctcgcccccagcttgctcactaggggcacccccatactgatcacgaaggaaggagccacttctggtttggcatctggagtttattaggtacttactgatagccgtcagttgtagatagggctgaagtgcaggcaaatggctgcctgcatggagtgaaattcaataaaactgcattttaagtgaaaaatcagtataaacaccaggcttctttgccatggaaacagttgcttagaaactgcctaacagcgagttctaaattttttaaagtcaagttatcatttaagctacacggccttacaggttattgagagataatcactcgcctcaggacactcggaggcatgtggcacagctgagtgcctcccgatactctggggaccagataatctcttgataactgtgctctctggagccactgatttgggcctggggggaggagaaagaaatttttgttcaggagttaaatggtgtacatatattttttaaaaagtgtttctctttgggtttgaaaaaagatggaactggccatttggtatgttcaacagccatccctgcgcatcgcaaaatgtattgggaacattttccaggcagttaccccagtcacttcaaagcagaggtcctgtctttgtcttctggctttggcttatgcaaaaggagttttcaacaactttggctttcagctgttcactctctggtttcagctaaggctgggcaggaactggccccaggacaaagtgacaccagagtttggaacaaagcctggcgctaaggactcagatcagacctcctgggcctcaggctcagctcccaggggcttaaagccaacaagggtgcggtttggaatttgtcgtgtttagagttcagcaggccgcctgcctctcggagtgagagcacagctacacttgccagccatctggttgcatggcacggcatttgctccccacctcaggcatgcagaggacaaagtatattgcatttgtttcttcctgaaaataatgggcgaaattagaacatcattggctgagaactgggatacccccaccaagtcagtatggagaaaattatgagtgaaacaaaagacaaatgttttgcccttttcagggtatctgaaaattatccatggcatggtagtgctgctaagattggtggtgttaattatgcctcagactctgtgtccctctctctctctttctggaagaaaagaaggaatactgttttcatcatatacttcaaagtgttgtcctgcacctcctctcctcagagcctcagaaggacctgtgaggagagtgggccaggtgtgatcatctttggagaaagaggaaacaggttcatgaggcaaaatcacttgctctaagccacagaggtgggagaaggaacgtgcattcctgccattctggggcatctgcccctttaaaagcaaagaaatgagacccaaaacagtccttccaagagtttggctcttgcttaataaaagaaggtgaactttgcacaagtttttcctttgcttttctgttaatattttatgtggatatcttgcagggcaaaaagagtggcttattttcttttcctttcctgccaacaaatacgacattcatatttagcatgttaaaaagagctcagaaaatgaacattgcagcattttcatgctgtgtaagtcagagcgcagctatgactgaactgggtcgtggcaccgctttgctgggtgttgcccagataaaaatattccttgaagctgggagagcaccacgctgtagcttgagaaattgttccagctcttgaaaggggaaaaaatcaaatgaaaccatttgcattctaacagtctttggcaccagggaaaactgtcaactgtgtcacgtgtaaatagaaatctgctccccgcttttggtgcgttttttcataatttcccttgccactctaattatcaaagatatttttatttttaaacaaaaattgtctcccacgcaggcctcatctttctgcggtgaagtggaaacgatgaattagaatattctaatcacttctccaacaaccactatggaggttataaacacaagattatcctagcaaagaaaagtgaattgtttgggcacagaacaggccaggaaaaaattcagtaggccgggcccggtgctcacacatgtaatcctacactttgggaggctgaggagggttgatcacctgaggtcaggagttcaagaccagcctggccaacatggtgaaaccccgtctctactaaaaatacaaaaattagctgggcatggtgatggatgcctgtaatcccagctactcaggaggctgaggcaggaggatcgcttgaacccagaaggtgaaggttgcagtgagctgagatcgcgccattgcactccagcctgggcaacagagtgagactctgtctc

SEQ ID NO: 1088 - DNA, 3334 bp, Homo sapiens
atggctctaggacgcgcctttgccccctgggcgagggtgtcctttctcacgaggtgcccatccgtcacccccgtggcccatcaccccttcctctctgagggagtctccccacgtgcccacccccagctgcagggacgcccatctggctttttcgtgggcctcccagggtcctgaggtgcagtcgctcgcgcagtttctgaaggtggtggtcagttccagggcagggagcggctgctccagggttgtgttgctgagagcctgcccggtgctgccttagtgttgcggcaccccatggtgggttcgaaggcgctgctggttactaatgccgcccctcaccttgctctctcctcacctgtcttcttgctgtcgggtaaagttttggggtcacaagcagcagccggagccggtaaagcccgtgtctgctcgtgcatgccgcccgcatctccgccgagaatgtgcttggcttcctctgtccctcctgcgtgctgccactgtcttgtgtcacctcacatgtgcgcacgctcagaccctctccctggcctcggtccttggctctcctttaagatccaggatctgcatcaggcttggctgtgtgtgcctgtcacccctgcgcagtaccactgcgctccccccgggcaaaaaaatgagacccccatctccaaaacacacagacccccaacgcaggcctgctgccggggaggtgctggagggagggcgggggcactgggcgcagagctgctgagcagggtttcctggccacctgcgctcccttgaacgcagtgcaaaggggaggatctttgctctgtgacgagttcttccctttccggcctttgatccgtgctgctccctgcctttgggggaagaggaggcctcacaccacatccccaggtggccgtgtggcctcgactccactgacccaggatcaggagaggctgagctcctttctcagcagcttcttcctatggccccagcctccgtgccctcttccctccaggggggactcggtgcctgcctggggaggaaggagaggcgttgcaggtcagcatggggtggctgcagccggcgttggcctcaggcacaggctccacagggcctgttcccaccagcccggcccggcagggccgcatggtggcgcgtgagggaggaccctggagggggaccttcctgcaagaattggtgggggccgcggtctccgccttctagaggtggcggcctactgcccttcgggtgttgtgtgcaaagccccgtttcctgctccctgcgcttgtatcctgctgccttccctcctgctggtgaagctcgtgctgccctttgctggcctgtgctgccactgccgacccgtgtcccgtggtggagctgtcgtggggctcacgtgacttcccttcctacaggcgtccgagctgggccacagcctgaacgagaacgtcctcaagcctgcgcaggaggaggtaacgggcagctccgggtggttgtgcctggagcccttcactccaggggacgtgggtgtgtcaggggtgttagggggattgtttgtccagcagctgggactcagtgaggccaagcctcacaccccacctctccagcacaggcgtcctcctcggggcctgggctcctcttggaccccccagctggtcccttcccctggcctagggcctcccttgcagtgcccccagcccagcacccccagcccacctccgttcctctgcctcacccctacagctggccccagagcccagcacccccagcccacctccgttcctctgcctcacccccacagctggccgcggagctgtgcccagaggaggctctggtatgggaatgatgcctgccatcctagggggtcaagagccccgccagctccctgcctccttcggggcctgactgggacaagtggggaagacccacctggggcagcgtgggctgtccttaggtcacgttgctatttgtcagcagtggccggcaggggccacgtttgcagacaccaggcctcacagtgacatggtttcttgatgctggaatccctttggggccactgtagaactttctggggctcagcctgatgggtatccacatgcccctgatatttcggatgccctcacccgggggattcctgcactcctgaagctttaagctttcatctctcccgcccccattaatgccgctgtcttcatccgtgcaggtgaaggagggaaagatttttgatgatgtctccagtggggtctctcagttggcgtccaaggtagggagcctgccagatacgcgggcacagtcgaagccagtctccatattccacggccctgggcgtgagagcagggtgtgccccgtgcagccctcagcccagcttggcagtggccgctgtcctctgagacgggaggagagctgcccagcctgacagcccgagggatatggaaacagcttggcccactgcggcccggtcagccactaactgtcacttctccctctgctcttatcttgctgctgctggccttttcctcggtaagtaagtgccagcgccgtctttgctgccatcagtcccactgctctgcgggccatttggggcgtgcattttgtcctgtttcctggcatgaggcgctctgcggacagacggggagggaagagcaggcctcgctcctcccccccaagcatgtggtgggagctcttgaggtctgtgcacgaggctgtcctcgctgccatgtcccgcacacacctggcaccgctgcagagtggccggggcgtctgtgtctgtacgtgtgtgcgaggcaccccttgtttctggattttgcctgggtcttctcagcgggacggcgcgtgccggcttgcgtgtgggggcctcctgaagctgcctgtgccgcgacagggcctgcctaacctctcttcccgtctccttccaggtccagggagtcggtagtaagggatggcgggacgtcaccacctttttttcggggaaagcagagggccccttggacagcccctcggagggccacagttatcagaacagcggtctggaccacttccaaaacagcaacatagaccagagcttctgggagacctttggaagtgctgagcccaccaagacccgcaagtccccgagcagcgacagctggacgtgcgcggacacctccaccgagaggaggagctcggacagctgggaggtgtggggctcggcctccaccaacaggaacagcaacagcgacggcggggagggcggggagggcaccaagaaggcagtgccgccggccgtgcccactgatgatggctgggacaaccagaactggtagggcccaggtggaaggcgcggacctgacagcattccaataaagcatacgggaacatg

SEQ ID NO: 1089 - DNA, 2315 bp, Homo sapiens
gagaatcatgatgaggcattaaagaagaggaggagtgtctcaagggaggtgagctggaggtgatgcaaggatgtctgatctgaaagcatgttgtggtccgctacacacaagagcaaaagaagagcaggaaggagctcagtgccaagaccatagccacaggaagaaaaccagctcttagggctgcagctctaaagacaggccaggtcattacaggaacgtctgctcccttagccttgccagacagaggagggttaagaaaggaactgctgaccctgatatgcaaactgccacgagtgcttcctgcctttctatcagcatcagatggctagcgatggatggctgtaagattgatgtaattaacattttattttcagggccacagtgctggttgggtgcaccagacaaatcaaccaacagattaaagagtgatggagaaagctgtgttttgggcctcatttgggaacagaatggaagagctgagggtggaagggacctcagcaagtcttctgatccatgtttcaaccttcatttcccgataacctcaaggagagagttgcttttcctgttcttcaaatgagttccttgaattcacactctatttctttgaatttgcacagactgttgaggaacaggcggcagggtcactctacctctgctcagacaagcctggaaaagaaaaattttacatagaagactgagctggaagaggcctgggaacttgggaattcccacttccacactgcccactctagttctcaagaggcggcagctatgctgcagtacagaccactgaatttagattcaggaatctgggtttacatctcactcctcctcttacttgcaagtcacttaccacaccaggcctcggtttcctggacaataaaatggggataacgttgccccatgtggttgttggtggtcatgaaattatgcacacgagcacgccttgtaatctaggttagacctgcactaacctagattagctgaccagggtggaaggtaggaggggcaggcttcagtgtgtgacttacctagaggccaaggggagtcaccatggatagggcagcacttgtaagtcctctgctctctcaatgtggctctgagaatctccaggaagaactggctggttgaattctcaactctaccaagaaaggtgtgctggagaccagggtcatagacgtctccttgttgatgtacgaaaatcaggaagccgtctggggtcctctttaccaggacatagtgtaattattcatcttcttccctgtcagttggcactggaaaattttgcttcttctaaaaggaacaaatatctctagctcttgttgctccaacaaggtgtctggcttgattcctaaagtaaataaataaataaacaaatagattgatagagaataaatacatcaaggtaaaaggaagacagagaaattaaaaagccacatcagagtatcaaggactggggtaccagcagcacccgccaccgccgccacggcgcacacggccggaggacggcgggcccggcgccgcctccacctcggccgccgcaatggcgacggtcggggagcgcaggcctctgcccagtcctgaagtgatgctgggacagtcgtggaatctgtgggttgaggcttccaaacttcctgggaaggacgggacagaattggacgaaagtttcaaggagtttgggaaaaaccgcgaagtcatggggctctgtcgggaagacatgccaatatttggtttctgtccagcccatgatgatttctacttggtggtgtgtaacgactgtaatcaggttgtcaaaccgcaggcatttcaatcacattatgaaagaagacatagctcatccagcaagccgcctttggccgttcctcccacttcagtattttccttcttcccttctctgtccaaaagcaaaggaggcagtgcaagtggaagcaaccgttcttccagtggaggtgttcttagcgcatcctcatcaagttccaagttgttgaaacacccactaacaaagaattacagctaatagaccaacagaggagataaaatggaatttttaaaaatccagtccaaaaatacgtagagaaggagggaaagggaagaatggacttgggggcgacacagaagacaagtagagagagactgaagcagccactggccatcacagcaaacacaagcagggcgcaggacgccggcaagccacagacaggcctgctctctgaattggtgaccacatgagtaacttcacgggtctgttctatgtccagagttgtcaaactgcatgctttaaagatgtgcagtggatcgtatgtcgcttaaatccc

SEQ ID NO: 1090 - DNA, 2487 bp, Homo sapiens
acatacttttacggttacacattcctttacaaacaaccgtgtacatttcagcctcctgccccaccatttcttttctccaggagggaaggctgcatggcgagatggtcgtagaatgttgagtatcctactttcctacctcgcttttatttgcgcgggtttaaatgcgccttaacagaacccgtgcaaaggcttgcctacttgtctggctgcaccggatgagtagagcatcttccttggtggcaggtgggtgcgaggaggagggggctgggcttttctccggacggtgtttgcccagaagaccatcatccctggactacgttaggaggaagtggcaccgctccgaggtaggggaagaagggttataaaggggggagtccaccacacatggtcttgaagaagcttttataaaaggcaaaggcatctttgccggacgttgttgcaaaggagtagaaacaagcagaggaaaacatcccaaagggtaaccactagcgttcctgcttcttgcaacattcatcccaggcttccagctcagcccgccccgggccaggtgatcggccgccacatcccctgcgactgaagcacctgctccgccatgaacctgccaagagctgagcgccctcgctccacaccgcagcgcagcctccgggactccgatggggaagacggtaaaatcgatgtcctgggagaggaggaagatgaagacgaggtggaagacgaggaggaggaggcgagccagaagttcctagagcagtcgctccagccggggctgcaggtggcccggtggggcggggttgcgcttccccgagagcacatcgagggcggcggcccgagcgacccctcagagtttggcaccgagttcagggcaccgccaaggtctgcggcggcctctgaagatgcccggcagccggcaaagcccccctactcgtacatcgcgctcatcaccatggccatcctgcaaagcccgcacaagcgcctcacgctcagcggcatctgcgccttcattagtggccgcttcccctactaccgccgcaagttccccgcctggcagaacagcatccgccacaacctctcgctgaacgactgcttcgtcaagatcccccgcgagccgggccacccaggcaagggcacctactggagcctggaccccgcctcccaggacatgttcgacaatggcagctttctccggcgtaggaagcgtttcaagcgccaccaactgaccccgggagcccacctgccccaccccttccctctacctgctgcacacgccgccctgcacaacccccgcccaggccctctgcttggggcccctgccctgccgcagccagtcccgggggcctaccccaacaccgcccccgggagacgcccttacgctctgctgcacccgcatcctcctcgctacctactgctctcggcccccgcctatgccggggcaccgaagaaagcagaaggcgcggacctggcgacccccggcacccttcccgtgctgcagccctcacttggtcctcagccttgggaggagggcaagggtctggcgtcgccaccgggaggcggatgcatctctttcagcattgagagtatcatgcaaggggtcaggggagcgggtacaggggctgcgcagagtttgtccccgaccgcgtggagctactgccccctgctccagcgaccgtcaagcctgtcggacaattttgcagcaacagcagcagcatcaggaggaggactgcgccaacggctgcgctcccaccaagggcgcggtgctgggcgggcacctgtcggccgcgtcggcgctgctgcggtatcaggcggtggcagagggctctaggctgacatcgctggctgcccctttgggcggagaggggacctcaccagtttttttagtatcgcccacgcccagttccctggccaagtccgcagggccctcctagagccaggtgggagtggggagcgatccgcagctgctcactccaccttgcgcggcccatactgggcgtgtgcatctgaatcctgctggagagcaaacacgaacttctgttccctgcaaaatggttagaaagaaacagctggattacgttcctctaaaaaccacctgaacgtaaccttcgcagggcgtcaagtcatcttttcttgccttcggctgtggcttctgtggctttccggatttgcacatttcctggggtactatgaacgtgagtggggtattttgttctggcattagaagaaaaacaagcaagcaaacaaaaacacagcctccgatgccaaacatgttcccccttcttcacttccttggaactggaagtgttattcctaagtctagtgcaaaatgcttctactctctgtgtcttcctgatagggatgtttaatgtaagtaggatattaatttcagaacattgatttcttatctgtgtgtctgacgtgccatctttaatgttaaaattaaggtgttaaaattaagcctagttatatagacgaaataaaatgctaagtcactac

SEQ ID NO: 1091 - DNA, 2911 bp, Homo sapiens
aagccactcctctgcaccgcctccgtgtctgctgtaggtgggcggtaaataaggcccccacactaggcgccaagcaggcccagggcaaggcctccacagccacatgttagagacattctgtcttcctgtgagtaggaaacaaatacaaaatgctgtcattggagcgtgtgaaagacacagtgtggctgagtgggggctggaaagaatagtggatgctttcctaggaaaaatcttcatgttccacgtcacgttttttgttaaggaaaaacacgcatgttgagtgcctgttagaactcatccctgtgctatgtttaaagcctgttgggagcatctgatcccaggtgatgggagcatgctaggccctgggctttcgcagtcgagctggtttcacatgggggataatgcacaccaaggaaccgactcaaaagagaaccaaaaatagtgtgtaccaagatgcccatggcagtcctggtgacagtggcagaggctgacttgagcttgaggaccttgatttcaaggacagaaactacagaagcaggtacaccttctgttgtacatggaaccagcaggccactctaggcttgtcccgcatgcttctgggagcggcatgttggtgcagagccctggcctcagaccgcatgtggcccccaggaagcagggcctccattccagggtgagttgcctgagcccagagaggtgtgcccttcactgccaccagacagccagcgagagcagctcagaactggggtgctgccgacctgcctgaggtgcccccaccagccacactgcctttggggaacagctccaggagagctggtcggctgcttctctccccaggtgcatgttcccacgcagggagtatagtgcgcgccagttccggcaaatgtcctccccgaaacgctgcaccaagcacaggagctgtgcacagaccaccctcagtaacaggcacagcaggcgcgggtggaaggggtcattagggttcccctgagttctagcaggaacattccccagagttctagcaggaactatagaattcgttagtcctcagactggtctatagccctcatcattgttcacgtcaaaaccagcatgttgagacttgtattcatttgaaaaaaggaattgagggtttggcggcctttattttaacctgaccaagtgagggaatgctcaggcccttttgctctggtgccatagggcggggctgggcgggccaggcaggaggtgtggcatgggagacctgctccccagggcctggcctggggctggctgtacagaaacacagactacatctcaaggaccccaggagcttgcagtcccaacagcagaatgttattcatgttctttttatttttgcgtttgtccagaagcactaccacaggaagagcaagaaggaagtggaagtgaggagagaggagaggagaaggggaccagctctccggactatcggcactaccttcgaatgtgggccaaggagaaagaggctcagaaggagacgattaaggatcttcccaagatgaaccaggagcagttcattgagctgtgcaagacgctttacaacatgttcagtgaagaccccatggagcaggacctgtaccacgccatcgccaccgtggccagcctcctgctccgcatcggagaggtggggaagaagttctcagcccgcacaggcaggaagcccagggactgtgccactggggaggacgagccaccagcacccgaactgcatcaggacgcagccagggagcttcagcccccagctgcaggagacccccaagccaaagcaggcggagacacacacctcggaacagccccacaggagagccaggtggtggtggaggggggcagcggcgagggacagggctcaccctcccagctgctgtctgacgatgaaaccaaagacgacatgtccatgtcctcctactcggtggtcagcacgggctccctgcaatgtgaagaccttgcagacgacacggtgctggtgggcggggaggcctgcagctccacagcgcgcatcggcggcaccgtcgacaccgactggtgcatctcctttgagcagatcctggcctccatcctgacggagtccgtgctggtgaacttctttgagaagagagtggacattggactcaagatcaaggaccaaaagaaagtggagagacagttcagcaccgccagtgaccatgagcagcctggagtttccggctgatgcctgcagctgtgaggcctggcccaaggtgtcatcagtggggctggcctcatctcctcctgcctttcctcccttatcagtttctctttaaaggtgtgcccctcctgctctcccaggagcagtgagttgtgagtggaaagaaggctggtgcagacccagctgccttagacagattccctgggcctgcatctcctggcgccggctgcttctgggcccaggaagaggctgtggctcccaccttccttacacctggtgggagcccgcctcgcaccagctgcacctgcctagcattagaggctctcagatctgcccttgcttgcctcatacctctgtgctccacactgcggccaggccagctgagtccctccatccgtggatgctctcctgcagctatgtggtatgggggtcattcctgcctcttggcaccaggttggggggcatgtgcttgttgggcaccaaagtgatggaaccctcaggtgctctccgggagcctgaacctcctgactgaggaacatgggcagaacatgtttattgcacagagtgggcgctgcgcacaggcgtggctgtacacgtgctctcagctcatcatcctttccagtaactttaaaaaaacatccctcaggtcctgatatatttccttggattcatttcacttggctagaaattacactgtgctcaatgccttaataaatccctgaaagaaat

SEQ ID NO: 1092 - DNA, 3217 bp, Homo sapiens
atgatctcttgctgtttcatcaggggaaagcacaaagctatttctgaaattaggaaaaaaaaaaaaaggtggaaggagcagccagatgttccacaggaccccaccaagaaggtcatttccaaacccatcctggaagggcccaggatccaaaggtcatcagtcctgcttatctgaccaactggcagtgtcttctggctgctggccggagacagctcttgccctttccaaagtcactgtccactgccttgcaattgccagcttgtctggtccagctttgggtttggtgagacttttgcaacatccctggttgtttccctggcaatgtgactatccagccctaacccaaagcaagggagtgcccctttcctgggtgaagtttacaagaaggctgcttaaatgcctgcttcggggaaatctctgcctctctctctctctgtctctctctctgtctctctctctgtctctctctctctctctctctctctctcagtgtatttctctactttcttttacatttcctttttttctatccaaaaacaatgtgcttgttgaggcactggtaaccctgattaaccagaacctcccattcccagtatcgctgttcctacgcccatttcaccctcattaccttctgcttccaaggaatatgacagatcaccaggatgctgctcgtcgtgaggatttatctcaaaaaccaacatccaaaatgggagggagatgtggcttgaggtcaagcgccatgcatcccaagcctttgaccttcccgctatggaagtgcactggatgacagaaactgaatacattgctccctttccctagggcaaagttcgacctctgttaagtggagggatttgtgagataaaaattcaaaatgttggcctgaggcctgagagtgtcaccaaagacagagggagcttcactgagactcagagggaaaaggaaaagagcctcaaacatttttaggaggttgtccatcatgaaagtaaaaacgaaaagcaagatttgatctcccttcagttaattaggcaaggctaagtaactcaaagccccctattagtaacattctggttcactgaggtttgatcatattcctatctgcattccttcccttctttgaaggacagctgatctttcagaagcagaataaaattaagatgttagaacaaaggtctcagtctcagagaaccgcatcacttcatttgctcagacccatcctcttttgcaaaagggtctgcttggagaggccaaaattcagggtgctctcaaaggcaaagaaagcacattgttttccttctccagtccaactttcatcttttcttctgctgttttcttttcccctcttctttttcacaaatgttcaaaatggtctcatgcgcatgtgtcttgccccactttcccctttagctgaacagaaaattttgtctcagtaaaacgaagtcaaaaaacaggattcctccaaacatgcctcctcccgcactggccagccgagtccagctgagaaacttatgctagattcaatgtcattgagcaatgctttattgaagtctcgttcttctcacttctgcaccagtgagccaatgatactgacagaaatgtcatctctcttctatctgtggttgctgtttttggagtaaaagtttctgtgtgtgtttttttagttcttttgatggctgttgttttgcattgtaaataccatgatgggggacccccatcagaacatggcttatttaataatttatttcgtatttattgagtaatattgggaaaagagaaggaccacctctttccctgaattgctattgagaattggtccatctcccagctccaggtgctgctgtctgcagcaagggcattactgcccaggtaaggagtgctagaatcaccaagcaaattgaaattggcagaaatggaggcttcagtcacacaaattagactcaaatggaactaaaacactggttatctccaggaaaacctcatttagatggaaattaatggaagaataaaatgcctacacatgaaccaacttctattaaaaagtcacaactccttgaaaaaaaaaataaagaaaaattgtaaactcttttttttttctggccaaggaaagctatgcctcatcttctaacgagccaagccaaaaagactgcaatggtattcctatgtgtttctttggcctgtgtatcagtctgaatgaaatggaatgggtctctagcctcagtcttgtcatctgtaaaatggggcttgtcctatatattatctgcaagacgtgggaaatgggggctcaagccctgatgctatggactccatactgttggatatattgtctcttgtgtcttctgctgactgcagattaaagggtgtcaaccaaggaaggaaacaaaaaagtagggcctggacttcatttgcagaatgaggtcacagtcgttgagtcccacagtcatatatgggagacctcaagttgctgtcaccttgataactcttgtatcctgggttaaagccctctgtatttagtttgaacttctctctaagccccgtggtccaaagtcatcacgggagagaccaagatgggcttaccttgccctgctctggatttaaccattgttcattgtcaggctatatttttgtacaatcattcaaataacccagtgacataggtcatattgccacttttcagaggagaaaactgaggctcaggagggggagttgacatgcccaagctcccttgagctcagatcagcttgactcaatgtccaacattcccttggtagctttttctccggggtcctgtgctataagaacttctctctgcactgtatttttttttctcccaattcttagctatttcctcaagcaatgattggccaaggacctagcataatccaccacattggccaaggggacgtggtgcaccccaaggccatttctctgcattggaggctgcgaatctcctctggaaaattcccaacccgaggacccaccatgagcccagctcagcctgaccagacagcctctgcctggagcattcacatcagatggaaagaagctgctgtgtcctccagcatcctgggaccctgtcctctgcccagtgacacagcagccatggctagcttgatttctggtctccaaagctaagcataaccttcccggggtttctggtttttcagcctgtacgaaacatgtctctgttctaattaaagttcccatggtatggtgttctcat

SEQ ID NO: 1093 - DNA, 2873 bp, Homo sapiens
agcgaagatggcggcagtggagaagcggcggcaagcggtaccaccgccggccggtttcacggacagcggccgccagtcggtatcccgggcggcgggggcggccgagagcgaggaggacttcctgcggcaggtcggcgtgacggaaatgctacgtgcagccctgctgaaggtgctggaggcgcggcccgaggagccgatcgccttcctggctcactacttcgagaacatgggcctgcgctcgcctgtaaacggcggcgccggggagcccccgggccagctcctgctgcagcagcagcgcctgggccgcgcgctatggcaccttcgcctggcccaccactcccggaggtgcgcagtgggccggcttgggcgggtggggcagcgatggacttcaactcccagcatgccgcgcgcggctccctacccgcagcgccggcgcaggggcccggggcttgctgggagttgtagtgcgcgatgccttcttgggtgggatggatcggacaaggtgggctggagggtccgggcttcggtccggcgctaggcagcgcgctgcatgcggcgcgagtccttctggccggcttcgccttctgtgatgcctttttgcaggtgctgagtttccccttgcagttcatgattttcaaaatcgtgcagctcaagaggacttggcccgaggtcgcagagccagcccccgagccaggtcctcctagtcgcctccttagcagcctcatgttatccccgtccattcagccagaacgtgaatatttacagagagcagcgcagtcacccagggcccccatcttaggggacaggctcccagcgggcaggtggggattcctggaagagcctggcgatgtgcgggcgggttgcagggaagaggcccagcaggtgcaaatttagaccccgagtgtggggcacacgggaggcgggaaagccacggaatttggctgaagcatgcgaggctgcaggtgcctacgcgcggtgtcccctggctggggccagttctgagcccagggaaggtggttggggactatctgttggcgttggggatggatgggctgatgtcttttgttggggggggggtccccagaagcggagcctgaggtaggcattgtgtgtgcaggtgattttataagggggtgcgcccaagagaacccaggaagggggtgggaagagcaggcagggaaggatgccaagcaaaggtgccctttcagcctcataaccagggcataagcgcccaccatggcagccctcgccagagtcccagagaagttcggggggagaagagagatggggagtgtcccccctaccacgttcagggtgcacaggtgtccaagatcatactcagataagggtggcagggtgttgggtacccggacaaggagcagacttgctccggtggcccagtggctctgaaggccccgcccgatgatttgctggagccaggtgggaggggagcgggcaagggcaggcccagagggtcagtggggccgtttactgcgatggaaggcccctggtttgaagaagctgccagagccacttgcggattaagttggaggctgggaggagcctggagacaggaaggtagaaagaagcgtctgcaactgacgtggggccaggacagaagactgaactggaggggtcctgaagtcttcaggagagatgagaagagctcaggaccccactctgagggcacctagcccagagagcccaccagagagggtgagaacgtgagaccagaggtgaacggggagcaggaggaagatggcctcccaggacatccggaagagaatctcccaaggaggaaaaggggtcaacagcaggcccaccacgtatggttgttcaggttgagcactgcacaagccactcaccccgtagacactgcagatgaggatatttatatttatattaatttccgagggctgctggaacaaattacctccaacttagtggcttaaaacaacagaaatttattctctcacagttctggagggcagaagtctgaaatcggagtgtcaggaggaccacactccctctggaggctccagggaaggagccttccttgcctccccagcttccagtggcggccagcagtctttggcttgtggccacattgctgcagtctccgcctccgtcgtcacgtggcctcctgtgtgtctctgttctgtgttccctcataaggacaccactaggccccaccctactccggtgtgacctcaaccgtctacatctgcaaagctgctgtctcaaataagctctcagtctgaggttctggatgggcgtgagtttggtgggcaccagtcaccccaggacaggagtggagccattggctggaagagttctcatagcagggactcagggcaagggtggtgctggtggcagatgcatcccggccctgggctcgcctgggctccccagagacacagccagtggggaatgcagaagacaggtgcacagacctgcgtggcatctgattctgtgctcatggagccaggcctgctcccgtcctcccagcaggcagctccggccgcccctccatccttggaccgtcaggaacccctgaggtcacctgaccagtcaggaagagaagcccagagcagccgggcgcggtggctcacgcctgtcatcccagcactttgggaggccgaggcgggcggatcacaaggtcaggagatcgagaccatcctggctaacacagtgaaaccccgtctctactaaaaatacaaaaaattagccgggtgtggtggcgggcgcctgtagtcccagctactcaggaggctgaggcaggagaatggcatgaacccaggaggcggagcttgcattgagccgagatcgcgccactgcactccagcctgggcgacagagcgagactctgtctc

SEQ ID NO: 1094 - DNA, 2805 bp, Homo sapiens
gaggaacccctgcagtccatgatttcacagacacagagcctagggggccccccgctggagcatgaagtgcctgggcaccccccgggtggggacatggggcagcagatgaacatgatgatacagaggctgggccaggacagcctcacgcctgagcaggtggcctggcgcaagctgcaggaggagtactacgaagagaaacggcggaaagaggaacagattgggctgcatgggagccgtcctctgcaggacatgatgggcatggggggcatgatggtgagggggcccccgcctccttaccacagcaagcctggggatcagtggccacctggaatgggtgcgcagctgcgggggcccatggatgttcaagatcccatgcagctccggggcggacctccctttcctgggccccgtttcccaggcaaccagatacaacgggtacctgggtttgggggcatgcagagtatgcccatggaggtgcccatgaatgccatgcagaggcccgtgagaccaggcatgggctggaccgaagacttgccccctatggggggacccagcaattttgcccagaacaccatgccctacccaggtgggcagggtgaggcggagcgattcatgactccccgggtccgtgaggagctgctgcggcaccagctgctggagaagcggtcgatgggcatgcagcgccccctgggcatggcaggcagtggcatgggacagagcatggagatggagcggatgatgcaggcgcaccgacagatggatcctgccatgtttcccgggcagatggctggtggtgagggcctggcgggcactcccatgggcatggagtttggtggaggccggggcctcctgagccctcccatggggcagtctgggctgagggaggtggacccacccatggggccaggcaacctcaacatgaacatgaatgtcaacatgaacatgaacatgaacctgaacgtgcagatgaccccgcagcagcagatgctgatgtcgcagaagatgcggggccctggggacttgatggggccccagggcctcagtcctgaggagatggcccgggttcgggcccagaacagcagtggcgtgatgggcggcccgcagaagatgctgatgccttcacagtttcccaaccagggccagcagggattctctggaggccagggaccctaccaagccatgtcccaggacatgggcaatacccaagacatgttcagccctgatcagagctcaatgcccatgagcaacgtgggcaccacccggctcagccacatgcctctgccccctgcgtccaatcctcctgggaccgtgcattcagccccaaaccgggggctaggcaggcggccttcggacctcaccatcagtattaatcagatgggctcaccgggcatggggcacttgaagtcgcccacccttagccaggtgcactcacccctggtcacctcgccctctgccaacctcaagtcaccccagactccctcacagatggtgcccttgccttctgccaacccgccaggacctctcaagtcgccccaggtcctcggctcctccctcagtgtccgttcacccactggctcgcccagcaggctcaagtctccttccatggcggtgccttctccaggctgggttgcctcacctaagacggccatgcccagcccgggggtctcccagaacaagcagccgcctctcaacatgaactcttccaccaccctgagcaacatggaacagggtaccctcccgcctagcggcccccggagcagctcctcagcacctcccgccaaccctcccagcggcctcatgaaccccagcctaccattcacttcctccccagaccccacaccttcccagaaccccctgtcactgatgatgacccagatgtccaagtacgccatgcccagctccaccccgctctaccacaatgccatcaagaccatcgccacctcagacgacgagctgctgcccgaccggcccctgctgccccccccaccaccaccgcagggctccgggccagggatcagcaacagccagcccagccagatgcacctgaactcagccgctgcccagagccctatgggcatgaacctgccaggccagcagcccctgtcccatgagcccccgcccgccatgctgccctcccccacccctctgggctccaacattccactgcatcccaacgcacaggggacaggggggccccctcaaaactccatgatgatggccccagggggccccgactccctgaatgccccctgtggcccagtgcccagctcctcccagatgatgcccttcccccctcggctgcagcagccccatggtgccatggcccccactgggggtgggggcggggggcctggcctgcagcagcactacccgtcaggcatggccctgcctcccgaggacctgcccaaccagccgccaggccccatgcctccccagcagcacctgatgggcaaagccatggctgggcgcatgggcgacgcatacccaccgggtgtgctccctggggtggcatcagtgctgaacgaccccgagctgagcgaggtgatccggcccaccccaacggggatccccgagttcgacttgtcgaggatcatcccctcttggtttctccgcacccgcccattttccttctgtctttacctgcttcgtatcctttccctgctgatgtggctgacccctctcccacccctccctgcaggcggctggccaggtgggcaggtgccagccggagctgtaaatagagcgctgcgcttttgtgctggtttgtgcgtgtgctgtatttctgtgttttgatagaagtcacac

SEQ ID NO: 1095 - DNA, 2481 bp, Homo sapiens
aagaccgtcccggatggcctcggggactgccagtgtgtggaggtgagctccgggattgccggcgttcccgcttctgctggttgcttcatgctgcaggctgcggccgtcagccctcgctcgcattggtggcgctgaggtgccggggcagcaagtgacatgtcgtcgggcctccgcgccgctgacttcccccgctggaagcgccacatctcggagcaactgaggcgccgggaccggctgcagagacaggcgttcgaggagatcatcctgcagtataacaaattgctggaaaagtcagatcttcattcagtgttggcccagaaactacaggctgaaaagcatgacgtaccaaacaggcacgagataaggaggcggcaagcccggctgcagaaagagcttgcagaagcagcaaaggaacctctaccagtcgaacaggatgatgacattgaggtcattgtggatgaaacttctgatcacacagaagagacctctcctgtgcgagccatcagcagagcagccactaagcgactctcgcagcctgctggaggccttctggattctatcactaatatctttgggagacgctctgtctcttccttcccagtcccccaggacaatgtggatactcatcctggttctggtaaagaagtgagggtaccagctactgccttgtgtgtcttcgatgcacatgatggggaagtcaacgctgtgcagttcagtccaggaattacaagcattgaatttgatagtgctggatcttacctcttagcagcttcaaatgattttgcaagccgaatctggactgtggatgattatcgattacggcacacactcacgggacacagtgggaaagtgctgtctgctaagttcctgctggacaatgcgcggattgtctcaggaagtcacgaccggactctcaaactctgggatctacgcagcaaagtctgcataaagacagtgtttgcaggatccagttgcaatgatattgtctgcacagagcaatgtgtaatgagtggacattttgacaagaaaattcgtttctgggacattcgatcagagagcatagttcgagagatggagctgttgggaaagattactgccctggacttaaacccagaaaggactgagctcctgagctgctcccgtgatgacttgctaaaagttattgatctccgaacaaatgctatcaagcagacattcagtgcacctgggttcaagtgcggctctgactggaccagagttgtcttcagccctgatggcagttacgtggcggcaggctctgctgagggctctctgtatatctggagtgtgctcacagggaaagtggaaaaggttctttcaaagcagcacagctcatccatcaatgcggtggcgtggtcgccctctggctcgcacgttgtcagtgtggacaaaggatgcaaagctgtgctgtgggcacagtactgacggggctctcagggctgggaggaccccagtgccctcctcagaagaagcacatgggctcctgcagccctgtcctggcaggtgatgtgctgggtatagcatggacctcccagagaagctcaagctatgtggcactgtagctttgccgtgaatgggatttctgaagatttgactgaggtctctcttggcctggaagaataacactgaaaaaacctgacgctgcggtcacttagcagaggctcaggttcttgccttgggaaacactactagctctgaccttccatacctcacttgggggagcacagggccccgctgggcctcctcaccaacggcagtgccaaaatcagcccccacatcaaggtggtgttctctgtgctttctctcgtccttccaaagtcggttctggcctaacgcatgtcccaacaccttgggttcatttgcccggtgaactcactttaagcattggattaacggaaactcccgaactacagacccctccctggtgggttgcatgaatgtgtctcattactgctgaaatgtcctcacatctctttcactgttcttcagagctttctggctctctttcccccacaaaattcgacatatttaaaaatctccgtgtggctttaaaaaatggttttttgtttttttgtttttttgaggtgggagaggatgtgtgaaaatcttttccagggaaatgggttcgctgcagaggtaaggatgtgttcctgtatcgatctgcagacacccagaaggtgggtgcacactgcatgcttgggggtgccaagggattcgagacctccaacatacttgtctgaaggtggtgattctggccatggcccctctgccaagcctgtgtgcgatgcccttggtgctttagtgcaagaagcctaggctcagaagcacagcagcgccatctttccgtttcaggggttgtgatgaaggccaaggaaaaacatttatctttactatttatttcattatgttggccaacagaacttgattgtaaataataataaagaaatctgttatatacttttc

SEQ ID NO: 1096 - DNA, 2770 bp, Homo sapiens
gtgcgctctcctccctcgcccctttcttccctctctcctctctctctctccctccatccctctctttccttctcagtttgtgactgacccagcagccccgtcccccgtctgccacaagcagtccacctcctggtgctgtgtgctgcgtgccagccgctgctcccgctgagtggagactctggcaccagtgcccactgcgctctgcctgccggtggtgtctggatttctataggaatcccaggagggtcttactggagggttgagagccacctgattgaaggcatttgcagtcagagtaaagacggggggacgcttggaccagcttgcctgcaccctgcccaaggagctgagggggaaggacatgcggatggtccccatggagatgttcaactactgctcccagctggaggacgagaatagctcagctgggctggatattcctgggccaccctgcaccaaggccagtccagagcctgctaagcccaagcccggagcccagcacagcctgcccacagaagcagaggcaccggccggcgagcgtgaggcgagccatgggcacggtgatcattgcaggggtcgtgtgcggcgtcgtctgcatcatgatggtggtggccgctgcctatggctgcatctacgcctccctcatggccaagtaccaccgggagctcaaaaagcgccagcccctgatgggggaccccgagggcgagcacgaggaccagaagcagatctcttctgtggcctgagcgcccatccccacccggccaggtaggaagggcggggagagcacacggcattgctcagccacagctcccaccttgacccggcgctggccactgcctccccgagtccaccctcctccccgccctccagcagacaagccacaccgggttctctccctgcactttcgaggctccctgaaagccaccgtgctgggggctcctgctgatgctcctgtctgggccagtaaatctttggaacatgtgggggatctccctaagctctggccacagcaaagcaaggaggtgtgtgcaagaggaggcttccggactgggcattcccctgtcgcccttcctgccctggggtggccatagctggtgactcttcctaccttgctggtcccacctcacctgcattgaggggacggggagggagggatctgagggatgaaggtagatttctgagactctctcctaagccagaaagacgttcttaacacccctgcagtgtgaaagctggtccagctctacaactgttggtaccaatgtgcaaacacaccagccctgccatctggacccagcactcagaaacaccatacacccctggccgacgccatcatgcccctggatctgctataggccacactgaccacatgctcctggattcgctaattcactcacacacccattgcatcaccagtgcggtcacatggattgaaagaattaatacacacacacacacacacacactcacacggtcacacggagaccgaggctatgagcgctcgaacagcagagacatgctcttccccaggggtctccctgagaccacagagcctctcgcgtgctcactgcaatcttctcaagtcaacagcaggaaggaactcaaccagtaacaccaggatcctttgagatcctctaaagtgggccaaagtggtgcccctggaggagccctcctgtcaccatggtaaccctctcacacctctcctgctgggctttcccgggataccacccaggggcctggagcggctgcatgtgtgcatggcggcctcctgaggacccagccacacaccactggtgttgcctcggtcctgcccacgcatctcacagcaccaggccctgtggggcccccactgattcctccacagcctgcagcctggcaccgtgactctgtgcctctcgccctccatcttcagtactcctggcctgtgacttcagggctgggacttggtggtgctttgccattggtggcaccctctggggaaagcaggtggcaggcagaggacacggtggctcccctgaggctcattgcctgccagcttattgcagacagagcccaggagcaggagcgggtggccacgtgctgcccagaggctcccaggatggggcctctgttcccgggctttgtctgctcagtgtggctccctagagcacccagccggggccaaaccagagagtgggtggggagcctgtctgggacagagccacctgctgccaaggcagtgcaagttttccaggttacctgtccccctccctagctctgcccctcctcagagtgtgaagatggtgggtacctaggtgtcatgctcacaggctcaggaggcatcaggctcgtccctggctctgggatggaatctcaatgggggctcaggaagaggccagcaagaaccctgaagccaagggtctgagcagagggagttggcaggcctagctcctgtgccccactccgaccctccctgctcatgcggcagtgggtgggtgaggtgggctgggggcctggaggagtgcctttgaggaggtcagtcctggcaggtggacagaggacgcctggcatgggctgcttactgggaccccaggcggccctggccatggccacagtcttccttcttttggcgtgtgggctggtaccagatctggggattttctaaagggactggggggaggggagggcattgtcaatggtggtatctttagcctgagacagaagatttttaaaggcaaaattatatttctggtttgttgtttcagaagaccaataaagactgtattttcct

SEQ ID NO: 1097 - DNA, 2963 bp, Homo sapiens
agacagccacatcctagcaccctgtacaatcagttagtggccttcccaccagcgcagtcactcattcctattagatcccgatgaagccaggccctggggtttccattttcccacctcttaggggaattgggttccccgcgtcctgtgatatgtcagcaaatgtcctcagccctggcctgcacatgtggcctcagtggtggtctttggggtttaactgacgaatggaacattttggatcaggactgatgggagaatctcctttcatttttcttcacctggggcaattacattctaaggagcggaataaagggcatgttctgcccaaagcatcagggctcacaggtcagtcacagccatttagggagggcatgtcacccaaggagggctcgcccttctttccagagcatcctccgctctcagcagagctgcttctgcccacccatccctctactatagcactgagcactgtttgcccgtgtcagaatccctcacccacatgtttagcttggtatccgagcttgggaggccggcaatgactttcaacatgaattgctccatctacccatccatgcatttggcctacttatcttgaccccgtgcttttggccttttcttctcctgaaagcaaaccctttcattttgggtgggctgtgtagcgccatgggctgtggttatgaagcaaacaccctttcttgtagctgcctcctccggggttactgccctgagcatgtcccagctggatctcgtctgccactgtcacccatagcttcttccccatggtgctttccatgtgtcacacaccacgactgtgacccagggtcggggtcaagagtagcctggggccaagccctcccacccatgagcggagaagtcctccccaggcctcaccttgcctggcgcatggtccctcccatgagctttgctttcagcctttcagcttcctccacagggtggcagtggttgtaactcatccattcatcccttcatcccttcattcattcactcacagccaacagacgtttttaaaaaattagccagtgctatactagagctggctcccaaggacccgctgccgcattgccttttgaaacaaaacaatgaacacgttggtaaaggggccgtgcttgtgtgtcggtgacaaggcgagatccctgagtcaggtcaggcttgtagattcgagttctgttgcgagtttgattgcccctctgactttgtcccctgtacaactaggttgattaggaatcagccaactgtgttccctgggtgctcagaaatcacagcccatatcctcgagaggccaaaatgagagccagggggttccaagatgagtggctgcttctggccgggagcaggttttcaagtcattagaacactctggcctttcctggaggtgatcttggagccattcctgcccctttcaagaggagttaatgcccagctctgtttagagaaaattgggggagatgattgctcatgtgggtgataagaatcacctcccgtgcaggggtctgcatagaacactccataggcaaacctgggtgtccaaggcacgtggcattttgcaaactctgggtgcagctccgagctgtcctgcaggtcccagaccaggtgagaactccctgagttcctgctgcctgggtcgggggtgaggcataggtcttgggggttcaacctggaattctgaatgtcattcattgcattggagaggaaggagagtaggcaaagccaagaccctggaactggacaaactcgtgtggtttaaagtcactgtgagagctggagttgagtctgcctacgggggagaactgcggcacctacctcgcagggctgttgtgaggagcaatgtaaccgtgattttgaactgtgattctggaagggcggtgtgcgtgtccccgggggtgtgccaggggagtgaggagaaaaggccagggagacagcctcactcaggcagctgagtgggagagcatttatctctaaacctggaggggtatatggtgggacaggaggaatttgggcaggaactttcatgctaggggtttgggggactcgctggacaatgcccctggaccccccgggggtacgcgttcacgctcacctctgagaggctggaaacgcctggctgtgctttctgaatgctgtgtgcttcctgcctctgtgcctggcctgtgtgcagcacctacttgtgtccgccttcaaaaggcccttctgggtggcgtccttttccccaaaatattaggcaccagccatcaaagatactgcattgttgcctcccccacccctccccccaactgacaacatttgggctcaaatgcagcaggctgggtgcccaacacagtgcctggcgagtggtagcgcttacgtttcttttctgttgaatggatggatagctaatgaaattgtaaccaatgacaagccttgatgtttataacctttactaagagattattattttgctcttcatggacctgttaacaaccaccatattgtatcttacggacgtttgtatgccacgtttgaagagcaggagccttgtttcggcgtcatgttgatggaacttgagctgtctgatgcgaatctgtgttttatgttagaaagcgcgtagccttaggatctggcagacccaggggccacttaattaaccctttgcctctttgaccctcaatctccttttctctaagccataggtcacctgaaagcctacctcacagggctgttgtgagggccgagggtgggtgtgtttcaacagtgtgcagatgctggctttccctgggaatgggcatatgttgggatttgtcttgaaagcatgagtgatggctttactagtcctaagtgaataaaaagtcagccctgaccttacgctgggattgcatttcccacagtcagtggcatgtgcagaccactggcagagcagcctgcaggtgcttagcgatgtgggcccagagtaaatatttgtttgattgatg

SEQ ID NO: 1098 - DNA, 2498 bp, Homo sapiens
agaaagcaccaaccagtcggtggttgctggtggctgggaggaagggggacgggagtgacggccgatgggtacagggtgtctttctggggtgatgaaaatgttctactgtgatgacggcacaagtctgagtgtcctcccttaggaggctgatgggtataaaccacctcccaccctccactgggcacctgccctgacagccagtggatggagggtgtccaccccagagagtcacctgctttacccagggactctccagcatgccctcaatgtgcccatgacccacaggtagccttaaaggagacttgcctgggtctggaagggcctgtgtgccaggcagtgtctgagcccggagacggccctctctggataaccccctcactctccccgggggtccaagtgccagacatgggctctccaggccccagcaagggcctctggccctggcccctccacagcagccacttctccaggcttcatcggcccctcccacgagataccttgacccctcaacccccactcctgggggcctgcccgccgaccagccccgatcacagcccctgcacctcagttcatcccactcctgggggcctgcccgccgaccagccctgatcatggcccctgaacctcagtttatcacccggcctcctggcctcatggaggagcgacccctgcacagcccccacgctggcccctgacctctaggcacacacaggcaccaggacgcactcaccatggggccctggccatccaccccacccctgtgagcctcacttcctcctctccaaagtaggggacaccccttcatgcacagagcagtctagaggaaaaaaggaggcaagaggaacaaaccctttcccaaggctgcctcctccaggaagccttcctgaacattcctgaactctgacagcattttatccgcactctcaggccttgaggctcggcccatgcctgaggtgtgctctccagaggcctgcagggagacagcatctggcgggcctggtacatgtgagagctgtgcttgcacagcacttcccaacctgcaggccacgcggaagacttcaggacatagcactgagtaactgctagctgctattactccctcccacgatctgaatgaatgagaggcacggggcatgaagactaaggagccagccccgtgagggcatcccttggcttttcagagccctccaccatgaaacagttagagcctcgttcagccacgggactccggataaatgcttggaatatcggccattggcgggctttgctgcctgcacaggctctacagctgcattcctggagaaggtggaagggcagcaaaagagaaatcgcagagccagcagccagcactgaggcccagcaagctctgcaccgggggcctggggtcagccttgtgggcaaggggtgcagggaagagagcaggaaggggcacagctgctacaagcgcacgtgctgcccaagaagcacctccatacacggctctgcaggtgccgcaacgagaacagccgatgcttcccaagcatccgctacacacccaccaaggctcctggaggcgtgaagtcccacaaggcaaggcccccagtcctaggagggcaagtgggcctggactcctgtggctccccactgccatcatatctatctacagggcacagtcctgagctaggttccacttcccgggagctggctccaagccgcccaccccattccctccaggccaggtcagccaggtaggggcagaggatacccctggaggcatcaggctggtcatttcagtgcagaatccacaaacctgagccccaagctccagggctggccgggtaccctctccccaccgtggccaaggagtggcacaggctaatgagctgctcagagggacaggggctaggcacgggcagccctgcgcacgtggcctctggagactgccccgcacctccagcagtgtcaacccacctggggctccgcctctaactgccacactggatgggacacggacacagtgcctagggctggggctgaactcaggcacccagatccttgtgcccctccgggcaggtcactggcccgcctgagcctcagcccctcatccagaacatgtgggcttttttggggtgcacactcacgttctgcagggagtcctggtaggagggcggcagggacgcaagctgggactccgagtggtagggcgagaagcctttccgcagcgtgcggaactctccggagcctgcctgctgcaggggagagaaggagaggggttagacggagggccaggctgaggaggacaagggccctgggcatggctcctcacggcagcaggggctgctcaaaggcacggccccggaggacccctccaccctcccctccacaccgcttatccgtcccccgagccgggatcaatcgatcttcactctccccagctcaaatgtcagcgatccactctccagcgtgggctttgtaaacatttgttggatggctgaataaacagaatgaatgaatgaatg

SEQ ID NO: 1099 - DNA, 3916 bp, Homo sapiens
agacacagatgggaaatgcacaatttgtctgtctatgctggaagatggagaagatgtgagacgcctaccctgtatgcatctctttcaccaactgtgcgtggaccagtggctcgccatgagcaagaaatgccccatctgccgagtggacattgagacacaactgggagccgacagctgagggaggaattagccagtggacaccccatttccttcaccaggtccccccacggccatagcccttgcagccaaactttgccttctgagccatttgacgtagaggaaaagcctgcaagcacattttgtggaaagaggagttggtggtatcggtgtcgagggagaggagggggttggggaggacccacctctccagaatggcgactgtccccatccgcctggctgagcaggagagagggagctggcggtgcccagcgcaagggcgggaaggaggggcccaggctgcggagaacccaggtgggatcctgaaggcactagctgacagacgggcccctcaatcctgtcctctgaaggattgtatatatacctctcgaccacgtaggaaccatgtaggggtctctagctatttctgtggatggcagccggagcatgttagcttaagaaaaatgttgtgtgtggtgctctagtcatcttgtggtggacatgtcgctattaccgaattcgcaccaaatatttctcattgagtttcttgttttggtgcctgaccgaaccaacgacagccccaatcttcccgtctttatgagagaaaaggaaaaaggaatcaaaggtggaagaaaaaaaaagccaaattctgtttacggtgaaaaaggattttgtttttcacccaatttgggaggcgggaggggggggttctcgttttatttttgtttttgtttttaccttggcttttgtttttctcatgtttacagtgcacggagtgtggaagggggtctaggagagggagagctggaaaaggagctgatggggtcttatcctggcctctgagggttcagcggaggtgaggaaggcagcagagctccagcaggtgaggggagagttcatctaggcggggctccccaggcccagggctcaacttcatggccccagctatatccccccagttccacactaaaccagggagggctcggccctcagctactggtacccaatgtgttcctgggagccgagagacccatggtcactccaactccttcctttaggctgtgctcttgcctgtcacaaagaggcaacgtagccactgcctccctatgcaaaaaattaaccagatgatgcagataagacagcataggtgatggctgcttggtcttggccacagtgctctcagccagcactaagggctgaggtcaataccgcagaccttggggaggaagctgagcatcccccgggatgtctccagtcctgacacagtccctcagagatggccctggctctgaggtcacatcagctaggtttgggaggcccctcagcttggtttgggagtgcccgtgttcctggtctctggctgcttctctgactctttgataaccttgggcaagtccctttctttctctgtgcctcagtttccttctcctttgaggggggagagagaacagtgcagccccatttccggtcctgctacctcacctagatgttgtgaggattcatattctctgtccagcgtgttctatgctctcttctgagaaccttgtggggtgtcgggatgggggtgctgggagacacagacctgatacagtatgtctttctgcaccacctcacaattttcctgaaccccaaagggagcagagagataagaggacagaaggatggagatgggaaaatccaccaaattccaacccaaacccaactttctttctccctatgtggaagacaccagattagctggaattctgccaccttcctttgtgccccaccccccactgttccctcatttgcactgctctgtaagcctccccctcacctccattcataacccagtctcaatgccctcgtatcaataagaccggggtgagggggacaggatacttgtcacatatttgaagaaattccatacagtgaaggaaatttgagtctgtattgctgctacaagggtaaaaccaggaccaatgggtaaaagtaacaggtgggcagattttggcttgaggaagagcttctagcacgactggttcatgcgggaatagctgctctggccacctgcaggcagaaagtgggggaagtggctcctggcaggagatttctcccagcactaatatcctggtgttctataaaatctttattgagtgcctaccggtgcaggcgctgggagagacaatagctttgaggagctcacaatctagctgaggagacaagacacatccaatgctgcaaaaatggtgaataacctgattcagggttagcagcaatgagtatcacagcgtccaactcagtagctccagtgtatgaaaatgtctccagggctaaaggctggagatctcaccagtggggaaagtacatctgagtcaggattttgggggaaagctagttactgatagccacaggaagttgagacttctgccccattctctccaatggctgggtgaaaaccaagaattcatcggaagatggctttggcctggaggtagctagggtggtctaggaagctcactcctctcttagtctcagtctttcattctttctgctgagactggcctgaaaggctggcaagtgggagggagtcagtggggaggccaggatagaactagagctggtgtcccaggttccagtctgggctcttcactgacaaagtgggcaacactagaaacttccctttgtctctctgggccttagtttcctcagttacaacctaaggaggttggattggatgcttgctaatttccttctgacactcacactccctaacatcaacacatcttcaaggcggcagagctgtgcgcccacccagctattgaaaaggactttctgtgggcacacactctgtttcagactgggctgggggcacacgtgctgggtgagacagtgggccctcgtcccctcccccctcccaattctctgccccaggctaatattagggactggggaggggaccaccagaggggagagggaagctgcttactttgggggtagaccctgaagcccctcctccttcccccacagatggggacaggaggtgatggggtgctcagaaccctgcagctcccacttctttagccgggcagctgtttgggggacaagagagggccagggtctgtgcttctgctcccggcactggtcagggagtctgggaagagtggagaagaggcagggtcaggcctcagcatctcacatccaccacttccaggaggggagaccactggtaagtcctcctcctgctcaactcaagggactcagaccctttcttgactgagacgcatgagtgccttctggggtgagagcagccccagggtttaagttgggcgtcctagcagctgcagcagctgtgccgccgcgggtccaccgaggacgccaatcaatcaacccaacaccacaagcttggttgggtgcaagcagagggtgagcaggggctgcccctccacctggccaggacccccttcggcacccagttgcccttggccaccacctgtggcaggactcaagctcctcttctgcaaatgttcccagcctccgtgcaagtattcttaactctttacgcctaatgaacaagcacagtttttcaatggtgaagaaaaaagcaccagactttttttctttttttcctaaagaaatcccctaagccccccgcctgtaggcgggacaaacactccctgcgtggggctgtagcaacgtctgtcaggcccccttgtgtttcatctcctgcgcgcgtagagcaaatgctagagcgatttcagctgatagaaaaacaaaaatg

SEQ ID NO: 1100 - DNA, 3410 bp, Homo sapiens
actttttcactgagtcagaccgttgaacaccgtggacacactgtcttgcgtttccgaatatttcctagaatacggacgtttcctaagactcacgataaagattttctgatcgtctctccaaaaccttgccaccaatttgcactcccacgaatcctgttaccgtgactatctcgccatgccctccctagcactgagcgtgatctctagtatcattttccatcgttgctaatttgaacatgagcagatggagtcctattatttggggtcattaatttcgtagcaagtgcagttgaaggtgttttgcatgttcattgtgcagtgcgcgccgtagtctgcacagtttggccggcaggtgggatgaagggcggggctggcggagcgcgcccgccgcctggtaggccagttcggagcggagccaacgctatcccgggccccacggccagggggcgctgcggcccccccaatcccccgccccgtccgggctggggcggaggagcgggcggggaccaaaggttggtgtctttgcgctcggaccttcgccagaggggccgggacatcatgacggtgggagccaggctccgaagcaaggcggagagcagcctcctgcgccgcgggccccgagggcgagggcgaaccgagggggacgaggaggcggccgccatcctggagcacctggagtacgcggacgaggcggaggcggcggccgagagcgggacgagcgcggcggacgagcggggcccggggacccggggcgcgcggagggtgcacttcgccctcctgcccgagcgctacgagccactggaggagccggcgccgagcgagcagcccaggaagaggtaccggaggaagctgaagaagtacggcaagaatgtcgggaaggtcatcatcaaaggatgccgctacgtggtcatcggcctgcaaggcttcgctgcagcctactccgccccgtttgcggtagccaccagcgtggtatccttcgtgcgctaatgggagctgctgtggcaggtgcccccagagtgaacgggagcccctgctgtgggaactttgtgaatcctggagcatctcagacttgaacacacagcatatttggaagagaaaacatgcctttctttgttgaatcacattagtatgatgagtgagtcatccctgcccatctgctgagcttctcacatctctcagtcacacgtggacccagtggtcaatcctgcagagaattcggcggaggttaggtttgggagtggagctagcgtgctaaagccagagccttcacgtgaaggtggcaggcactggggcggaagccaacactcaacagatgcaagcagtgtgggtgtgcagcagaacagtgatcttgggggaggaagaggatgttactggagtcagatgatttgctgtattctcctgaaaggtcgtaggctgacaggcgctcacattccttggctgcctcggttctgagggcagctaaggagctgtttattcctcaagtcatgctccccgatctccttcctctaccactctgtcaccaggagtttaattacaggcttgaggagaagaaaggaagaaaagatatcttgatgctttgaaaactgtgttggcagtgtggcatactgtttaaagtagataaaaccttgtcattttaccccatccctgcatgactgtgaagctggcgaggaaggaggaagaagggcaagttcagatgcaggctgggtggctgggacaggttggctaagggactactctggagggctcttctgcctggcattgcccacttcggcccagccacgtgtttgcagcgaccagagtccctgcaaaggtgtggctggctgtggtcagggtgctactagcaccatcagcgcactcccgccattggctcagctcctctctgccagtccaactaagagtgctttgtcctgggtgggacataggggctgagagagatggggggagacataacacccaggaatgaaaatacagatttagagaaggaaccagtaagtaggagacagatgtgaaggaaatggaaatgaggcaagaggacgttggaagagagaagtttgctgtccaggagccaggtctggagcatcagtgtgagggggttcaggtaggctgggcctgtgcctctaggtagggacaagggaggctgggtagccagggctggtgcttaaaacccctgaggccatgagctcattggctgcctttgtagcatcctgtcttcttctgtgctgcctggtttgacctcatctcacctggattcaaagggtaaggtgggcatgggtcttgggcctgacacccaccaaggatgacctgtggactgccatcggatgctgaacagggagatgaaaggaggtcctcttaccatacccctctgccaaccccccagtaggccactgttctgactttgtttccagaatatccagaaatccaaaggggctgttgctgaacagtctgcaggaccagtgacagcacctacctgttgtcccaaggcatacaaaggaggcctcaacgctcatgcttctctaatcaagccctaccaagacagacagaaagacagacagaaaaaaggaaggggtagaggagaaggttgaagctgtggagctagactctgcttcacttcctgaagcttcaacttcatgtcgaagattcactgggacccaattcctgcattgttaatatttgtgaggaaaagtgaaacaagtgatctggttttagcccagatgatgaaagtggatatggcacattttcacacacgtgagataattacagcttgccccacaacactgggtgttggagaaagggagagatagtcataagtggaagaaaaagccaagcatagtgagtggtaaagagagtgagagcctgtgcaggctgctgacgagccccaggcagcccacaagtttctcgtggggagatggaggcagagcccagggtaggggacagagctgctggggcctttccttgcctgggaatctgtcccaggaagagcttccccactcccatcccccaaattggaaaaaccgtacattcaagcctgtttggccctgaaattcttaagaatctggttaagaattaactcactaatgtcaaaagtcaaaacctcctaggggttgtcctgggagtcaggttcacgggtacagaagatgaatctcagatgtcactcaacctgagccgtcattctctgtggcagggctgccctgggtttctcttactcaatccctggagtgtaagcatttggattgtgtcacagattacctttttaccttttctttctttttttttctttttttcaatatcagtgcccacaccttactgagtattgagttttagagctttcgcttgatgtgcttaaccaagagacttcttttgtatccttttcttgtcctatgatgtaaataaaagcctcgatttatgtaatg

SEQ ID NO: 1101 - DNA, 2862 bp, Homo sapiens
cttaccgtactttggaacttgctgtttaaaaagacagatgaaataagttgaagaaacctcatgtaatgaatccaccaggctggcagtggtgcatataaactgtgggtgtggcaagaccccgaagacatttcacatctttatcgcctcgatcaagtgtggagtcacatgctaatgtgtgctaaagaactgtaagtgttttttcatatgtacttttcattggaagattcccaacaagaatttggatggaaaacctgatccctagcaagaagtctgctctgtatcacctttatatagcagacatgtcaccctgcttctacacagatgatggatgaaagcttggagcaatgccatgtggtcatctggtaaacctcagaatggcgtctcatcctggacatcctgcatcagagttcacacaccacaaggactaaatccttgtcccctaagcaaagaattgggtctgaatgctgtgagggattgcctttttgtggtaattttcattgagagatcttcatttcccctaccaccctggctgtcccagctagtggtgattgcagattccttcccagagaggacatttaaccgttttaaaaaaaatgtcttagattgggttcccaagaagcagtccctgaaacaaggatttgtgtgcaagtaacttattaaggaagtattcccaggggataccagtaagagagtgggggaagcaggacaaggaaggagacaaagccaagcaaatgtttgtcatttcagggagagctccatgaagtttagcctcagcctgatcaggggaactccggaggaaaagttaggcctcagaggtgtcccaacctgaatcaaggggctggctgcacccagaggagatgtaaacgttttattctcaattcctgctggcgtaatggctccagtagctcaggacagtcctctaaaggacaaccacagatgcatcctcagccaggggagacacagggaaatgatgcaaaagaaatgatgcaaaggatctgagcagaacactgcccctccccaccccctgaatgtgtgagtgctgagttacggccttcagtatccaagctctctgtttgacagtagatatattgtcagatgcactgtgctgcttagttttgagtgcagtgtgattttctgaaagggcaatgagatgatggatgtagcatgctcagcactgacctggcccatagtgatcactcaataactgttaacagctatggctgctattcctactgatggataaccatctaataagacagaaaacatggggctaagagcagggtctaacggagtcttaatggcttattacagcctgccaaagtgccagctacatacacatggcatccagtgcggatgaaacaatctataaaaccaagggtctttcttatagcaccttttttactggaagctaacacgttgggagtccgtgaacattgtcaaaaagacatcaaactcaacttctgggaagacagatttttaatacacatacttggctaatactcacaaacatatctaaagttttggcaaaattatgagggtgatgggtgggtactaacctggcatggagcaggtgtgtcttttggtttcttatgcagttgactctgctgcagggagattacagatgtaacctcatgcttctcttcctggtgaacatgggaatagaccaaaaaaatcaagggtcaatggcatgaactaagctgatcctggaaatcagggatgttgcatctaactgtgggatggaggcacagaggtagctacagggagcaggacgaggcaaagaaagcagctgtcactcagagttcgcttatgagttttatcaaaagcagcaagaaaagcagtcttgggtgggttttatcacttattaacagccatttatgaggcccctgctgtgtgtcaggcactgtgcaaggtgctggaggctccccagagaacacttcagggacattttgcctcagggtggcaaaatgcagtggcatgtggactttttgaatgggatgccatttgcagctttcctttgatggactcttgttcataatgccatgttttctttaatgaatcatttaggattcttaggtgatatttctggaacagcaccatcaacagctttggccacatgcacttagagcaactaacttgcctcctgccggggtgtaggtgcgttggtgacagtgtagaagggtgattcgcaggcccatgttctgcccaccagcaaagccccactggagaagggtagactcctgtgggcagtctcagagctgggacctatttgcttctgcttgattctgcgtgggtggacccacatgagcagctgtatacccaggaggtcactaagactttataaaggcaggttttaagaaaaccagccttggcattaccaccagcagatactgaaagcctccccaggaacctgtctggggaaggatgatgcctctgctggtctgatcgtgctgagtagcaggtgggctacggggactggggagttaagcattttgtgcagtgatagagaagtcaagcatatcgttagcgctctctcaacttgggcagttcacaagctccttcccagctcagaagccctctctatgctctcaggggaagcagatggggtggatcagtacatctgtgttacccttccagaatattatttgaaaattctacagtatgttccactttctccccttcctgcttccatggtttcactgtggaatcctataagatattctcctgagcagtattatttcagtttccttcagcttttagttgaatcttcaatgtggttttaaccaactgttcagagaactgaaatggtttttaaatatgaaaaaggacctttgtaaaaatggagtaaaacagtgcccctttttt

SEQ ID NO: 1102 - DNA, 3983 bp, Homo sapiens
actaacagatcactcgacacctaccagcccaggcagggctgggactgggcatttcctggctgagctggaggcttgggcccttcccattgtctcagaaccccaggtgatgccaagacatgggctctcctgggatgccgtgcttggtgacccaggagaaggactagattgctcctggtggttgctcccccttgcagagtcccacctgcccctttgggtcctgttgcctggcctcttttgctgtcctgggtagaggagatgagttcgtcgctggctgcaagctgaggccaactgacaatgctgcacagagaaggggcaccgagagtggccccggattgagcagtccgtagtgcagagcagcccctcgggcgttctgcctggccctgcttcccctgctggctgcccttctggtgcgtgcatcccaggtggcatcatgctgcagcagatcctgcacgacatgtacatcgaccccgagctccttgccgagctcagcgatgtgcagaagcacatcctcttctacaaaatgcgggaggagcagctgaggcgctggaaggagcgggagacttgggaggccctggcccaggacgagggtctcaggcctccaaagaccaagcgagcagcgagtgacaagcacatccaatggctcctaggggcagatggcgaggtctgggtctggatcatgggagaaggccctggtgacaagccctacgaagagatctctgaggagctgattgcagagagggcgcggctgcaggcacagagggaagctgaggagctctggagacagaaggaggcagagatcaccaagaagttccgggatgctctggccaatgagaaagcccggatcttggcggagaagtggaaagtggagatggaaggccgcaaggctgccaaagtcctggaggaacgcatccacgaggaattcaagaggaaagaggaagaggagaggaagcgaggagaagagcggattcgcctccaggaagagcagagggcgaaggagctctactggaccctgaagcaggctcagctgcattgccaagccagtgagaaagaggagcgagagtgggaagaacagttgcgccggtccaaggcggctgatgaggagaggagccgccgagcccagcgcgcccgggacgagtaccgacaccactcgctccgtgctatccagaagggcacggtcgctggcctcagctccatgttccgggagcttggccagagccatgagcaggaggcaagactctaccaccacctccccgacccgggtctgccgcagccccttgccctgccggtcaggacctgggagcgcccgctgcgcccagtctccagagatgtcatcgtccgctggtttaaggaggagcagctgcctcgccgagctggcttcgagaggaacaccaagttcatcgccccctggttccatggaggaaattatcactgtttcaggaggagagttacttcaggaaccctgcggacagagggacagcccaccagactaccatctgttgtttgaataatttttttccttatcaattggattcattttggtatcctgtttttgaactcagcttaagaacttctcatctcaaatcctatggccttctggaagatccaccactatccaaaggaaaaagtagattaatatgcctcaagggatatgacatctatggcatagggctactggtctcatcccagcgatcgggacagaaattgctaatagctcatgcaactctttcatgaagagcttagctatgaccttagaagacaaagcctgtttgtcatggctgccgtaaaccgagctcttacagtgcgtggaccatgttttaataatccaaaataattccagtgccgaaccctgaatttaacatatggtagacattcagtaaatgtttgttgaatgaatgcatgtcttctaaaagttttccaacacaaattagcagtggtttcttgtaaattatttcctactcgccactctataaaatcatggcaataatagaagattatgaaggatttctatggaggacataaatgctgcatctttcataatctccattatcaccctcattgatattatcattggaattatctaaggtgagccccagtttccagggcagctgattgacaccgtcctgccttccttatttaacctcttcttttgccactcgcctctatctttgaatcatattttggccttggttttgcaatggttttatgtcatcctacagatgtcttcaagacctggggtgagttatcaatgcaagaatggttcttagaaatctgatgaggcctctgctctctgggatgtggccctctctatgcaggttactccaatgattagctctgtcctcattgtccttttaattcccttgtcaacttaatctcagtatgttgcttatattaacaagaagactcacgcaataactcctcgataactctcagtgatggtatctgttggtgcatacttgtgttccacagttatggccatatacacagaggtagtatatgatgaagagaagattacagtctttacagtcaagaagacttgggttcatatcctaaccctggaacttactagcattataatgcttgcagcattgtgtttggtgagaggaaaagaatgaatggattctaggaatgttagggaacgatttactttacccgatggctgtatcaaacatctatgccccacttcttctcttgcctcacctattccttagattcttggtcacttctctaccacaagccaccagcactataaccagttttgcgtgggttctgctcttcctccctatgttgatcagtgtcatgtgagcataagccaatggtagcttgccacatgccccatctcccattgctgcagaggcataagacagaagagatgggaagtgaatgcccgatgtggtgaatctgggatgaatgggagtcataggctggtagatcgctttttcctccttcttcctcctggaggaactattctgagagtcatctgtttgtatggtcttgtagaagacagtcctgtaagatcgagcaaccagtcatgatgaaaccaagtggtggccggatcagtatgacaccctgctgcccccgtttttaattcttctctgccttgccctgctctctcctgttgctctgggattgcacttctgaatgaagtagcagctcataagcttttgccacaggctctgtcttttggggaatccaggataagaacccattatacagaagtgttcaataatatcaattttgcaactcactcagctccatggcttcccccggtctacctgtctcactacatgcataaagtgaaatgatggaaggaatctgctttctgaactctaatgtgccttcattgattatcattaaaattatcattaaaattgccttatttctatggactcagaggaatgatgttttagttttggctctctgatttaccaactatgtgactttgtccaagtcatttaacttcagtaaacctcggtatgactgaaaagggagttttctgtatggccgtcactaggtttttttgtgggttagttaaatgataaacatgaaagctctgtccaaatgaaaaaggtatttctaacaacaaccacaataacaataacaacttagtgcttagcccatgatgtatcaggggatatgatgtgatgattttcaaggtgttggaggcaacttctgttccaagaactcccagcagctttgaaagcagactgagatgagttgagaccctgaatccctgggctgttgttcctgtcacccctaattaatatgtgagagacaacagctgggttttccatccctaacacatttatttcattttatttggggcctgcaatttctgcatgtctcatatattttaggttttacctttttacctggctttaaaataaatcccttgtaagttgtcctgcaaatgaaattactgtctggaaaactgcaatttcatcttgagagttttattatgctaataaatgtcaggattctcatat

SEQ ID NO: 1103 - DNA, 3456 bp, Homo sapiens
aaaagatccatgggagaagcatggtttcctgaggtcgcaccatccctcacttcttcccttggctgggagtgggggttcctttggctctgtgtcgctcccaggggggctgtcgccccatccagcttttctttgttctctgtgggtcgagttgttttcctgatgagtcccaatgcaagtacctggatatttcagttgaagatgctgtattcacttgcctcttttgttcctctctgcccctttggtgccagtctgctggagtttgctggaggtccactcctgaccctgtttgcctgggtatcaccagcagaggctgcaaagcagcaaagattgctgcctgttctttcttctagaagcttcgacccagtggggcacctgtcagatgccagccagagctctcctgtatcaggtgtctgtcggtccaagctagaaggtatctcccagtcagtatacatggggatcagggacccacttgaggaggcagactgacccttagcagagcttcaataccgtgctgggaggtccactgctctcttcagagccatcaggcagggacgtttaagtctgctataagcccccgactggggttgctgccttttttacagagatgccctgtccagagaggagcaatctggcagtctggccacagcagccttgctgagctgcagtgagctctgcccagtttgaacttcccagcagctttgtttatactgtggccataaaaccatctactcaagcctcagcaatggtggacgtctcttccaccaccaagctcaatcatcccaggtgaatctcagattgctgctgtgctggcagcaagaatttcaagccagtggatcttagtttcctgggctccatggacgtgggaccagccaagccagaccacttggctccctggcttcagcccctctttccaggggagtgaacggttctgtctcgctggtgttccaggcgccactggggtatggaaaaaagaaaaaaagctcctacagctagttcagtgtctgcccaattggccacccagttttgtgcttgaaacccagggccctggtggggtagtcactggagggaatctcctggtttgtgggtttcgaagactgtgggacaagtgcagtatctgtgctggagttcctcaggctcagaccctcatggcttcccttgggtagaggggaaaattccccgaccccttgcacttcccaggtgaggtgatgccccaccctgcttcggcttgccctccgtgggctgcacccactgtccaaccagtcccagtgagatgaaccgtgtgcctcagttggaaatgcagaaatcacccaccttctgcctcgatctcgctgggagctgcagactggtgctgttcctattcggccatcttgaatcttgcctgttcatttttaattttttctttcagtgtattttcctctcagttcaggctggaaaatttcaattgctctatctttgagttcactgattgtttcttttgtcatattcattctgttattgaatccatccagtgagttttcattttggttattttattttccagctataaaatttccatttgcttctttctttcttttttttttagaaatgttcatctttttattttaagttccggggtacatatacaggatgtgcaggtttgttacataggtaaacatgtgccatgggtagtgttcatctatagctctatcaatgcttcttgtctttaagtctaccttgtttgagagctatgtcagcattcttttttttttaattatactttaagttctaggatatatatgcacaatgtgcaggttagttacatgtctatacatgtgccatgttggtgtgctgcacccattaactcgtcatttaacattaggtatatctcctaatgctatccctcccccctccgccaaccccacaacaggccctggtgtgtgatgttccctttcctgtgtccatgtgttctcattgttcaattcccatctatgagtgagaacatgtggtgtttggttttttgtccttgcgatagtttgctgagaatgatggtttccagcttcatccatgtccctacaaaggacatgaactcatcattttttatggctgcatagtattccatggtgtatatgtgccacattttcttaatccagtctatcattgttggacatttgggttggttccaagtctttgctattgtgaatagtgccacaataaacatacgtgtgcatgtgtctttatagcagcacgttttataatcctttgggtatatacccagtaatgggatggctgggtcaaatggtatttctagttctagatccctgaggaatcgccacactgacttccacaatggttgagctagtttacagtcccaccaacagtgtaaaagtgttcctatttctccacatcctctccagcacctgttgtttcctgactttttaatgattgccattctaactagtgtgagatggaatctcattgtggttttgatttgcatttctccgatggccagtgatgatgagcattttttcatgtgtcttttggctgtgtaaatgtcttcttttgagaagtgtctgttcatatccttcgcccacttgttgatggggttgtttgtttttttcttgtaaatttgtttgagttcattgtagattctggatattagccctttgtcagatgagtagatgcaaaaattttctcccattctgtaggttgcctgttcactctgatggtagtttcttttgctgtgcagaagctctttagtttaattagatcccatttgtcgattttggcatttgttgccattgcttttggtgttttagacatgaagtccttgcccatgcctatgtcctgaatggtgttgcctaggttttcttctagggtttttatggttttaggtctaacatttaagaggatacaaacaaatggaagaacattccatgctcatgggtaggaagaatcaatatcgtgaaaatggccatactgcccaaggtaatttatagattcaatgccatccccatcaagctaccaatgactttcttcacagaattggaaaaaactactttaaagttcatatggaaccaaaaaagagcccacattgccaagtcagtcctaagccaaaagaacaaagctggaggcatcacgctacctgacttcaaactatactacaaggctacagtaaccaaaacagcatggtactggtaccaaaacagagatatagaccctcagaaataatgccacatatctacaactatctgatctttgacaaacctgacaaaaacaagaaatggggaaaggattccctatttagtaaatggtgctgggaaaactggctagccatatgtagaaagctgaaaatggatcccttccttacaccttatacaaagattaattcaagatggattaaagacttaagtgcttctttcttatattttatatttgttgctaagatgttccattaaaaataatttcgaagttattcat

SEQ ID NO: 1104 - DNA, 3776 bp, Homo sapiens
tatgctgtgagaagtgaggagagtggttacctttggtggtggaggtgggctggaaggggttctcgggagcttcctgaagcactggctgtgcttttctccttgatcagtgtgctggctatgggggtatgctcagtttgtgaaaattcttcaatccgtgcacttaggatttgtgtacttttctgtatgaatgttatggttgcataaagcattccatttaaaacaaaacaaaaagtaaagtagtttgtccaaacattatttaaccaaagactactatcagccgttctgattttctgtccaatgctcttcaactgctgaccccaaatatgggctctttgtcctagaaaggggaatatggaagccctgtctctcctttcgtcatctctttcacccaggtgtacaagagcagaacccggcattgagtattttgaagatggagccaatgtccctggtctgcccctgcctcggcatcccccaccacctctggcatccatacccgtggtgggtgctgtaacggcatctgggctttgtcatctcctttgcagaacatcgtagctgtgggagctgggttctgcgacggcctccgctgtggagacaacaccaaagcggccgtcatccgcctgggactcatggaaatgattgcttttgccaggatcttctgcaaaggccaagtgtctacagccaccttcctagagagctgcggggtggccgacctgatcaccacctgttacggagggcggaaccgcagggtggccgaggccttcgccagaactgggaagaccattgaagagttggagaaggagatgctgaatgggcaaaagctccaaggaccgcagacttctgctgaagtgtaccgcatcctcaaacagaagggactactggacaagtttccattgtttactgcagtgtatcagatctgctacgaaagcagaccagttcaagagatgttgtcttgtcttcagagccatccagagcatacataaagtgaatcatgcaacgtgttgggggaagttctgcctttctgatcaatcttttgggttcacgtggaaaccaggacttggcaacatgatgtttgactgtaatctcatcacggatatgtatgaatttttacaggttcgtttttgaattgtgagaggcagttcattagcaaagatgtactgggcagtaactaaacacacatgcaaacatgtgaatggtggtttattcctcattctgtggatgtttctatgagccaaaatttgatgtctttttttcaaaattgcttatgaaatttccacacaatcgtagcttataagattggaacgatctcagccaaatattttaggtgtaattcatatgtatttgagtggaggattttttttctcatttttctagtgttaaattttaaccagcattaacatggtagagtggaggagtgagtgtgttcaaagatcaacatatttaacttttaaacactatctcaaagccagcataattaactactttgattgtgggctgacctttgtttttttaacaatcaggcatttttaattagataatccactcatgtatttccccctcactgcagttgtctgcatttttagcctcttttctcttcgttagttgtcagaatatgccttcgtcaaggctcagaggtaacaagacagaaaattcatctgggattttcctgctgtggctggcacattcttccgattaacagacacttgtatgatgctttaggctagttagtgcattttttagcaaacatttatcttaaacatcacagatccactggggggtgcaaggggctactgttagtcctcttgttagatgcagtcactcctcctggtcacctagtgagcagggacagagccaggagtcaagtgcagtgccaaggtgcatgaccctctgagaagtcactgggctgatttgacctccgactcattggttgtgcaaatgccatgtgcagcctttcctgaggccataggagggcttcctgcagctgagatctatgcaggccatcctctcaacaagtgccactccaagggcggtcctcggtgcagcagcatcagcttcacttgtgggggggtgggggaaggggcggtctcagaaatgcaggttcccaggtcccaccctggacttctgaaggggtgtggcatctgtgtttctgatgcttactacaatatgtgaaccactactttagaaaatctgctttaacttggtattcctctaattgtgttccctaggaaatgactgtcccaagagccagtgattattccaggtgttccctggaaaggtcaagtgagtctgggaaacactatgtctgtacacctcttgaaggtgtcgaatgtatgtttatacatcagtggaacccatttttctagcctagcaagtcccaaacacattacactgaagagattttggtgaggaaacttgctggagttttcagggaacactgttctaggcttaggtgaccttaggatcactcaagtagacccttcactccctgcgagaaattaggatgaataactacctgtggcattgttggttctgaacttttacagttcagacctgctgtgaatctttgatgaagctttaaggtgacactgttgtacaagatgtcagctttgctgaaacgcacattacctggaataagtgctttaattgtagaattagaatgggatttactgtactgttttaaatgagattggcttcagaatccattacagttaccttacatagcacttgatacgtgttaaatgaacatatgaatgtaatttatatattcctagaatttaagttactttgtgagatttgggcctgtccctcaatgccagtttaggatttctttttttctataccttgaaatgattataaaatagattttcatgggaattttaaaaactctatccaaaacatttttggagcattttaaagccccatacacagaagtatacgaaagcacacaaaacactccaagtttcagcagttttagcgccaccattaacccactttgcttgtctcatgaaaaatctttgttaaagtttgtacacaggtaacaaaaagttactttaaaagatatataaagggctgtaagctaattgtggtgtctagtaagtagcataatgagatgtgaggagttggaactttgcgtgttttgcgtattttcatctgcattcagcttcttactctgggtttgtactcgagtgttatttctttacaaatgcccttgtaattaccactctgaagtctgctgactgtgtctcttgaacatacttaggatattctgcacattatggaaaaaggtaaattttagaagtttctgctctactaactgtagatatttatgactctgcgagttatctatttttataaccacctgtggtccattgttcattttaattcacatttcttatgaagtatggtaacagggagggagacacctagattagcagctcaatttgtactacttcagccaatctgtgaatgtaaaaactacactgttgccttgctaggatccaccctcctataatatggaacaaatatctgaatgaaatccaccctaggagacggagtcaaactaaacttgtggtttttcatttaacttttgactacagcatggccccatggcatccacaccaagagggtgttgtgatgaggtgccggtgtgcaaagggaactttagtttttccactggttcttatctgctagccttttacatacatgtgtactatatttgtttatagactgtaggtggatatataatttaaaagcttgatttaataaacatttaaccccct

SEQ ID NO: 1105 - DNA, 2308 bp, Homo sapiens
atatggtactttgcacctcttcataactctgaactctgcagtgagaggtcttggtcccacaaggggacacagttttgctgagagatatataaaaaatctcactgaaaaacataagctgcagcagctacctggatactttcggttccttgtgtctgtctagggagcagcagccaataaaaggagtcaagatcagttgaccctaatcaagaggagattggaatcctggttacacaatctgggcagaagtaataaatgtggtgcccaagtgataaacctaccaaattgagactaatgtgtaggtgtggcaacccatcctcaaaagggcatgatggcctggaactcaggcctctcaaggaatgtgggtctgaattataccagataaaccaccaggagcagcagaggtggtagcagaggctgagggaaatctagaattgatagtggaggatgaggggatgtgacaagtattgatggcattcccaagccccactgcagcagcaagcactgtaatttgtcccactaatctcccatcttctaaatttctgagaggtcaagaaaagaggtctcttgattcctttaggaactgctccctaagcatacagggagacatagatctatgtggagcaaagggtggattgtaataagcaaagagatacactgcctgattcactttaagaaaggactgacctcccagttgcacggaatgaggtcagcagcctccaactgtcagctccttcagagtctgcttcaactgcagaaggacactgtgcttgaggtcatacccttcccatgtctggtgactgaagtccagctgaatgtagctgccaaagttaccttaatgcccatgggaagcaaaaaatcaaagagtttaaacagaattttgagaaatcccaaatcagttttttttcagcatatgacattttggagtagtttgttattcagcaatagataacagaaattggtatcaggagtggggtgttaccataacaaaaggttaaaccttacatggtaaaaaggactttgcctctgtcattaagttaagcactttgaaatgtagagattatcctgaattatctaggtaggctcaatataagcatgagtccttaaaagtggaagacggatacatgagaggatgtcagaatgatgtgaaatgagaagaactcaacctgctattgttggctttacaggtgagtgataggaaccacaagccccaagcagcctctggaagctggaaaaagcaaagaaacagattctttccagagtgtccagaaaggaatgcagttcagctaacatcttgattttagatcagtgagatttttgtgttggacttctacagaactatataagaataaattgtgttgcttaagcacactataatacatgtggcaagaagctgccagctaagccttgaagaatagtgaacaaactcttactggaggatgggaaggcagtaaataaattattgaattattgaaataaatggaggattgagttatgcattgacagaatgcttagcaataattttgcttgtcttaatgtggaacagaaaatgaaacttaatagcttgtagatgtcttaaggagatttccaggtgaatgttgaaagtactgatgaacttattatggctgcatctcataatgtacaggaagacatttactgagtgaactaaagaaggaactgttcaatttgaaagcagaatttagaggaaatttttcaacctagtacttgtcatttttttatagaaaaggaaaaatagatggaagatggagccaaaatcccagagggaggagccaagaagcaaggagagcaatggattaggaaaccactaccagagggatgaactgaaccacaatcaaggaatagcctcttcctttggtgtagggggaccctgaaaacaatttaattttatgcttcctgtttccttgtctccttttttgaatgatagtctctgtgtggtgttcctatcctagaaaaccttaactgggacaagctactctcaagcatcttcacttgagaaacagtaactgaggaagtttattgtatctggacatggtttagatgataagattctgaacttaaacttatgccataatggagtgagactcttagggtacagagtaagtacatttttgcatgttagtgagacaagaactgtggccgggggcagactgtgatagtttttgaagatgtccctcaaacaattccttcccttccttggactcctctcttcagagggtagagtccatttccttttccttttaatctggattggccttctaactcactttgaccaataaaatgtggtaaaagt

SEQ ID NO: 1106 - DNA, 2745 bp, Homo sapiens
caaggaggaaacgaaagatttgaagtgagagtgtaactaaaagatgtgggattaaaataagaaatttgggaagaggttccagttattaagatcctgccggtctcccatggtctgaagggttggagttttatcagttattctcaccttttattcagaataagtagggatccagcagaggaaggggactgtcactagcagggcctgccttgactgccgttgcacttccctgctcagaaagtgtccaggcctgcacattgcacccaggctccttgccatcatgtttctgtctcttacaggccttccccaccttcccttccagcctgacctcccaccccttctgcagtaacctctgcatatttcacctcctccaccttcttgccaatataggatcccagcatccccagcatgcaccctgttacctggccctggtgcatgttggtcacccctcaggaccgctgccctcccatcctgcccagtcgtcgtcttaggccaagctcaaatctcacctcctctgtgttgctttccctgaccatgaagccaaatgtgtgcaactctctctgtctctgaatttctgcaccaccgacttgctggatacttggccctgggcaaagagtgtatgctgccttttccattaacttgctcaccaattcccttcgttttgccattggaaaagggccggccctggtggtcccttcagcccctccctcacccatactcccacgagtgtcttgacccactactggttctttgaactgagtctgaaccatctttgttatccccaaccaccagccttctccctgcccagcaaccagcactggaaggagagccaggctgagcctcagttaatgtttgttgagtgactggatgggtttctgtggcccctgagaggtaaatgaaagccagtcaaagcaatgggaatagttattgattaaaagtcacacttgttaatttctggccaggtctcaaatctgattctgggtagatcatttcccccaccccaccttcgtcactaaggctactggaagccccgccaggggcagagctgtaatgggagtttgggctgagactctcctctgcatatttcttagttgtctaaagtgacttttcaactctttcaccaaggcacagtgattcctatcaacaaggaggaagtgccagtgcgacctctgtgacccttcagagtcccctctccaggtgctgccccaacatgaaagcaggaattactgtggaaaggcacaggcttggactgaggggctgggggagggctgttggacccccagagccaggctctcctctggaagcatcaacataggtaaatggttaacaaaagggaggatttctccctgttcctcctcctctgccacagtattgactgttaaccactgacctttctgtgaggcgtgagattctgaacaaagttgaacgcggtcatggatggttaaattcccacctttcccttctgcccttgcctctgcccctctgccttctcgaaacatggcccgagatgtggaggccaccccctggatgtggtggctgctgagagagggagacacacttgctcacagaaaatgaaagttggcaatgaccctctgaccctttaggaatccagaatcttggctcctagaagccatagagcactgtaccaagaaggccaagccaagcccatccgattgaacttaacggagaagtgaagttccctagtagaagaaggcattttggagcccatcccggaaacagctttccagccttggccttttacttatttcttcctgcccactcctcctcccacgtcacccctgcccccggggacctgccggcccactgcataagacattttttaatttgctggcaaaatcccccagcaccaggcttcgcagccctcccctgttacccacatatgttttatggggtgtagcccgctagcttgcagttccacccctctgcacccttcattgagttttgggagaagcgccatccagtcgtgtcatttgttcaggatgacttttccattccgcgcccgctgtgttcgttttcctggaatgttcccatcatctcccagctccagttggccagggccagcgtgccatctccatgctggtgtgtgtgactgtttggtgctgacccgaggggtgggttggtggagtacgagcctgggccggggccttataaggcctggagtttctcggtttcatgcgttatccatccccgaccactgagagctgagtaggatcctgtggttagtgcccttgagctggtctttgtgacctttctctaagcagcccaaccacacactgccatgcagctttgaacttcagacctggtttctaaatccacggaagctgagaggaggaagaaaatctgaggggttacccaggatgccggctttctctctacatcattccctaccccagccctgtgcagcaggcaggagtgtaggaactcaggcagctggactggggaggagggagagagggaaggatgataccagtttaggctagtgagaaatctgtaaaaccctagatgtgctgtgcctgggaacagaccatgaacacccccgcaaagctctcagtggtcaaaccagatttgggtatcgactcactttgatctcagctcttcctgctctcttaaaggtccagtttgtgatccgctttaaaggaatattttattttcaatacagacacagcccttgacgtagcagtaaaaaccttcccccctgagagacacgtggcagtgaagtgttttggg

SEQ ID NO: 1107 - DNA, 2243 bp, Homo sapiens
aaagcaaacctggagaaagcagccatggtttattcacggcacccgaagccagtctctacatcacacaagcggcacgtgagccacagagccgggaaccctgggcccagcccagggacgtcgggacccatctctgccccagacttgccgtgcagtttggcttgggacctcagttatagctgggcagtggaccacgtacctctgccagctttaacctgtccactgacaggtgacagtgaggggccacacttgcccagatgccactcaacctggcatctaatgagaaaagccacccagagaaaaggattgtactcttcagacttccggggaaagaccacgcagatgaagggcacgaccatctaagggctccgctgcgatctgaaggtggaagaaaagcatcagagagaacgtgtgcaagtcagtgggccttcatcgtgatcccgttcactgatggagaccagcaccggcccgggctgtcactggaggccctcccgctcctgggacccacttggccctgcaatcctctctactgtgtggggcaggaagaagggaccccacttagtctccataaagcctttctagcttgagtaacttcaaagaggattttgcttatgctgccccccacctaaaaggggaggctggttttggaggccactgaccctggaaggggtggtagggagctgagagcctctagatggtccattcgtctccagagacccctgggttcagaatccattaattctgacaggcagccacacatggagaaatggctattttttttctttaagacagagtctcgctctgtcgcccaggctggggtgcagtggcgccatctcgactcattgcaacctccacctcctgggttcaagtgattttcatggtgcctcagccttccgagtagctgggactacgggcgcccgccaccacgcccggctaatttttgtatttttagtacagatgggggtttgccatgatggctgggctggtctcaaactcctgggctcaggtgatccacccgcctcggcctcccaaagtgctgggattacaggcatgagccaccatgcccagctgagaactagctatttttatttttttgaaggtacaaactagctatttttaaaagaccaaaatgtcatggttttcttaaaaaaacaaaacttgctgtcaacttaatagtctttagggcttaaaatctactcagtgctagcctgggcaacatggcaagaccctgtacctacagaaataaaaatacacaaaaattagctgagtttggtggtgtgtgcctatggtcccagttactcaagaggcctagatgggaggatcactgagcccaggaggtcaaggcttcagtgagccatgttcgggcaacagagcgagaccctgtctcaaaaaacacaaaccaaaacgccctgttcagtgctaagaacagagccctgtgcactcttgtggcagtcgtaggccccaggaggccgcttttgagagctgtaggtctgaatgttccctccgctttgacagcccagactcaagacaaaaagtgcagatagttcagcactggaggctctgctgaccccgcactccagagacagcaccgtggaaagcttctgggagttccccacccgatgaacgtgctggaggcagagcacagggctcagccggctgccaacatgcagaggcggctgagtgggacctggatgtctcatgacacagcagggaagtgacaattaaatgggagcacaagggcctgaggaagggctgtgtctgaggccagctcgccctcactcatcacacctcaggcaggggggtaggcctgcgggtgccagggcgctgctcagatcagctacgtcgtctgtcaagagtgagggatggtatttcatagtaagacaatgtaaatcatgagttcttctcatcccaaatggaacgtcccccactgccctgtgtaggaagcgctctgcaccgacgacgggcctggtgtctacagcaggacaacctcacgccagcacaaagccttaagcaaacactattcaagatgaggagtaggcagacaatgaactctagccaggaaaagagctcctactgaaagcagcctacctgggggcaaggggagggagagcataaggaaaaatacctaatgcatgcggggcttaaaacatagatgacgggttgatgggcgcaacaaaccaccgtggcacatgcatccctatgtaacaaacctgcacgttcagcacatatatcccagaacttacagc

SEQ ID NO: 1108 - DNA, 3873 bp, Homo sapiens
atcatgctggagagagaaatggccctcctgccagctctcccaggcctgactcagcagatgccagccccgaccgcgggcttcagatccaggatcccagcgaccacaaccgtccttgggtttcctttcccatccggggaggcatcctagaggtgactggcatctggggcattggaggccttggcataagatgcccttagatgggtggtgccctggaggtcaggcctgagtctcctgcaggcaggggcgcctggggaattactcacgggtgcctttcattcccttcctgctctgtgagacctgtgttgagtgctctgcatccattatctcctaatttttttttacaacagttgcgcaaggtaagttattatccccattttagagatgaagactctaaagggaggctcagggaggtgagtgacttgcccaaggtcacactaccagtaagtggcagagctgagtctacactgcaggcttctctgggggcaaagctcctctctgcctgctagctaacttctcttgtaacccaggagaagaactgtagagccttcttccttcactttcctccagtgaggacattccctgtctttcgggtcttggtacatttttccttcttccagctaaatcagccacattcttgctcccccagatgcattataggatggggccagctttctccctcccttcttcacttcctccctccctccattttctccggtgagaccaagcagcaaagggctgcctcagtcccctgggaaaaccccaagccctggtcctcggctcatgggctccatggcctgctcagcttgcagtcttggctgtgggagagaaaatttagcaaagatgggtccatgcactgctgcagcctgtgggtgctcagtctagctccaggcattggaaacccaaatgcttccaaggatcaggggggaaatggaatgagtgaggcgggccagggagccgctcagctccaatctttgtcactgtgtgaaatgtggacttggtatgacctgactgtccaattttcaagatgaaccagaaatccagacctttatataaaatctcctggatttttaaatgttggcaattaatcagaatgtttttaaaaatggattgtgaacatggattgtttttaaaacatgtctgagaactgtgtccaacctaagggtcctgtgtctgagacctctggtccgtgggaaagggaccgcaggttttgctgggccgcctccaggctgtgtacactgtgacaccaggggctgctttctgcatttgagcctcttgaggctgcagggtgatccctcatcagagggagttctgttgtcccctcggcaccctggtcctactgctgaagaaactccagctcaggtatgggagtagccaggatgggatcacatggctcggtgagggcagaagccagatttgagctcaggcctacccctcggcactctgcatgttacccaggctgccccccaccagggtgtcaccatcacgcccgtggggccgcctcccctgggaggtcagatcattatttccatgccagctgcggggatgaaggcacagagagccacaggctgaggtttcagaggaggaacctggtctctgaaaaccctgccctgaggagggccggagctgagcgcagtagacactggcctgagggagggctctccacctacaagcccaccgaggcctcagtctctgtggtcttatttgtagtttcccaagccctgggttcctggcttggtgtcagggttaggtcatctacctgcaagcaagggtgcctgccactcagtaccctggcctaggcggagggcggttctggccagctccaagcctggctgactgggagtggagacaagtcctgtcaagtcctctctggcctcagttcctctgtgttgatgtgggaagggtgtaagggtgtcaccagtggctccctgaaatgcccttgctgccgggaccgaggactttgtcatcacccgggcttcacaccacctggctatggagacctgagctggacccactccttgagcctacatccttgtctgtagagagaacagcagccacctcctgagttttccttagataactagcatagagaccagtagtgggcctggcgtatgcaaggcacacaggacaggctgtcagtctgtcctgccccccagccctcaccccctgctctgagttcctgtcccttcccttgaagaccagcagctctagcctcaagtccaggtgtgacccagtgcccctgctgcccgggattttccatccccaccccccagagccctggtgtgtgcctccgtacagccctttcctttgattcacgtagacacatggggtctccacttgcttatgaactgccctgccaggcgggggctgggtgatggctcttctctgagtgacgttttggtgaatggctgacatttcccaggaatgaattggacacagagccagcccttgaggtactcccccggtcccacagctaaaagaccaaccaggtaacgagccctccagcatctccttccataggtggttcttgagccaattactgggtgccagctggtaaggccgatggtgctcggctctggccaccccggaacatcctggcatcattgggcttcccatccctgaggggtgaggtggctcaggtgagccccagaggccttggcaggagctcattcgggaggccagcacctaggtcagtggttctcaaagtgtgctccctggccctgcagtaccagcatctgctggaaatttgtttaaaatgcaaactcgggccccatcctagacctactgaatccagtactgggaatggagcccagcactgttttaacagcctccacgtggttctgttgcctgcttaaatttgagaggcccagatctaagccatgttaaatgctagattggctcctgaggcagcgtagtgttgtgaggagtgactaggctgggcaggggcacagcacagtggcaagcatggtgatgggggccaggggagagacgatgctggcctggccaaggcagtggcaggaggaccaaaggaagtggacaaatgccaccctccagaggatgcggcggacggaaggaatggtaggctctttgctgagataaaggacccagtagcagatctttggtgctttggcctgtaaggctgaagtgtgcacagggcagtgtgggaggtgcccacagcaatgcagccaggccctggctctgtgtgcccttgggtgtcatttaagctccttgagccaagtgttctcatctgccaactaacaagaatgccagcctgcttcggagagtgagtgtggagcccaccctcaggcagggagcaccctgtagcctgcttcggagagtgagtgtggagcccaccctcaggcagggagcaccctgtagcctgcttcagagagtgagtgtggagcccaccctcaggcagggagcaccctgtagcctgcttcggagagtgagtgtggagcccaccctcaggcagggagcaccctgtagcctgcttcggagagtgagtgtggagcccaccctcaggcagggagcaccctgtagcctgcttcgaagagtgagtgtggagcccaccctcaggcagggagcaccctggggacacacacatgtctgcatcctcagctcagaaaccaccatcatcagagctaatgtctgttggtacctccacaccctttgcatggattagcttcatcttcaccgatgaggaaacagaggcaacttggaggttaagaaactcaccaagggtctcgctttcatccccctgccgtgctcccagtgagtgtgtggcccgagaaaacatgcagagcgatatggttcaaaagcactacagataaatcaagatgcaaccctaaaacatgttcaaataaccttcaagaaagt

SEQ ID NO: 1109 - DNA, 3591 bp, Homo sapiens
atactgagtgcctgccatctgctaggaattagtgttttacgtggcatcaactcatttaatcataatcagatccctgtgaggtgggtgctattgttattcccattttatagatgaggcaagtgaggcacagaaaggttaagtaacttgttagtaaaccgaagtcctggagtttgagcccaggcaagttttactctagagtccatgcttttaaccactgtcctcttctgcttcttaaacagagtgcctactttccccaggctctgaacaaaaccaagtccccttccttgtggggcttgcattctgtgaacggtggctgttgggatggtagctttgggtggttcatacgtatggtgggatagagaattcaggcagggttttacatgtgagccctaaggcctaggacttaatcctggaggccgtgcgagccgagccatgagaacggccttagcagggggaggggtcagctggattaggaacagccccctgcccggcatctactctgctagcctttcctctgagtccctacacagatttacacctcccttggagctaacagtgccaggcctcccccacgcatttctacccctgaccgcctagcctaggatagaacctcagctgccctttacatgtcactacctgccacctttatacacacagcttccaaccttgggcccatttggagatgtgaaagtgaaggcttagaaagggctggggtagggagggcactgcacgccttctgcctgatttttctgaccctattcccatgaccctcgcctctcaccccagacctgaaggccttcattctcgtcagtggtccggcagccaggactcccagatgggcttcccccgggcggaccctgcctccgatcgcgcctccctcttcgtagctcgcacccgccgcagcaacagttctgaggccctgctggtggaccgggccgctggtgggggagctggctccccgcctgcccctctggctccctctgcctctggccccccagtctgcaagagcagtgaggtgctgtatgagcgcccccaaccaacccctgccttctcctcccgcacagcaggccccccagaccctccccgggccgcccggcctagctcagctgcccctgcctcccgaggtgccccccggctcccacctgtgtgtggagacttcctcttggactattccttggaccggggcctgccccgcagtggcggtggaacaggctggggggagctgccgcctgcagctgaggtcccaggacccctctcccgccgggatgggctcctcaccatgctccccggcccaccacctgtgtatgcagctgacagcaacagccccctcctccgcaccaaggacccccacacccgtgccacccgcactaagccctgtggcctgcccccagaggctgccgaaggccctgaggtgcatccaaaccctctgctgtggatgcccccacccacccgtatcccctcggctggtgaacgcagtggccacaagaacctggctctggaggggctgcgggactggtacatccggaactcgggactggctgcggggccccagcgccggcctgtgctcccttccgtgggcccgccacacccacccttcctccatgcccgctgctatgaggtgggccaggcgctgtacggggcccccagccaggcgccactcccacactcgaggagtttcacggcgccccctgtctctggcaggtatggggggtgcttttactgatgggtaggggtctcgtaaggcagatggcgaagatatccaggccagggagtggctagtcatgatagctaatgaattggaccatgaggaaactagctgctgtgatggcacagggtcactctactgcacatgacctgcattagtccatggggtcctggtggaggggatcttgggcactggtagcagcaattctttatcaagttataggctgaagatgagccttgaagccagggtgccgggaggaagggacatctcatgccccttgctgttttcttccttttttctccatgccccagagcctgaaagtgctgtcctgtgcctgcctccacctctttaacgagcctcttttcctttctttttctgtgtcttgtctgtcttttcttcttcttgtcttccccgccctgtcctccggattcctgctaccccttctaaagatactacgcggacttcctgtatcccccggagctgagcgctcgtttaagtgacctgacgctagagggggagcagtcctccagttctgacacccagaccccggggacactggtctgaccccttctgatatgtcccttgttggcctgggcacgattccaatctggggagcacacagctgacctcgctgggccctggggtgtggttgctctcagtcctgagcagagtgcgccaacctaatcttccaaggcccctggctccccgtaggcccaggaaggtgtctgacaccctgcttcttctctcacactgtgctggggactgggggccctcagctagcttaaaagaggggggatgatgtcatggggaccccaagccccttcctccatttatgtttacagttgtgacttaggtattcactgtcttcctccaacactaggcgttttacaaaagggaaactgtgatctcatctggttgggttcattcctgttcccatgcccaaccaggttccattcaggaaccccctccataaaatggaccatatcgggtctcagggccatttagggcagccaggagactccggtgtgaacagaaatccctgccacgcatcgccagggcagttggggcagtgggctctctgcccacacttggaaggactgcagtctgggtgggatgcctgaaagagcccaaccccctctgtgcccatggcctctgccctgaccacccccagtcaggaggccccacaggaggggcacccggtagatgccagtgaaatcctcaggggaggtctgcctgaaagagcccaaccccctctgtgcccatggcctctgccctgaccacccccagtcaggaggccccacaggaggggcacccggtagatgccagtgaaatcctcaggtgaggtctgcctacgggccacgggccactcaccactcacaccttccttggctttccttccacccttttttttttctcgagacggagtcttgctctgtcaccaggctggagtgcagcggcgcaatctcagctcactgcaacctctgcctcctgggttctcctgcctcaccctcccgagtagctgggattgcaggcacacgccaccatgcccggctaatttttgtattcttagtggagacagggtttcaccatgttggccaggctggtcttgaactcttgacctcgtgatctgcccgccttggcctcccaaagtgctgggattacagccgtgagccactgcacccagccccaatccaccactttttaagcaaacccacacaagttgtgttttctatgatacctgtctgtgattttcggagctgggggttcccctacccccttttcctggcgttaagcttttctttttataccagtggatctggacccaagacattacccacactggaaggggatttgtataataaatgtgtaaactgaaaaaaaaaaag

SEQ ID NO: 1110 - DNA, 3111 bp, Homo sapiens
attttgatagaaaaccatggggccaagagctctggaagcctggccggaaagaccaaggttcatgcagcccaacaaatgattgttgagcacctctcggagccaaagtccttaggcgagtgtggtgacttcctggaaggaggatgcagacttccagagagcccccccaacggacgtgctgagaagggagagggaggcgggggctgtagtcaggaaggagccagagaagaacagggtttgggtgcatccagaaatatgcctgcagtaggagggagaggaaggggtgccaccgtcaacggcttcccatcggaggtggttggtgcagatggaagtttctgtctgctggccctcaagagagtgttttgccagggacacagtctgttcctcctcagaaaacaccccccaaatgctaacaacatccccaccagctgctagaagcccctttcccctccccaccttgaagtagctcatagttctctgggcagagccagaccatccagtgtaccccagaggccagtaggttcctgcccattttcctctctggcttcctgccaagaattatggcagctgaggatgaatggagaagtaaaaacaactaacaccgcacaactaacaactaacaccgcagttcccacctgggttccacttagcaggagacatttcggagggttttttttgtttttgttcctgttttttttttttttttttgctggaatttgttttctcagtactgaaaagagaaaaagtgacaatcttgtatttttaaaagcctcggaaaggtgacaccatctgacagtcattttctcacgttggtcttctaaagtcacctatttcttgtgtgtgcacatcacaccatttcctgtttctttataacccgacaagggtaggagtgcctgtttcccctgctgggcacaccagacaatcgtaatcacaaaacagacactgagccaggggcccaaagggtgtgatcatgagagttaccgggacagcagtaggcatgacagtcaccaggaaggacaagggtgctctgttgttagtggccacacaccaatttgacaaggagtgttgcgaaatttttatttatttatttatttattttgagatggagtttcactcttgttgcccaggctggagtgcggtggtacaatctcggctcactgcaacctccacctcccaggttcaagcgattctcctgcctcagcctcccaagtacctgggactacaggtgcgtgccaccacacccagctaaattttgtgtttttagtagagatggggtttcaccatgttggccaggatggtcttgaacccctgacctcatgatctgcctgcctcggcctcccaaagtgctgggattacaggcatgagccaccacgcccagccaaaatatttttttaaagtcattttccttaagctgcttgggctacatgtgaaatacactggacggtcaacattcctgtctcctcccatttgggctgatgcagcagatccagggaatgttacctgtttctgctgctagaagatccaggaaattgggaaggttacctgacgcacacatggatgaaggccatcatctagaaatggggtcaaccacaattgtgttaattccgtagtgtcagggattcttcgggaaggtcaacagtatgaaggattctgacccctgtgcctcccatttatgtgatcaggtgacagttaataaccgtggaggtcacactcagccatccaacagccttacagtgaccctacacaaaagcccccaaattccaaagactttttcttaacctaaaggaagaaattatttgttaattccagtagagcaactgaatatactgggctatttgtacttttttatagagaactttaataataattctttaaaaatgagtttttagaacaaagcaactgacgatttcctaagattccaatgccctggagcttgtaggaggacttagcctgggtcagctggagcacccccgacctgatctcccactgccagattttcccatgctcctagggtatggagtccacgtgggaatgactgcaagttcaggtggaacttggccgactgatgctctgcgagtttttaatagacactggggacaactgcttaaggtttagaaacttccaaaccacaggaaagacatttttagtgtcccccatccagaggcagccctggaataggattcccaggggtttctgggacccctttccttgctccgtgaggctctgtggccatcttttggcaggaggaggatgcttccttggctctgtgcccagacccgcctggtccccaggtctctcaccttgggtgaagattcagagatgccctgtaaggattttgcccactgggcaactcagaaatacttcgatctcccaagatataagaggcagcagcaaacgtgcctattgacgtctgtttcatagttaccacttacgcgagtagacagaactcggcttttcagaaaataggtgtcaagtccactttataagaacctttttttctaaaataagataaaaggtggctttgcattttctgattaaacgactgtgtctttgtcacctctgcttaactttaggagtatccattcctgtgattgtagacttttgttgatattcttcctggaagaatatcattcttttcttgaagggttggtttactagaatattcaaaatcaatcatgaaggcagttactattttgagtctaaaggttttctaaaaattaacctcacatcccttctgttagggtctttcagaatatcttttataaacagaagcatttgaagtcattgcttttgctacatgatttgtgtgtgtgaaggacataccacgtttaaatcattaattgaaaaacatcatataagccccaactttgtttggaggaagagacggaggttgaggtttttccttctgtataagcacctactgacaaaatgtagaggccattcaaccgtcaaacaccatttggttatatcgcagaggagacggatgtgtaaattactgcattgctttttttttcagtttgtataacctctaatctccgtttgcatgatacgctttgttagaaacattaattgtagtttggaagcaagtgtgtatgaataaagataatgatcatt

SEQ ID NO: 1111 - DNA, 2905 bp, Homo sapiens
ctctgctgccgccgccgccgccctcgtttgttccgttagatcgcgcagccccgaccgctgcacccggatcctagcaagccgggcgaggctgcccgggagccctcgatggccttcatttcacccaagcccgcttcttgctttccccggcgcttcccctcttttcctggttaacagcttatgggcggggagctcggcaaaactcagactaaaaacagaaaaagagaaaagaaaggacaaattcgatacacccgcgtcggtcctccagagtttgtgaaggggtgtaaacatgtcggagtctggggagatgagtgaatttggctacatcatggaattgatagctaaaggcaaggtaagtgatgaggcgcggggcgccgcggcctgggcccccgactccggcactacctggcccgccactgtgggcgtccgtgtccattccagcgcctgggaagggcgggaggctggaatccaggagccgcgctcgcagcccgggcgtcccagcagctgcggaatgcaaagtagccgccttttctttattgcgtggcatctctgaaataagccaagaggggactttcggacgcttttggggccagctgggcagcaataggggctctcggacgccgaagggcgagagcccagcgtcggaagatggagaggagggcggggcgttggccaagggggcgctgccctaccaaccagggctactcaaacgtggtgacttcgagtgggtgacctcgcctgcctgggcgcggagcgtggagggagggcccgcccagcgagtgaacaggctcgaagtgtgcgatcagggtcagcccgcagtcagagcgtgtggccggtaaatagggacagcacgttcgttcgccctgccctggccttttcgggcctctttccaggtccttagctgctgctgctccaggccgggaatatttaaagcagccttcttttggtagggaggggaagatgctggaggagcgggatttcagccccacacctgtcctggagcctttaggaacgcaggctggcgccgtcggtggcgcccgcgacgacgccctcagcgggcggggtggtgccgggcctgagtcagtgcgggaggctgggctccgcgctgcatccgagaaattgccggcagaagctcctaagtggtttgcaggcggaacgtgtcgggaagtacggaggctgcacagtgcactgccctccggaactcgcagacggagagaaggcgggaaagggcgtcagcgtttgccctctgcgcctggagcttcgagaagaggtgatggcacaaaggagcactcgactccctgtgcgcggttaacagaaaggaggatgattctgtagccctgatgtgagcacctgaaaccctgcagtcccacaccccactaactccaacgccgcagatatagcatatggagtagttttagattcatgcccgacagtcctatggccccagggctggggagctggtttaatgcactcttagcctaaaaagtcccaaatgaaccctacgcctctctgaattctcttgttctacaggcactgaatacattcatcagaaacagaatattcattaacatttcgaaagtgaagctgtgtcttgggcctcccctaccatttacaaccccgggccagaagtacaattggagaactctccttccacttttcttccaagcccagactccatcctgcacctcaaggggccttcagcacacactgtccagtatatccgagctctttgtcgccccagcagcagccccttgaccacccttcgggcctagggtgcatattgcggcccacccttccctctgaagaatggaccctgggaagagaagtcctgataagagaaagggctggctctgagcaaagaggcagtcaaccagaggagggccagaaccacggcctctaaagagcgagaggtgcaggcaggacaccgactgcccaggtctaggggaatgcctaacaggggcatctatttgggaacgttgaggggctagggggcagggaggaaaaagaatgcctttggttgaacaaaataaatggactactcttgataggatggagaataggatgatcgataggtgaattttgtcctatggcgctcagatattcttcaaagtaagccagaattgtattagttggctatgctttccttcaatagcagacaaatcctgaaattctgagagaataatttcggggtaggacccagggatttgcatgtgaagaacagcccaggtgaccatgaagccggctgatggatgtcctatgaacacgaaatggggaagtagggcagaaccattaaaactccttataatcaagtcaggtaaacaaaaacaaaaccctctcagaataccaatgggttcatcacagtatgctcactataatgaaaaaacacaaactaactttctggcttcatttactggatttctctgctctctctctctctgtctctctcttcactaggcttcagcaatgggcctgcagcaaacccatgagcattcccggttgacttctaaaggtggagaggcccgctgtccctttgaaatctctgaggttggaaagcagtctctcccaagaagaacttaggacaattcctctctctgttttgtgggggttggagggggagagttggtctggagtaggctcctaaccatttcaacgtaagcttatttcctaccactctcctcaggctcaaatcctgccccgccccgcagccccagcactagcccatttaagacccctgttttgtgtgtgattatacaggatttgaacactgaatattaaccatggaatagcagacctttgagactgacttgctttacatttttacaaacttaatacctggaatatatgcttgttgtaaagtattcaaacttcacagaaaggttcacagagtaaaaagtctaagttcatgccc

SEQ ID NO: 1112 - DNA, 2780 bp, Homo sapiens
gaagtcgcgcggcctggggatcaggggaaggcgggcggcgggagccccggctgggggtgcgcggggggcagggcgcggaggaggtgggggagtcggcaggaggaggggaggagcgccgggttcgccatccccaggcgccggctctgcggctgctgaatcggaagccgcagggaggatccggggaaataaagacgccggagaatgacctccagcgaggccgcctgagccggggcccgcgcacagccccgccagcccccggcatgggcgaccgcagcgggcagcaggagcgctcggtcccgcactctccaggggcccccgtgggcaccagcgccgccgctgtgaacgagctgctgcacaacggcttccatccgccgccagtccagccgccgcacgtctgcagccggggtccagtgggcggcagcgacgcggcgccccagcgcctcccgctcctgccggagctccagccgcagccactgctccctcagcatgactccccggccaagaaatgccggctgcggaggaggatggactcggggagaaagaacaggccgccattcccatggtttggcatggacatcggtggaacgctggttaaattggtgtatttcgagccgaaggatattacagccgaagaggagcaagaggaagtggagaacctgaagagcatccggaagtatttgacttctaatactgcttatgggaaaactgggatccgagacgtccacctggaactgaaaaacctgaccatgtgtggacgcaaagggaacctgcacttcatccgctttcccagctgtgctatgcacaggttcattcagatgggcagcgagaagaacttctctagccttcacaccaccctctgtgccacaggaggcggggctttcaaattcgaagaggacttcagaatgattgctgacctgcagctgcataaactggatgaactggactgtctgattcagggcctgctttacgtcgactctgttggcttcaacggcaagccagaatgttactattttgaaaatcccacaaatcctgaattgtgtcaaaaaaagccgtactgccttgataacccataccctatgttgctggttaacatgggctcaggtgtcagcattctagccgtgtactccaaggacaactataaaagagttacagggaccagtcttggaggtggaacattcctaggcctatgttgcttgctgactggttgtgagacctttgaagaagctctggaaatggcagctaaaggcgacagcaccaatgttgataaactggtgaaggacatttacggaggagactatgaacgatttggccttcaaggatctgctgtagcatcaagctttggcaacatgatgagtaaagaaaagcgagattccatcagcaaggaagacctcgcccgggccacattggtcaccatcaccaacaacattggctccattgctcggatgtgtgcgttgaatgagaacatagacagagttgtgtttgttggaaattttctcagaatcaatatggtctccatgaagctgctggcatatgccatggatttttggtccaaaggacaactgaaagctctgtttttggaacatgagggttattttggagccgttggggcactgttggaactgttcaaaatgactgatgacaagtagagacgagcagtggaggaaacagcctcccaaaaggacagagaactaaaaaattgctgctggagaaggtgaaagtcgctttgggacggaagccaagccattatggcagatgaacctgctggatttgtaaataatttaaaatccttccagatgatcttttactcttaggttttgagctaatgattcaaaacgggggaatataaaaggttttttttctgtatactgtatttttttaaaaaaatggtgcagcgtggccaaacctaccaattgtatgcattaactttgaaaagttgtttgatgtttaagaaggacctgatatgtaagcgctggtcatttttcttctggggtttactgatcagtgtggtgattttaacttcatttagtaattactctaggagattttaccttgacttatatttttcatgacgtttcatgatttgctgttggtttcaaatgaaactacaaatctggcatgttttactgtgaacacttttgttatttgttttgtacccttttttgtcttgtttttctgttttagttgtcttctgaaaaaagagttgttccctctgtttctgtcctcagatgatgtccctccccctacctgtaacctttctttgacataattgtccatatcaatgaaggtgctgaccagctcaatacaaagttaagcacaagatctaaagctcttgaaaatgcccgtgaagagaagactgaatgtgttaatgaatttaatgagtctggcaaaagttgcaaattatatgcaagtttgtcctatcgcttataaatgtagtgtttcattggatttattttatgctaggttatattaagttgaaatagtctgtgattaaatgtcctcatccatgcacagaatatgaatggcagcaaatctttgtgcaagaaatttgaaacttattgggaacagcctcccagtagattaattgttcatatcaggagatttagggtaagtcatgggttgaggtgtcagatagtaatatctatttgttttgtacatgtatatatctaggaactttgtaacaacacatctttaataatgttaaaggttttttcatttttaatattttaaactaaaaactgtacttcaatctcagtttctaaaattaaaaataatttatactg

SEQ ID NO: 1113 - DNA, 4369 bp, Homo sapiens
ctttgtctctggctgcagtcgtagctccaggtcttttcttctctgttctgtgtcttctgctcctagaggcccagcttctgtgtccctgtgacctgtaggtattgggagatccacagctaagatgccaggaccccctgggaagcctagaaaaatggttctgcctgcaaagaagattgtgacatattgctggttgcaacaccacggtgatgttactttttgccttctcactgccctcagaaggcattgtgatatgttggtggtcccagcttcaaagaaatacttgtctgcagcgcagattgctacatattgcttggcccagctcctatgtgatgtgactctcctgtcatacctgagtgctccccactgcggtaattgtgacatatagctgggctctggccctagtttatgtaacttttcttcctgactgctactcacctgggggcattgtgacatatctctgaacctctcacctaagtgatgtgaatctcctgcttgagcccacttctcagggagtattattatatattgtcacacacagcaactaggtgatatgactctctctacagcttggactctgcccaataaaaaactgtgatgtatcactggacccagcaccaaggctatgtgactctcctgccggggctctacattcattgtttttgtgacatacggctgggaataatgtctaggtcatgtgactgtcctgcatggaccctgcccacaggggtattatgacacatttttttagtcatctaggtgatgtgactcacttctgcctgggccctgccagaaagaatgatagtgacttatcactgaacccagcacttaagtgatgtgactctcctcttttgcctggaccttgcatgtttttggtattgtgacatattgctgggcccaacacctaggaaatgagacatttttgcttcagccctgactacaggcagctttctgacattactctgtatccatcacatagggcatacgtctctcatctcttctgcctgcacctgcccacagggaagatggtgacataacacaacaactaggtgatgtgtctccagcctgggcctagcccaccagaagtattgtgacagctggtttctgagcccagtgatatgttacaatgctccctgtggagccccctgtgacacctggtctcagaaactaggtgatgtgactactgcccaagccctgcttttagaaaggaattgtgacttatcactggccaaatgtgacatgagcctcctgcctggtccttgctttcagagaagaccatgacatatctctgttccagcacccaggtgatgtgataatactgcctgggctctcccctcaggaagtatcaagacatatttctggacccagcccataggtggtatgactgtcctccactacttagactctgcccaagaagcgactatgatgtatcaatattcccagcacttagatgatgtaactctcttatgcttgggccctgtttacatagtatatgaaacatatgtctgggtccatcacctagttgatgtgactcttctgcatgggctctgtccatggagatgtgaaatattttttcattcatcccctgccatttctcttttgtgcctcttttgcctgggccttgccaaaaagaggattatagtgtatcactggacccagaacctaggtgaggtgactcctattttgcctggggctcacatatttgggtattgtgatataggggatggatgggaggcacatgagtgggctttgctcacagaaggccttgtgacatctcagcattcattacctaggaaatgtgactattgtcttccatttgcaccctgcttacagggaagattgtgacatattgctggacctagcaaccaggtgatgtgtctctcttgcctgaaccctgcccacagggagcattgtaacatatctctgggctcagcagccaagggatgttactatccttcccggtccctgccctcaagtaatattgtacaaatctttggcccagcacccgggtgatgtgactcccctgcttattacctacctgcacgtggatttgttacacataatgttgttccagctcataggtgtgatgatgactctcatatattgaaccagccaatagttgatacagtctctcatagctaggcttagaaaaatggataagattctgggtcttctgtttttataaaggtcagaaaggagtatcacactctcacatatggtataaagtcttcaggttgtacacagtgtgtcattgcagagcccagtgcacaggtgagatttacttgtgtgtatgcacaccctactatccattaaaattgtaattctcacagacggacagaccctacttgtaatctcacatatggatgcagtccacatttggaattgtcatatgtgaacatccagccagatatgggatagtaaaacatttttaaatgcagctcatagaaaggtgagggctctcctatctagacacagaaaattagggagatgttgactcttatacctggggttaagaacacagatatgattataggttcataccagcacaaatgtcttagaatagattgtgactctcatgcaaaacataaagccctagcatagtacagagagtgtcctaacagggccaagcacacaggtgagattacgacacttgtatgcacacactttcaacagtaaagattgtcctgcacccacataaacaacccgctgttgaggttctgaacctcacacacaaagccagctgaaatttggaaaattgaatcatgtggatctggcccacagctgggttggtgactctcagataaagattcagcactcttgtgagcctctgactccactaggggaaaatagttcacaggagggattgaggctttcagacacagatctagccacctttaagactatgactcacgaaattagacccaaaatagagaaggtattgactctcatacctagaaccaggacgtgtgtgggatgtttaatataatccctagaccttgcaggtgtgattgtgacatacaccttttcccagcacctaagtgatttgacccttctgcctgggccctacagatgggattgtggcaaatgactaaacctagcacctggatgatgtgagcctataattttgtctaagcacttttcacagagagaattgtgaaatattgctggccctaacacccaggtgaagtgactttcctctattgcttgatctctctgcccaaggacagattgtgatatatgactgggcccagcacctaggtaatgtgacttccttctcctgcctgggccctgcatacattgagtattgtgacatatggctgggtctaacactttcatgatgcaaatctgcatgggcccggcctacagaggtattagaacatatctgtttattcatcacccaggtgacggagaagaggtggtgattgatttcactctcctcttctgccggggccctgccaaaatcagggattgtgacatatctctgattttgcatctagcatctaggtgatgaaacctggtagcatctagcatgtaggtggacctagcatctaggtgatgaaactcttctgttttccctgggccccacatattttggagattattacacatatctgggacccatacctatgggatggggtgcttctgcctgggccctgcccacaagggaccttgtaaaatatctttttatttatcacctaggaaatgtgactctctcttacctgtattctgcccatagaaaatgttgtgacatattgctgggccatgacaccaggtgatttgtctttcctgctaaggccatgcccagaaggagcattttgacatcactggacttagcatacaggcaatattaatacaggagttaaatcaaaattattttagggagttagtaagagtaagggttctcaatggaatttttctttaataaaacagggccccagagctatttgttttcctaaaagaaagcagcctaaaacgtgaagctgtaagcatagatcagcaagctggaagcttgcatatgcaaatgccaggagctatactaaaagccaggtacaccacacatgacaattttccctcctttttctgtcatcacgtgtgcaggtgtcatggcatcggccaggtagagattacatttacataataaaagattagggtagaagggacattttctttgtgggctatgtaaatggcacacctggtcaaaccaatctcctgggccctgtgtaaatcaatcactgcctcctcaatccaatcctctataaaattgaatctattctgccccaaactcagaaacccccttgggtgacccactttttctgaaagaggaagctctgtctctccctttcttctattaaactttctgcttcttaaactc

SEQ ID NO: 1114 - DNA, 2450 bp, Homo sapiens
tttgagacagagcctggcttctgtcccccaggctggagtgcagtggtacgatcatggctcactgcagcctcaacctcctgggatcaaacaagcctcccaccttggcctcccaagtagctgggaccataggtacacaccaccacgtccggccaatttttgtattttttaaggagacaggatgtcactgtgttgcccaggctggtctccaactcctgggctcaagcaatctttctgccttggtctcccaaactgctgggagtatagttgtgaaccagcgcgcccagcctccctcactctcagtctctgtgtttctgtgttcatctctctctctcctctttctgtctcttcccatctctctctcttttctctcagtctctgcctctgtttgtgtctgttttctgtctctcttttcagtatgtctgtgtcttcccctccctgtatctcccctagtctgtgcttccctttgtctcagcctggcacttctgtgcctctccttatttcttcagcgtgcctttccgcatgtttacccccttgtacctccatattctgtcctcccctatcctgggtcttcctacctgtcagcctttctggaacctggtgactgacaggggttgtggggcaggacccctgctcagagctgctgactccactgacagcgggagtgtggtggggcacagtaagctgcatcctcccccagccctaccccaccctctgtgacaggctttaatggatcctgtttattatggcttctggtttctccccagctcctgactcttcctccgttttgctcgggtgggctgtcctctggaatgtcagctcttctagagcagggattttgtcttgttcgcttctgtatcccagcacttaaagtagtgcccagcacagcagtaggcacttagtaaatgtttgttgaatgaatgcccaatttttcttcctcgctacttctctttgtttttttttttttttttttatagagacagggtcttgttaggttggccaggttggtcttcaactcttggtctcaagcagtcctcctgcctcagcctcctaaagtgctgggatcacaggcataagccaccatgcccagcctctttcttccctcccctcccctcttttccctttcttcttctcttcccttcccttctgtctgtcttgttctgtcgcccaggctggagtgcagtggcaccatcacagctcactgcagccatgactgcctgggctcaagtgatcctcccacctgagcctcccaagtagttgggactagaggtgcgtgccaccatgcctagctaattttaaaaatatttatagagaccaggtctcactatgttgcccaggctggtctcgaactcttgggctcaagtgatcctcccgccttggtgtttctatctctttgtaattagactggatttctctgtttctctctttcttttcctccctttttctttttctctcaggtctctctatctctcttcatttctgttctctttatttatctttgctttagggtctctttgtctttcctctctctggacatcactgtctttcccttttctcagtggctctctttctcctcccggtctctgttttccaggatctctttgccatccctgcgtatctgtctcttccttttcctctccatctcttctcagtgtcttcacgtgtttttctccatcatctctctctgcctgtctttctcaggacctctgagtctctctgtctctccctctcttctccctctctcccccgacctctgtgtccctggctgggtcctggggcagactctcgtcagcctgtgatgggaacagtgtggggattaaagagctgacatcttaatccccatgtgggcactgcctataagcctcactccagtcagccccatgctcagcagagcatgtcccagtttctgcatcactttggggagaccccgttcagggtagagcctcccaggccacctccactgatggctgaggggccagttccactctgcctgaatctggctcgatgtgctttgggacgcctgcccagcgagaacagccactgtcagcaggatgttagggtattaggtcgggtcccaggttgggagggtacatgcctggggttgccatcctcatcccaaaggggagaatttcagagaatttcagtgagagggtgggagggccgagtgcagtggttcatgcctgtgatcccagcactttgggaggctgaggtgggcagatcacttgaggccagtagttcaagacaagcctggccaacatggtgaaaccccatctctactaaaaatacaaaaattagctgggcatggtggtgcatacctgtaatcccagctactctagggaggctgaggcacgagaatcacttgagcgctgaaggtggaggttgcagtgagctgagatcatgccactgcactccagcctgggcaacagagtgagactctgtccccccaaccctcc

SEQ ID NO: 1115 - DNA, 2661 bp, Homo sapiens
agcacgggtgcaccctcaggccagaccgagctcagccaggagcgccaaaacctcttcaccggctactttcgctcgctgctcgattcggatgactcctccgatctcttggactttgccctctcagcctctcgcccagagtcccggaaggcatcgggcacctatgcagggccacccaccagtgccctgcctgcccagcggggcctggccaccttccctagccggggagccaaggccagcccagtggcagtgggtagcagcggggctggggcggacccctcctttcagcctgtcctgtccgcgcgccagaccttcccaccaggacgagcagcaagctatgggctaactccagccacttcagactgccgggcagccgagaccttccccaagctggtgcccccgccctcagccatggcccgctcacctaccacccacccgcctgccaacacctacctgccccagtacggcggctatggggccggacaaagcgtattcgccccaactaagccctttacaggccaggactgcgctaacagcaaggactgcagcttcgcctatggcagtggcaacagcctccctgcctcacccagcagcgcccacagcgccggctatgccccaccgcctaccgggggcccctgcctgccaccaagcaaggcctccttcttcagcagctctgagggggcccccttctctggttcagcccccacgcccctgcgctgtgacagccgggccagcacagtctcgcccggtggctacatggtacccaagggcaccacagcctctgccacctctgcagcctctgccgcctcctcctcctcctcctccttccagccctcgcccgagaactgtcggcagtttgcgggggcttctcagtggcctttccggcagggctatggaggcctggactgggcctcagaggcctttagtcagctctacaatcccagttttgactgccacgtcagcgagcccaacgtgatcctggacatctccaactacacaccgcagaaggtgaagcagcagacggctgtgtcggagaccttctctgagtcatcctccgacagcacccagttcaatcagccggttggtggcggggggtttcggcgtgccaacagcgaggcctcaagtagtgagggccagtcgagcctgtccagcctggagaaactgatgatggactggaacgaggcatcatctgcccccggctacaactggaaccagagtgtcctctttcagagtagctccaagccgggccgtggacggcggaagaaggtggacctgttcgaggcctcacatctgggcttcccgacatccgcctctgccgctgcctcaggctacccatccaaacggagcactgggccccggcagccgcgaggtggacggggcggtggggcctgctcagccaagaaggagcggggtggcgcagcggccaaagccaagttcatccccaagccacagccagtcaacccactgttccaggacagtcctgacctcggcctggactactatagcggggacagcagcatgtcaccactgccctcacagtcgagggccttcggcgtgggagagcgagacccctgtgacttcataggaccctactccatgaacccgtccacgccttccgatggcacctttggccaaggcttccactgcgactcgcccagcctgggtgctcccgagcttgatggcaagcatttcccaccgctggcccacccacccacggtgtttgacgccggcctgcagaaggcatactcgcccacctgctcgcctacactgggcttcaaggaagagctgcggccaccgcccacaaagctggctgcctgcgagcccctcaagcatggactccagggggccagcctgggccacgcagctgcagcccaggcccacctgagctgccgggacctgccgctgggccagccccactacgattcccccagctgcaagggcacagcctattggtaccctccaggctcagctgcccgcagcccgccctatgaaggcaaggtgggtacagggctgctggctgacttcctgggcaggacggaggccgcgtgcctcagtgcccctcacctggctagcccaccagccacgcccaaggccgacaaggagccactggaaatggcccggccccctggcccaccccgtggccctgctgcagccgctgctggctatggctgcccactccttagtgacttgaccctgtcccccgtgccgagggactcgctgctgcccctgcaggacaccgcctacaggtacccaggctttatgccccaggcgcatcctggcctgggtgggggccccaagagcggcttcctggggcccatggcggaacctcaccccgaggacacattcaccgtcacatccctgtagtgccaactgaagtgccgactggaccgcgaggttttgttcctggctttcagaaaaccaacgccaagatccctcccagcgtccacatcgtcctctggcaggagctcctgcccctctgcctcccaccctgccccctacaccccctgcagacccatctccctccaccccctcccacccatctcctccacgcagaagccgaaggtgagccctttctgcacaaaaccagcaattgtaaatactttttaaaaatgtacaaaacttaaaaacaaaacacagttttagaaaaagacaaaaaaaaaaaag

SEQ ID NO: 1116 - DNA, 2709 bp, Homo sapiens
aaaagcctgtttttctccttctgaagaggaatggggagaatgggaaaggggtgccctgcttctgggccccgctcctggttgctctcggatgagctggtccaaggctctcgggctggtgtctctgcgtccttcccagttgggttccgagagggagggggcggtggggattttcgtaggggagacgtaggactgcaggatggaggagtgagggtcagggtcattattttcgccttttctctccactccctcctttcccggttcctgcctggaggagacgcctcattgatggagctagagaagaggaaggaaaaccgcttcgtggagcgccagagcatcgtgccactgcgcctcatctaccgctcgggcggcgaagacgaaagtcggcacgacgcgctcgacacgcgggtgcggggcgacctcggtggccggcagttgactcatgttgaccaagcaagcttccaggttgatgcctttggaacgtcattcattctcgatgtcgtgctaaatcatgatttgctgtcctctgaatacatagagagacacattgaacatggaggcaagactgtggaagttaaaggaggagagcactgttactaccagggccatatccgaggaaaccctgactcatttgttgcattgtcaacatgccacggacttcatgggatgttctatgacgggaaccacacatatctcattgagccagaagaaaatgacactactcaagaggatttccattttcattcagtttacaaatccagactgtttgaattttccttggatgatcttccatctgaatttcagcaagtaaacattactccatcaaaatttattttgaagccaagaccaaaaaggagtaaacggcagcttcgtcgatatcctcgtaatgtagaagaagaaaccaaatacattgaactgatgattgtgaatgatcaccttatgtttaaaaaacatcggctttccgttgtacataccaatacctatgcgaaatctgtggtgaacatggcagatttaatatataaagaccaacttaagaccaggatagtattggttgctatggaaacctgggcgactgacaacaagtttgccatatctgaaaatccattgatcaccctacgtgagtttatgaaatacaggagggattttatcaaagagaaaagtgatgcagttcaccttttttcgggaagtcaatttgagagtagccggagcggggcagcttatattggtgggatttgctcgttgctgaaaggaggaggcgtgaatgaatttgggaaaactgatttaatggctgttacacttgcccagtcattagcccataatattggtattatctcagacaaaagaaagttagcaagtggtgaatgtaaatgcgaggacacgtggtccgggtgcataatgggagacactggctattatcttcctaaaaagttcacccagtgtaatattgaagagtatcatgacttcctgaatagtggaggtggtgcctgccttttcaacaaaccttctaagcttcttgatcctcctgagtgtggcaatggcttcattgaaactggagaggagtgtgattgtggaaccccggccgaatgtgtccttgaaggagcagagtgttgtaagaaatgcaccttgactcaagactctcaatgcagtgacggtctttgctgtaaaaagtgcaagtttcagcctatgggcactgtgtgccgagaagcagtaaatgattgtgatattcgtgaaacgtgctcaggaaattcaagccagtgtgcccctaatattcataaaatggatggatattcatgtgatggtgttcagggaatttgctttggaggaagatgcaaaaccagagatagacaatgcaaatacatttgggggcaaaaggtgacagcatcagacaaatattgctatgagaaactgaatattgaagggacggagaagggtaactgtgggaaagacaaagacacatggatacagtgcaacaaacgggatgtgctttgtggttaccttttgtgtaccaatattggcaatatcccaaggcttggagaactcgatggtgaaatcacatctactttagttgtgcagcaaggaagaacattaaactgcagtggtgggcatgttaagcttgaagaagatgtagatcttggctatgtggaagatgggacaccttgtggtccccaaatgatgtgcttagaacacaggtgtcttcctgtggcttctttcaactttagtacttgcttgagcagtaaagaaggcactatttgctcaggaaatggagtttgcagtaatgagctgaagtgtgtgtgtaacagacactggataggttctgattgcaacacttacttccctcacaatgatgatgcaaagactggtatcactctgtctggcaatggtgttgctggcaccaatatcataataggcataattgctggcaccattttagtgctggccctcatattaggaataactgcgtggggttataaaaactatcgagaacagagacagttaccccagggagattatgtaaaaaagcctggaggtggtgactctttttatagcgacattcctcccggagtcagcacaaactcagcatctagttctaagaagaggtcaaatgggctctctcattcttggagtgaaaggattccagacacaaaacatatttcagacatctgtgaaaatgggcgacctcgaagtaactcttggcaaggtaacctgggaggc

SEQ ID NO: 1117 - DNA, 2984 bp, Homo sapiens
atgcaaattcaacatcttgtttctgcccttcccccgtgtagctgaggctaggtgttggcattacccagtgcttgttcttcagagagcaaaagcactgctcgtcatgtctgaaatttagtgagtgagctcacccactaggctggtgtttcctgcccgtggctgcacattggaagcaccggggcactttgagaactacagatgcctgggtcccagagcatctaaggtgctctagggtgtgtccaggacacagccctggttgaggaccactgctatattgtatggcctcttttaaaaaagttaattttacttggaaatgatttcaaagctacagaaaagttgcaagaataaaaactgtacaaatgaggctcaaatatcctttgcccagatacacctattaacatttcgtcccattctatctgtcatgtgtgttctcaaatgtgtgtgcgttctctctcccttgcgccaaccccctgtctctccctctccctccctcctgctgcctccacacctgtcatggccttttacccctaatacctcagtgggtacttaccaagaagaagatactctctgacgactgcagtacagttgtcaaattccgtccatctaacactgatagaatacctcaccactcatattcccattggccgcatcgtgtcctctatagcacctttccctctgcggtgctggatctggtctggatcaggtaatcagttgagttgtcatgtctccttggtcttctttaatctggatcatttccatagctttgtctgtgatgataggaacagtttgtaaggatacagttcgttttaggtggtgctgcttatctgcgtttgtctgcgatttcctcgtgattagatttggttttgcattccaggtggctgaaccactacctgcgtcacgcggcctctcagggcatcgcatctcgaggcacacaatgcccatctgccccacagtggggatgttcgttttgatcatctagtccaaggaggaggaaatgtgaacaggaaggttttaatataagtaattgttaactgtgtagaaggtagttaactactaaaagggataaaaaagagctctaaagcagcttagcagagaacagccatcacccctagggctaagggaagagaaaacagagaaggaacgtggaaactcagaggaggttccccaaggtggagagacctccgaggggtggctgtggttgcctgggatatgctgcctgtcccatgctggagaatcaacttactggaggtgcccccccgccaagccacaggagcagagagctgtcacggtggggaatgctgctgggacccgtgcaggacgaaaggagacagaagaaaaaggccatcttcctcctctagccttgttagccccttcagagcccactgtgggtcaggctggcaaagggtaaaggagttttcagagccccctcttcagtgtgacaaggaagggcaaggtcagggaaattcggagttaagaggcaataaatgagtacctggcacacctagtcgaggtgtgtccactttctccatagcatggttactgtttttttcttttcaactaataagaaatctctggagacacactgtctccatgtacataccctgttcctcatgagactcttccccattccccgaccaggttcagcaaatgttgctgattctggcctgattcaatctttatgatgactgccaagcgatgtttctgcagcccagcactccttcctcatttgccagtcatccctcccttctccttcatttattttcatatatccactatggattcccattttttcaaaagtcgacttcatcattgacctttggggatgggggaagagttcctcagatagttcccgacttggccagtgagagccccttcgagtgcctcctatatcccagcatttttggaagcactcccctaatttctgatctaacaagatgttccgggcccctgggtaccagccatggatcagtgtttgtcccaggagccctggtccctggcactaggtgtgcttattgcagctggggtgtctttgcttcttgtcctatagatgattgacagagcttgtcttactgccttttttaagtgtatttttttaaacaaaagtaattggtgctttaaaaaatgtgaacaatacagacatctgtaaagaagtacccacagggaagcaagttcagcagttcagcaatggcatgtgtctttgcagactacatacacagaaacagacttggtattgggttttggtttttgctttttgctaataggaattttatcctacaagatcctctttctgtcttcacaacatagtctgatgctccttccatgtctaactgtaggatttgtcattccattgtgttagctgtgtgggtacattagtaccatgattaaccaaggtgtataaagggcaggcctgcaggctgcctccagtgcctccactactcgccacagtgatcatctctatacacacactgcagtcatttacaatttttaaaatgaaaacaatttttattgagatgcaattcacatggcataaaattaacgattttaaagtaaagaagttgccttgagtacattcaccatgctatagaaccactgcctgtatctagtttcaaagcactttcatcaccctgtgtcatgtatttttacatgaactccaagggtggattcttgttagttggatttactctggatggaaaagtcatgtttggctgggtgcagtggctcatgcctgtaatcatagcactttgggaggtcgagacaggtgggtcacttgagatcaggagttcaaaaccagcctggccaacatggtgaaacccatctctattaaaaatacaaaaaattggcagggcctggtggcatgcacctgtagtcccagctacttgggaggctgaggcaggagaatcgcttgaaccgggaggcagaggttgcagtgagccgagattatgccactgcactccagcctgggtgacagagcaagactctgtctc

SEQ ID NO: 1118 - DNA, 3403 bp, Homo sapiens
tgccctagagggcccagtagccccactgaagctggcccagcacaaggagatctacatcttccagggagaggcagctgagatcagaagggaccagctggagagcccagaccaggaccaggagggtctgtcaagggcttctgctcacccaggaaccccacagagcagccacgggccttccagagatctgacatgccctgtgacctcaggccagtccttgcccgctctcagccttactcttccacactgcttatttcggagacccttctggtctgcatctggagcttggggcccatggtagcccaggaggcagtgccgccagcagacgtcgttttctcagtgaagagcccaccgagtgccggctacctggtgatggtgctgcgtggcatcttggcagatgagccacccagcctggaccccgtgcagagcttctcccaagaggcagtggacacaggcaggatcctctacctgcactcccgccctgaggcatgccttctcgctggatgtggcctcggcctgggtgctccccttgaggacgtcacgtggagctggaggtgctgcctgctgtcatccccactgggggcacaaaacttcagcagtagagggggcacagtcgcagctgcaccctggcccctccactgctccgcgttgccaggtcctgcttccccactctcccgggccttggcctgcaggtgctggagccaccccggcatggggccctgcagaaggaggatgggcctcaagccaggaccctcagcaccttctgctggagagaggtggaagagcatctgatccagtacctgcacgatgggagcaagacactgacggttttgtcctgatggctaatgcctctgagatggaccgccagagccatcctgtggccttcactgtcaccatcctgcctgtcaatggccaacccccgacctcatacaaactcaggcctgcaggggccctggacggaggcatccactttggcctctctgacggtgaacatacttcctccagacacttatcttctgagtgacggcccagaagcaagtgcttcactcgctggagggcagccggacactgactgcccagagtccgtccagccactcagcagccagagcctcagagccagcaggcaccgacccccagctcctgctctaccatgtggtgcggggcctccagctaggccggctcttccacgcccagcatgacagcacaggggaggacctggtgaacttcactcaggcagagaccccggagttcatcatctcggagccgctggccaatatgtactcatgtgggaaccagaacacactgatggaggagttggcagagcaggcacagcagcatgacgagatgctgcacatgcaccacgcgctgaaggaggcgctcagcatcatcggtgacatcaacaggaccactgtcaccatgcccatgcccccgcccgtggacgacacctggttgtcagagcatccctgacgaacacagcccagtcccgggggcgcctacttcaggtctgagagtctgaactccgagatgctctgggtgtgtggatttccttcagctaccctgatgtccccacttccaagtcctgactcctttgagccatcccagggggtgtccggccactggaccacaggagcagaggcgagtctgtgactgtgtgaccagcaaagatggctgtggggatcaagggagacagtggccatagggatgctatgttaaccgcagatgcggctgtaggagcactttgctaactgccaacgatgggtggtcctctgagcacgccaggcacgagtgtgcagggagctggtgcaaatgcctctgtgtgcagaatcactatcagtggcccctgaggagcatcagccatggtaccatcacagctgctagcatgtgactgaaggctgggtccctggccagcactactgaagcactactgccagccagcaggctcacggaccttggcctgttgctcctaggggtcacctgtgctattcagccaaggagaccacagtgcttgctggcccagctgagctccgcctagcgagcccacctgcctttcctgccgcggagtctccctcttctgcttttcccagcaggaagggcccagcctcacctatgcaacctgcagccccccgccaaccagttgaggttcccctcttagacttataagtctatgggcagtggcatctagctacctgccctccctgccttccccagggtcccttcagtggaccctgggctttctgactgcccagagaggggcctctggcgctcactccagccagccatcccttacagcttcaccattttggttcaagcagtgttccttctgtcaggcttggtggctgttgggtggggctccccaagcaagaggtggccctgggccagtgggttggaagatggggtgaccacagaagagggaagccgggggagttgagcattggtctgaactgtgggtggactgcctgggtgccatgagagaggccagtgtgtgtggggtggggaggaccgccacagcccccaggcactacctatgaagctctagcttctccctccatcttcctcccctttcccttccagcccctcttttccaggaaccttgccacgcccacacctacgccttccccttcccggctctcagatgatggtggtgtttatctccctgttcttgggagcccaaaaagaatggcatgcaggggttgctgcccatgcctgggtgctcctggggagtcctgcattacaggaagcagctgctggatctgctgtgcagtggggttgtcgtggggagaaccctccctgtcctctcctggtgcagcctccacgctatcagtgaggctcacctcacaaagatcttcagagagagggagggggggtgggaatctgagcacagtgtgagcctcccctgctcctgcctgcccacctcgcctgagggctctactcaccaccctgctcgtcagcacacccaagctcctgggctattggggctcctagagtgggctcatcagcagggttctgggcaatggtcagaatttgccatgcccctccttgtggtctcccacaagctgcaacacctgccccgcagctcctgcaggttcacctggaggaaggggtgttagctgccatgccggtgccagcacgcacgttcacacccacccccaccctcccccaccgagatgttgcacaccctaccttcatctcctcctggtcctgggccagcctgacgatgtcctcctctcccagtgctgcgtctctgacactgccccctggctgatgtactttcctgcaggaggacatggctcagatgctggggcccctcagacggcctggcagctccccccagcggtgccctagcctctcactccctatggtgtctgtctgtcctgagaggtggatgaattgaagctctagtttctct

SEQ ID NO: 1119 - DNA, 2649 bp, Homo sapiens
agacagattttatgtgagagaaaagttggatgctcacgctccatggagcatcctcgcgtttcccggggaaaagcggatcccggagaagcagcctaatctctcagcccttgtggagaagggaatatcagaagcaggacgaaagccaggtcaagtctctttccttaggctccccaaagggacaagtactcacctcccagagacctggcccagcgggtcctcatggcagcaccaccccctcccggtgcccacgaccattcgtctcccacccggcgttctccaggatttccaaagacgcccgtttagatccacagagctggaagacagctgttcctggatcacaccagaatggagaagcaagctcctcccactagcagaaagcctttgctttctgtgcctggattcggaagattagttaagcactggaagaggaggggggaaacaacaactcgtttttgttgtatgtttttttttttaattgtttttatatttatagaaagttatgctttgtctgattcttgcgctaatttgggttctgaaatttgagtaaaatcaaatttaaacatacaaaacaactttaaaaccacaaggaacaggaagcaaatgattatacataaaagacatatagaagataatgcatatgtgttcagtggaaaatagaaaagcatgaaagtaagatcacaaatatttattatttaaactcttccttgaactattggtctgccctttggaaaagcagactttccttaatgcagtagctcatattaatattttttgtttgcttaggaccagagcaagaaggttggacttgggagctagtttgctgtctggctttgagaccttgaacaagttttgttctccttctgtttccagttttcttttttgtaaattaggagattaactcatgtgatcactctattttcaactttttgttatgggaaatattcaaacatatgcaaaagtagacagaataaaggactctcatgtgaagatcatccaacttttacattttttcaatgcatggctgatcatgtctcatccataagtccactcactttatcactaccaatcctccctcttttttttttttttttttaccaaattcaagctttatatatatcttttcagctgtaaacattcagtatgcatccacaaaatttaaggactgtttaaaaataaccacaatatcattagatgattctttaaaattgcagtgtaatttacacctagggaaatgctcagatgttgtgtccctttaaatcagttttgaaaaagccatgcattagtgtaacccacactattttgaagacacaggacattttcatcattccagacagttaccttgtaccttcatgtgcatattctagaatgtcataaagatctaatcacgtagtataaactttgttttatatttgtctgacttcttttactcagtataatatttgtgaggttcgttcatgtcgttgcatgaatgggtgttttgttttttattgctttttgttgtttctttttactactgttaatagtataagttttccattgtgcctctttacaactagtatctcaatagagtattacaacaattatttaatatattatttcacatgacatatttatagtataaccatgacctccttgagacctagtgctttaagtcaaagaggtaaataaaatgagatattttaggtctcattacaacagaccaatgtgagagaattatttctggacagttgcacttcttataaacgtttaacatgattccaaacttttatttggtaatttgttagttctttggcaaaggactaatgtactatgttatttagtcataacaagcagatcaattacattttatgtaacttttatagacagagaaactgagctccaagagttttggtgatatgctgagatcacctagctattttaagtggcagagctgagacaatttagcagaaactgttacagaaggcacaattgtctcctgaattagcagtttgtgtctgaagcctcacagattgggtgtggtaaagagtgagaaggaaaaaggtagaacccagctgtgttagaaatagccttcaaatttggatgtgacaatggaaatcaagaagaacttatgttattatgaaacagttcattcatatttaaagttttgccttttctatattggtattcctcaatagggggagatgatttcttactacctacaaaaaaagaaaactgtaaactaatttcgttgtcattttgaattacaactatatgtttaactcttgtcactccttaaaatgccttgaacacagtaaacatccaatgaacttttaatcacacataatattgatagtgatattgcatatgttctaggtctgtattcttaaggagggaaagctgctcaagtacaaagaagggaactagaagttaaaataaagtttttttaatttttcttttcattattgatggacagcatggtcttcagtaaatctttagcctctctgaatataacgttaaactaattgaatggcttgtacctcataagaaatatgaagttatgaagtaataacatatttggaagcattactaacatgcatattctgttcataactacaatattcatgttttgttttctctttgctaagtgaaatataaatattttaccagacc

SEQ ID NO: 1120 - DNA, 2903 bp, Homo sapiens
atgaaattgaggtgctatctgaagctaactgcccctaacaggccagactcacaatgcccacccaggacatctgtcccagcagatctggcttcaggggtcacttcaggagaaccatttaaatccccccacttggcatctcactcctggccaaccctctgttccagggcgaaccaggttgcaaatgacaaaagactttcctggccaaattcctcactggcctggatcacgcccataagatgccagagatgtttactgcgttggaaaaatcagtcggggtcaggggtcaggcaccaaggaaagcaggcagatctagaagaaattaaatatgcttgttctctccctatccaagtttgatgggcatgggaaccttgtggggagggagcagggagggcaggggaactgggagatcaaagcaggctagctgaaaggcaggtatggctagacgcaatggctcatgcctgtaatcccagcactttgggaggctgaggtgggcggaccacctcaggtcaggagtttgagaccagcctggccaacatggcaaaacccggtctctaccaaatatacaaaaattaaggctgggcacgagggctcatgtctgacatcccagcactctgggaggccgaggtaggcagatcacttgaagtaaggcgttcgagaacagcctgaccaacatggtgaaaccccatctctactaaaaatacaaaaattagccaggcatggtggcaggtgcctgtaatcccagctactcaggaggctcaggcgggagaaccacttgaacccaggaggcggaggttgcggtgagccaagatcacgccattgcactccagcctgggcgacagagtgagactccaaaaatataaaacacttaaaaatgtaaaaaggcagatctgccagcagcttcgtacttgagaccagacaacccacacatgctgtgtgtgcctcacattaagtggtgactcgggactgtgctggctctgtggggctagaaccctaaggagtaccgccggaagaaagcccagcattactatggctgggggacagctgttagatggtcctaggacatcagccatggagaacacagagggtcaggacaaagctaaaatgcccatagaactgccactggttgccagggtagttccatggttggaaattcaaggcccgtctctttgccctagctatctccatttgacatttccaaagagggatgggtggatggaaccccttaactccagagctgggaatcccaaagccctctcaagtgtctaaccaacctctctgccaggaagttcttccttaggtctatcttaaatttattttgctcatacagaagccagtttcctctaatccagggtttagcaaacttttactgtgaggagccaaataaacattttaggatttgcaagccatctgatctccaccagctactcagctctgccgtagctcgaagcagccacagagagtgtgtaaatgaattcatggctatgctccagaaaaactatttctggacacacatgtgaattctgtatacttttcacatgtcacaaaatattattctctctttctttttttttttttggagatggagttttgctctgctgcccaggctggaatgcagtggctcagtctcagctcactgcaacctcttcatcccaggttcaagcaattctcctgcctcagcctcccaagtagctgtgactacaggcatgtgccaccacacctggttaatttttgtatttttagtagagataaggttttaccatgttggccaggctggtctcaaacttctgacctcaggtgatccgcccgcctcagcctcccaaaatgctgggattacaggtgtgagccaccgcacctggccataaaatattattagtttaattttctaaaaccatttaaaagtgcaaaaactgctctttgcttgccaactgcgcaaaaccaggcagtggggcagatttggcctgagggtcacagtttgccaacccctgctcaagcctgctcactctcaacgctggctgcacgttgcaataatccaggaacattcacaggcctggggcccacccacaaagcttctgttttgtttggtctgggcttcatagtttttctcccaggtaacttcaggtgcagctggggcggagagtctctgctctccccttccatctgtagcagtgtggctggtgttaaatccacctattccacctctcacagctttggcaaccttaggaaagtttcttaaggtctctgtgccttgattttttcatctgtaaaatgggaggatcgcttgagcccaagaggttgaggctgcagtgagccatgatcgcaccactgcactccagcttaggcaatacagcgagacctcgtctcaaaaaaagacaaaaaaaacaaaaagaaatgcagattcttgggccccaccaccccacgcctactgagccagaatctctgggggtggggcccagccatttggcttttcacaagttctccaggtcattcttgggcacgatcaaatttgagaatcacaggtctaggatacgacggggaaaacagaaatgtggggtggtcagggacattcggataattcgggctatttgtattcaggtgtgagctggcaaatccgagacctgttttgcgtagctaattaccagcaatgacaaactcccaggctctgaggcccaagcctcctgggctgcaactggtctttacttttggaggcaatgaatggagcacctcggcctgggaccctcagtgtagggttttctgactcttaggcaacttcctagggtgctgtacttcctttttaaagttggggagcggcagggggagggggaagtgccacgcccttgtagtttcatgatgtcatgttgcatgtgctcttgagctgtaaataaagagacgatggttaaaaagcc

SEQ ID NO: 1121 - DNA, 3949 bp, Homo sapiens
tgtccccagcagaccatcagctttcagtacacatttctggggtgaaggattgaaggtccactcactggtttcccatctgtgccctcttctgggcatgagtgctctagggtggaccatgcacctgtggttagctctgcatccacaagcccagcccggtcactggtgcctgtgggcactccatcaaggtgagtttggtttcatgttgggctcccatgtcagcctgggctcctggttactgaggaactcgcatgaccatgagctccagtgtgggcagtctgttgcttacctgtgtggcctgtacagccctgctctaaatccagtaatttccctgccagcccactctgcccagtggcagcatcccacttaggaagatggagagaacaagtccacaagtccacagaccaggagaaccatcaagccattagggcaggcaccaccagggtagcaatttcttatatgaagcagagacactaagaagaggatgtggcagccaaggaactctctaggcaaggaagagatgataacaaggattaggcaggcaaagactgaaatgcgcctctcaagacatatggggctgggggagttgctgcataaagacaggcatcggggagtaggccactgggggccctctggggagtagcctaaatgggcggaatctggggaatgtctccaggaatactgacagactacactggggagctggcgatatggcacaagtaaccaagatcgaagatgaaagatgccatggggagagcaggaagggaaggtggggccgggcgagtgcgggaggaggaagcttcccccacaagaaggggagatgcctcagggatagcaggtgggacggctctggaggagggacagctgtgtctgtgctgcaggcttgaaccatctcccctccaggagatggggcctacatccaggagagagagagcaatagagagcaagaacgaggggcactgatggtgccaaggccccttcagacacgggtgcctggctgcttttctaaaggctgtgaggggacaggacagaggggctgggtttgggggagggagcacatagatgttggtgcccactctgtggggacgggaaggcaattgctttgccaggctttcatttttcccattttgtacatgaggaaactgggctcgggaggggaagggtgccttgcagatgtatggccaggagggggagggccaggcctcgaaccccaggctcctccctccagctgcaagtccccagcccagagaaggggaggtagctggggactgagctccctccaggacagggtgcatctctccagttccatcattcattcattcattcattcattcaacaaatgcttggcgagtggctgatgtgggccaggcactgtcctaggtgctggggtgcagcagcagctggtccagtgccttctcacagttctagtaggcagtaggagcccacctgcctcctacctttctgactcagggctctgtgcacaccgttgggtttctcaccagggaaacccagacagggcagcggcggccttgacagttcaaggggcggtgtgcggcggggcagggggctgtgggctgtgttctcggaccctgtggggtgaggggctgaaaggaagggcaccgtcaaagcccacgggcctggcccaggaggaggaggtggggctgtggaattgcctggcactggggcctatgtcaggacggtctgccgctggttgttcaccttcaggaccccggtgtgtctggggcaaggctctggggcagggagcccgggtccaaccaggtcagttacttcacatctcggagctcagctccctcctctgtgaaatgggcgcaatggcagttcctacccccagggctgccgcacaagccagggctctgggacctgaatgcctgggttcaaattctggagccaccacccaccagctgggttaccttgaagaagttgcttagcttctctgagcctcccttttctcctttgtataatggggatggtgatagtatccacgccacgctcctgggaagtactcaggcagtgctggcctggggggagtgtggctgtgagtaggaagagctgacctggaaaggggcgtttgcacacgtctgtggatgccagggaggctgctgagagggaagagaggcaggtggacaggtcagaggcccggccctgacagggagtggaggaagggccccaaagctggcctggcagtcactgaggctgaggatttgcagtcctgacagcgccccctcccctcgcagcagggcgttcatggggaggtgtgaagtcctcagtgatcccagccccttgcgtgctcctgactccctgtggcctaggctctcggaggtgccctgttgcctgcagtccacaagagcacagggtttggagtcaggccctgcctggagctaaagatctgggtgggctgctggccaactgggtcaccggagccaattctgtccttcctgagtcagcttgctcagcataagacacagagcgtaagccccaggcgcacccaccacagccagcccagggtgccatccctcccacctggtgccagacagtggtcatcaatccccctccagaagcacctctgttgtatgcccctttgcgccctgcacgatgctgtggggggctgaactggcctctgtgggtctggtgggctgacctctgtgggcattaggctgttcttgtattgctataaagaagtgccgagactgggtaatttataacaaaagtgattgacttggctcacggttctgcaggctgtgcgggaagcaaaggcatctacttctggggaggcctcagggagctttttctcatggcggaagcctgaaggggagcaggcacttcacgtgggagagtgaaggagagggagaatggagggggaggtgccacacacttcaacaaccagagctcccggaactcacatgccatcgagaagtcagcatcaagccaggagggatcagtgcccatgaccagatcacctcccaccaggccccacctccagcactggggattaccattcaacacgagatttgggcggggccaaatatcctacatcaggtggggtctggcagggctgatcgtagctgccccaggcttctccttccagctgcaagccccgagcccagagaaggggaggtggctggggactgagctccctccaggacatggtgtgcctctccagttccatcattcattcattcaacaaatgcttgctgagtggccactgtgggccaggcactgtcctaggtgctggggtgcagcagtggctggttcagtgcccttcagcccacctgccctgcttccctgacttatcacagcactctgcaggaacctcttttctgaccggtgttttctctccctctggctttatcctcccagggacttgagtgagaacgccatccaggccatccccaggaaagcttttcggggagctacggaccttaaaaatttgtgagtacaggcctgggagggagaagggtgtgggggctccagggccactcctggcagcatcctcagggtatccctgagcgagccgtgtggtccaggcagccagggagctgacctgggctctcagagggctggtgccagcatggtcttctggaatagtctggggttggaggaaacaggcagcccttgcctctcccttggttgtgattccatatgagagccaacggagggggcccttggggacctggtgaagcgtgttatcagcgtgggcaatgttctcagtccatttaggtggcacagtgtctgtgcccgcctcatatttgggttgggagagctgggtttgaatcttctcttctagttacacatacataaggccgctgcaagtcagtgaacatcgctgagcctcgatatattgttctggaaaatggggatactaagatctacttcacaggcatgttctgaggtttaaatgaaacatggaaataaatacactttgtcaaatgct

SEQ ID NO: 1122 - DNA, 2381 bp, Homo sapiens
attttcttataggtgatacctgctaagcgctccccgcctacccagagactgggaggaacctggaaaatcctcacgtgaggtgaagcgcaggcgagtagggccagacatggtggctcatgcctgtaatctcagcactttgggagactgagatgagaagatcacttgaggccaggagttcgagaccagactggcaacatagtgagaccctgtctctacaaaatgctggccaaggagcagggcctgcgcccgtggtctcatagagcctggcctgttctggaagagcacccagttgttccttctaggctgcccaagccccactgatgatggctgagagggaagaggacgacgacactgaggaagcctggatgcagctacggcccacagaacccttgccttcccagtgctgcggcagtggctgctcaccctgtgtgtttgacctctatcaccgagatctggcaaggtgggaggcagcccaagccagcaaggacaggagcctgctgcgtgggccagagtcacagagggatagtagatgacttagaaattcagagagcctatacgcccatcagccctgccaacgcagaaggatactttgaagtgttaattaagtgctaccagatggggctgatgtcccggtatgttgagtcctggagagtaggagacacagctttttggcgaggacctttcggagatttcttctataaaccaaaccaggcctgagttccttcccttcctgatagtgtggtcggtgcagatctcagaacgtgtaaacctggtgacaccagatccgtcactttacacctcacctctctttcccttgctccggaccctgagatcctggcctacctgagctcggcagacctgtgggggcccctggtgaggagatgctggcagagtggggggcttgcctgctgctggcagtggcactgctgggcccagggctccaggcccaagccatggaaggtgtcaaatgtgggggtgtgctctcagcaccttctggaaacttctccagccccaacttccctagactgtacccctacaacacagagtgcagctggctgatcgtggtggccgagggatcctcggtgctgctcaccttccatgcctttgacctagagtaccacgacacctgcagcttcgactttctggagatctacaatggggcctcaccagacaagggcaacctgctggggaggttctgcggcaaggtgcccccgccgcccttcacctcctcctggcatgtcatgtctgtcatcttccactcggacaagcatgtggccagccatggcttttctgcgggctaccagaaaggtcaacggggggccttagggacctgttgcagtggctcacacctgtaatcctggtgctttggcaagccaaagtgggaggattacttgatcccaggagttcaaggggggatttggcagtggaggagctggccctggggtggagatgggaagatagcagcagggctcaggtgagacctacagggtctcagcatcttggcacgcaggctgctctgtaacctgcaggacccagctctcatgcatagtttataaggcaaaagcagcctcctcactgttcatgaccatgcttgtagctggggttcccaccttcatggcaatgctccccatgccgcctccgtttctcctagagtcgtcagagggtcgcactgcgctcaggaatgaggctctcatgctctactacccttgtcattcttgtcctgtgtcatggcataaggccacaggagaggacaccactgctgttggggccttctgcagcatcccaccacttcacagcttgggaatccttgcctgagttcccacacgagggtctgggtggagctagtggctgttatatcatgtgtccctaacccctctctccttcaaccaggcttgacacctgcctctcagtctagtgagggagaggaggccttgttcttcttgcctttctctttcactcactcatccttgtctccaggttctgtgcaaaggctcaaatctcctgcttcctcccaatgccagaaccaaagacctcactgatgttaactcaaacagtagacacccacagaggctactggttcccagggtccgccaacagcaatcctgggggactcaggtgggaccccagtcactgctgcatttggaaggatagaattgtagaatgccacaacacaagaaccataggctgatctaatcatagttttggaattttagacccttagatttgtagaatgttaggatatcaaagtcttaataccatcagccacatttcctaacatttttaaaaacaggaatacctttatgtcaaatggaaccttatgttaatcccctattttttttttaaaaaaaaagataaaggcaataaaaaataaaggcaatgtt

SEQ ID NO: 1123 - DNA, 3593 bp, Homo sapiens
gtgctttttagatctgtggattttttgtttacgtcaaatttgtaaaaattctggccagtatttcttctagtaatttttctgttctccccatccctaccttagggactgcagttacacatacatgtaatatctgggattgcgtagttatcccagaaccgctgatactcttttaatggcaacagttttttctctctctctgtggcttctttgggatcatttctcttgctatggcttcaagctcacttattttttctcctgcattgttgagtgtgcttttaacccagcccgtgtatttttcatctcagatattacagctttcatcttcagaagtttgagttccatgtttctagttttttgttgttgatgttgtttgtttgtttgtttttaagaggttctgctttgttgcccaggctggagtgcggtagtgtgattatagctcgccatagccttaaactcctgggctcaagtgatcttctggccttggcctcctgaatagctaggaataaaggtgtatgccaccatgtctggctcattttttttttttttttgaagagatgaggtctcactatgttgcccaggctggtcttgaagtcctggccttaaatgataccctcactttggcctcccagagtgctgggattacaggcgtaagctatcaggccctggtaatctttgattagatgccagacactgtgaattttactatttgagtcctggacacttccatattcctataaatattctcagtctttgttctgggatgtagttaagttacttagaaataatttgatttctttgtgctttcctctggcaggaccagagcatcctttaggctgtgattaattatctactactgaggcaagaccctctgagtactttactcagtgccccatgagtgattaggttttctagtctggcaggtggggacaggcattattcccagccctgtgtgagcattttgtattgtttctcctaatcctttccggtgattctttctccagccttgagtagtttctttacttgcgtgaactgacccattaccctgctgaatgccctgcagatcccctggattctctctcttctctggtactgttcatatgaactctagccaccttggtctccttaactcagggagtccaccagtctctgcctagaactcccctccctgtgccacagcctggaagctttctctaagcagttagctgggatagttctaggggttacctcatttgttacctgtttctcagggtcctgcccttcattgcctgatgtccagtattctgaagtttatcattttatattattttgcatgggttttttcctattaggcaggaaaatcagtcccttttactctatcttggctggaaatggaagagtagctagattcttaaagaatgtttgacttgatttatttgtgtgtgtatttatgtgtgtgtgtgtgtgtgtgtgtgtgtgtattctcatccagagaaagcaattgagctgcgtctggcaaaaattgaccatactgcaattcacccacatttacttgacatgaagattggacaagggaaatatgagccgggcttcttccctaagctgcagtctgatgtactttccactgggccagccagcaacaagtggacgaaaaggaatgcccctgcccagtggaggcggaaagatcggcagaagcagcacacagaacacctgcgtttagataatgaccagagggagaagtacatccaggaagccaggactatgggcagcactatccgccagcccaaactgtccaacctctctccatcagtgattgcccagaccaattggaagtttgtagagggcctgctgaaggaatgccgcaataagaccaagaggatgctggtggaaaagatgggccgagaagctgtggagctagggcatggggaggtgaacatcacaggggtggaagagaacaccctgattgccagcctttgtgatctcctggaaaggatctggagtcatggactacaagtgaaacaggggaaatcagccttatggtcccacctgttacattatcaggacaaccggcagagaaaactcacatcaggaagcctcagtacctcaggaatacttcttgattcagaacgtaggaagtctgatgccagctcactcatgcctcccctgaggatctccctgattcaggatatgaggcacatccagaacatcggggaaatcaagactgatgtgggaaaggccagagcatgggtgcgactgtccatggaaaaaaagttactttccagacacctgaagcagctcctctcagaccatgagctcaccaaaaagttatataagcgctatgccttcctgcgctgtgatgacgagaaggagcagttcctctatcacctcctgtctttcaatgccgtcgattacttttgcttcaccaatgtcttcacaactatcctgatcccgtaccacattctgatcgtaccaagcaagaagctggggggctccatgttcactgccaacccatggatctgtatatcaggagaattgggtgagacacagatcatgcagattcccaggaatgtgctagagatgaccttcgagtgccagaacttggggaagcttactactgtccagattggccatgataactctgggctgtatgccaaatggctggtggagtatgtgatggtcaggaatgagatcacaggacatacctacaagttcccgtgtggccggtggttagggaagggcatggatgatggaagcctggagcggatcctagttggggagctgctcacatcccagcctgaggtggatgagaggccatgccggaccccgccgctgcagcagtcccccagtgtcatccggaggcttgttaccatctcacccaacaacaagcccaagctgaacactgggcagatccaggagtccatcggggaggcagtcaatggcattgtgaagcacttccataagcctgagaaagagcgaggcagtctgacgctgttgctctgtggagagtgtggccttgtctcggccttggaacaggctttccagcatggatttaaatcgccccggctcttcaaaaatgtcttcatttgggatttcctggaaaaagcacaaacctattatgagacattagagaagaatgaagtagtccctgaggaaaactggcatacaagagcccggaacttctgccgatttgtcactgcaatcaacaatactccccggaacatcggcaaggatggcaagtttcagatgctggtgtgcttgggagccagagatcacctcctacaccactggattgccctgctggctgactgccccatcactgcacacatgtatgaggatgtggcactgatcaaagaccatacacttgtcaattccttgattcgtgtgctgcagacattgcaggagttcaacatcacgctggagacgtcccttgtcaagggcatcgacatctgacctcccagcaccagccagcagcaggactgagaaagactcaccctgcagctctgaccttttttcccaaagggacttaagcgattgtgcaggagtaggagacaaaatgtacactcactgtaaaaagaaaactagaggatttttggaataaataatctattttagagttt

SEQ ID NO: 1124 - DNA, 3044 bp, Homo sapiens
tccatgctcttggctgaagctctgagatccttgttgctgtcagggtgctgccccccgccccccggggaggggcttttgtctttgcatcgcctgcttttccagatagtctaaaaaaagacttctgaagacaaggacgttcacgaggaaaaacttgccattttgagctttttaagcagttgctgaaagcttggcagactgcctcaatttttcctaagtaggcgtcaatgaagtcaggtccaggccttggtgtgtctggaatgcttcaagcacattcgaacacttgatcgtaagggagagccggtactttggaaccggaactcacccgaggctgtggccaccgcatgagcaggctagctgggggacaagccccatatctttgggaacaagggtttgcacagccaccctgggatgccctgggactcctgaccgcacaggaccccagcagggaggccgcctggatcggagggtctggtctaacagccggacttggtcttgaaccgtcgccctgtcccgcacaggcgcctgctgagcctggagccctggcagaggcgggtctggggagtggagctgccaggaggcctcccatttctcacagccttggtgttctccgggtcacccagaggaccgtcaaatgctggatttgacaaactatgtagaatgttctttgtgtctttaagatcttcttgtggtcctatttggacattttgtgcattttcagacacctgcgggtcacgtgggtggatgggaagctgggcacctggtgaggggtgaggatgttgagagccagagctgcgttttgtctctgttgatgtggcgaggccctgggttggtcactgggatttttttttttttttgagacggtgtctcgctctgtcgcccaggctggagtgcagtggcatgatctcggctcactgcaacatctgcctcccgggttcaagcgattctcctgcctcagtctcctgagtagctgggattacaggcgtcaccacacctggctaatttttgtatttttagtagagacggggtttcaccatgttggtcaggctggtcttgaactgatctcaggtgatccgcccgtctcggcctcccaaagtgctgggattacaggcgtgagccaccgcgcccggccggtcgttgggattttaacagccctgaggcccctcacgctgccaggtgccagcccaccctgcagccctgctcccctgcccacacgcagaagccaccagaggcttctggactgagcccccactgtcctgcagccgggctggcctgtccacaccacagggcgtgctcagctactgagcagaagcgtcacggacagggcagatcaggccaggacaaagctcttccgccacaggcgggggtctgaaggcatctcagagggcccccaaacaagggacgctgcctggaaaccccgggacaagatgacctcggttcagatcttagcaccttctggcaaccttagagaaagcttctggagggaggggctggttcccaggatgggcagaagccggaaagtctcagactgagtgaccctcgggggcttcagaaggcactgggtgggctctgccagagtgagaaggcagctgatggctgctggagccagccccgggagtgggggtccagctatggtctggagagggggacttgagggttgcagtggccacacagacggggcacaggagccaaaggaagggacacagcaaagcccaagggtaaaacggcgcgccgtggactggtctgagggcagaggctgtaggggagcgaggggcggtgtggctgacaggtggacacagggacacgtgtcctgtggacttggccgctcagtgggggtgtgtcccccagcagtggcgtgtgagggatggtcactctgatgggacactgaccacttggcctccagcaagatctaggcccaagtctaggctgaagccgcccactcagccccgggacatcgtccccggcagctctgctgagcacgccagctccggcactctccgggagtcatggccggaagtcaactgtcctggcttccagggccacaccttggccaggcctggtgatggtcatttccagccgctccagttgggctgatggggccacatgaggccggggatagaaggtggctgcgctcagacacccctcccggccccactggatgcccagggcgctgacctgcaggactcggatgggttttctcctgccacccctgcctggccggccaccatcccagcgccagcgccctcctgagaggtgcaggggccgcgtggggcctcccagagtggcaggttggcagcctgcacgccggtgacggcgtccttctccgtggtgaggcttggtccctcctcgccagaaacaccaattctctgacgtgagctgcacatccactgcccagccatgtttactcttctgcctcctgtagacgcagccgcggcggctctccctggcaggccacccgccgtcctgccttttctccgggtcaggccgcctgtctgccgggctccacgatgagcgcgttctcaagctgagcaggcgccagaatcccatagagaggcttgttgagacacagcttccccacccccagctcggacgcaggggcctggcgtggcctcctcacgggcacggtgtggaaacaccactggcggttaccgtggtctgccgggtgcatgagcccctggggtggccccgtcccttgtttctgaccagccggatcctctccagcggcaggagcagagagggcccggaggtccagacggtgctctctgcggccagcatgccgcggaggtggccgagtgagtgtggcccctcccttgcaggctgacccagctggatgttgacagccacctggcccagtgcttggccgaaagcacagaagacgtgacgtggtgagcgccatccaagagccctgcgcagagtgcagcgcccggacacgctctcccccgccagcagccccgcctctcggctcccccgccagcagccccgcctctcggctcccccgcatgcgcattaaagcagggcgggctcctgtctgtctctgtgttgtgatg

SEQ ID NO: 1125 - DNA, 2607 bp, Homo sapiens
gtgcttgcagggccgcttcggagaaccatcgcggcgcctaggtcccggtgggcggatgggggaagagtcggcgcgggctcggccgcttccctcggtgcgggggcgggagcacccctcgacggctggcggccgcctgttgccttcctgcgcgctggacccggccgctgcgaccccctgtccttccgttgtctacactgcggtctcgtaaatgttcttttggggccagagtctgggcatatatgaatgcaaatccgtgtttgttcacaactaagcccagctgagacgatcacttttctgtaggccatttgtccaggtacagaatgagcacatgttgttggtgtacgccaggtggtgcttccaccattgacttcctaaagcgctatgcttccaacactccgtccggtgaatttcaaacagccgacgaagacctctgctactgcttggagtgtgtggctgagtaccacaaagcaagagatgaattgccattcttgcatgaggttttatgggaattagaaaccttacgtctcataaatcactttgaaaaatccatgaaggcagaaattggagatgatgatgagttatatatagtagacaataatggagagatgccactgtttgacatcactgggcaagactttgaaaataagcttcgagttcctcttcttgaaatactgaaatatccttacttgcttctacatgaacgtgttaacgagttatgtgttgaagcactttgtcggatggaacaagccaattgctcctttcaggtgtttgataaacatccagggatctatttgtttttagtccatcccaatgaaatggttcggcgttgggctatcttgactgcaagaaacttggggaaagtggacagagatgattattatgacttacaagaagttttactttgcctttttaaagtcattgagttggggcttttagagagtccagacatttatacttcttctgtcctagagaagggtaaactgattcttctgccctcacacatgtatgatactaccaactacaaaagctattggttaggtatttgcatgttgctgaccattcttgaggaacaagccatggattccctgttgttgggctcagacaaacaaaatgattttatgcaatcgatacttcacactatggagagggaagcagatgatgatagtgtggatcctttctggccagcgttacactgttttatggtgattctggatcgccttggatctaaggtctggggtcaacttatggatcctattgtggcatttcaaaccattatcaacaacgcaagctacaatagagggatccgacatatacggaacagctctgtaaggaccaagttagaaccggagtcctatttggatgatatggtgacttgcagccagatcgtatacaattataatcctgaaaagaccaaaaaggattctggatggagaacagccatttgcccagattattgtcctaacatgtatgaagaaatggaaacattagccagtgtacttcagtcagatattggtcaagacatgcgtgttcataacagcacatttctacggttcatcccttttgtccagtccctcatggatcttaaggatttgggtgtggcttacatagcacaggttgttaatcatctgtactctgaagtcaaagaagtcctcaaccaaacagatgctgtgtgtgacaaagtcactgaattttttcttctaattttggtatcagtgattgaactgcatagaaataaaaaatgtttgcatttgctgtgggtaagttcccagcaatgggtggaagccgtcgtcaaatgtgccaagcttcctaccactgcgtttacacggagttctgagaaatcatctggaaattgctccaaaggaacagcaatgatatcttcactgtcattgcattccatgccatctaactctgtacaacttgcttatgtgcagctgattagaagtctccttaaagaaggttatcagcttgggcagcagtctctttgcaagcgattctgggataagctcaacttattccttagaggaaatttatctctaggttggcagttgactagtcaggaaacccatgagctacaaagttgcttaaagcaaattattagaaacataaaattcaaagcacctccatgtaacacttttgtggatctgacttctgcatgtaaaatctctcctgcatcttataataaagaagaaagttccctgtcttctttcaatattagttatttcaaatgaatatgtgctacttaaaagcttgttttgtttctttgtatataatttgccttggatttattgtgcacagtttgttgagttgtatgtttttgtgaattatcaggagtaaatttgacaagtacatgtgaataacctcctgtaaatgaattttataacaaaaatgtactgaactattttttaaagttgtgcagattagcaattttttgctatagctttgacttttctatgctgtgaattaatagctgcgatttggcaaacagccctgttgtctttgttaaaccctaaattttaagaggaaatggcagaattaaaagcagaaacaagaagatggacatggattagaggttatgtattatgaagtaaactacaaggtactaacatc

SEQ ID NO: 1126 - DNA, 2509 bp, Homo sapiens
gtacgtcatgacgacaaacagccctgaaatctcaatggctgaacccaagttttattccagctaacatcaaattgaatgcaaggcaagtgtttctctaggacatctctgctctctaaagggactcagcagtcaggctgcaccctgtgtgacttgccatctcaacatgtccctcctctatcgcccaggcgagagagacaggagagggttttcactgtctcagtctcactctctcatcaggctggagtgcagtggcccgatctcggctcactgcatcctctaactccctggttcaagcaattctcctgcctcagcctcccaaggagctgggattccaggcatgcaccaccactcccagctaatttttgtatttttagtagagacggggtttcaccatgttggcctggatggtctctctcctgaccttgtgatccacccacccttgcctcccagagtgctgggattacaggcgtgaggcactgcgcccggcctgcttatattttttcattgtccagaactcatctcgtggccttctctggagcaaaggggtggcaagtgtagtctgcagtatgtccaggaaagaggaatgtggaacaggatttgggaacacatagtactgttgctgccaccagcagttacaagctatgaactgaatgaatctatacatacagccatgaagacatgtctttaaaacatagttttgagttttaaaaaaaggtagggaagaatgagattaaagggaaacttatagaaattaaaacacacgcacatagaacattatgctgcatgggctgggtacggtggctcacgcctgtaatcccagcactttgggaggctggggtgggcggatcacctgaggtcaggagttcaaggacattatgctgcatgttcttcgcggatccatccatatctaaggacatttattaaacacattgaagtggctatagcttatgtgtgtgggaaggaagggtggttagaatgatagaggaaatcaggtaaaaaaaatcaaaggacacgtttgatgatggtgatgatgatgatggcagtcatgaactgaggagtgagattcatgccactctacatttgaggttctttctccagccatgtaactctggcaatggagtagaatagggaggagggggaaggtgagaacgtaggtagaaagagctgttgggcaactgtagcaataaaacagaaaagagatgaatgtttgcacataggcaggggcagcaggaatgcagaagggcaggtgtcagagagcgtccacgtggtaggacccacaggaccaggtggctgaatgcagaggctgaggctgagcagggcggccagtatggctcctgtgttctgatggcgtgtagtggcgtgaccagccagggtctggaagaaagaggaatgagtattggaatcagaggcatcagataacgatgtgggattctttaagatatcagttgagtcaaatgagtgtctagagaaaatggagccaaaggagctcaggagggtccaagaagcagttaagagtaccatgatagaagtgccagggatcaagtcagggaggtaaggtaatatggtttcgttgtgtccccatccaaatctcatcttgaactgtagctcctgcaattcctacatgtcactggagggacccagtgggaggcaattgaatcatgggggtgagtcttttccatgctgttctcataatagtgaataagtttcaccagatctgatggttttataaagaagagttcccaagcacaagttctctcttgtcttccgccatgtaagacgtgccttctgccttctgccttctgccatgattgtgaggcctccccaggcacttaaactgtgagtccattaatcctctttttctttataaattacccagtcttgggtgtgtctttatcagcagtgtgaaaacggactaatacataagggctcagaagggccaactggatgggcaaagaagccattggtgactttagtgagagcgactttagtggaatggtgggggggcaaaagccagattgcagatgattaaggaaacagttggaagacaaggaaggcaacagacatagattagccatttgctgaaggttaactgggaaaagaaggatggaggaaggctataccgggggctgcagagtgcagatgtgcatgtgtaatatgggagggagctgagggtttatatgctgaggggtaaaaggtgggatggagtcaggattgaaaatgaggaagagaggccaggtgcagtagctcacgcctgtaatctcagcactttgggaggccgaggcgggcagatgacaaggtcaggagtttgagaccagcctgaccagcatggtgaaaccccatctctactaaaaatacaaaaattagccaggtgtggcggcacacgcctgtagtcctagctactcaggaggctgaggtgggagaatcacttggacctgggaggcggaggttgcagtgagccaggatcatgccattgcactccagtctgggtgacagagcgagactccgtctc

SEQ ID NO: 1127 - DNA, 3237 bp, Homo sapiens
atatttaaaaatcaatctgcgccccactcccggctccggagccaaactcaaccatctcgggctgcacaaagccagaggcgcgccggggggtttgcaccgggaaccggcaccgagtgacccgcccgccccagcccggccgcggcgcctgctctgcctggatgtggctcgagctccgggccgggcgcgcggggcgggggccctggattatccgtggcgcctcccgccccagcggagccgaaagttactcggagctgctttcctcgcggccagcgtcacctcggggcgcgagcttttctgccgagccgcggccccgcgcgtccctcccgccgcccagacccgcgcgtccttcccacctgctgtggccgaagcggctgccggggcggccgggccgcgctcccggagacagacgcgctgcgctccccccgccggggacccgctctccattcgcgagggcagcggccgagctgggaccgagttatcaacagattgcggggctgcggcgccggccggtgagtcacagccccgcgcacgagcggcccagcccagccagcagcgccgccgcctctgcgcgcacctcccgcggcgacagcggggacccggggccggaggcaggcgcgtaaccatggggaccggggcgggcgatggcggcgggcgggctcctgccgcagggtggggatggctcttccagccgggcggccgccgtcacactgcagagcgtatttaaagagacacctcgctccgcgctcgctccccagcaccagaccctcgcccgaaaacgccgccgggcggactgcacgaccctgtgttattcccaaagacaatctccatccgtggagaagctgcaggaacagaaatatacacaagaaaatggatttggaaggaattttccatcctttatttaacattctcaagtccagatatgccagaaccgaggtgcacctgtcgtgaacccgtctgagtgtgagtcagcagggcagccgcagccggtgtagacagacagggcctgtggctgtgcagaaagcgtccctgtccccctaccccaaccctcctgcatcctgggccacagagctgggcatccagagccaaggcgagtgtggaggccagggtgccaggggcggcgcagcccagcctcccacccgcagcgaggtttgggctctgcacacatcccacaggtccctatcctgcccccaggggcctcctacccgacaaggtgggtccaagtccactccagttttcgtcacaaactccgttttctggggcacgtgctggcctggtggcagcctcagcaagagtctcaggaactgccctgggggactccacacccctccacctgttccccctttggccctgggtgaccccacacccctccacctgttccccctttggccctgggtgaccccacacccctccacctgttccctccttggcctccacccttgcatggctacttctgccccaggttctgtgacactggcgcctgttcagggggtccccaggccctgctgccatggattttgaggggcctgaaggatgtactattgggaggttgtcatgaagactcacagaggcagaattagatgcaggggtgacagcgttccgcttccccggcctctcattatggggcttttgagcgggatgtgctcagggccccactgccccatctagctggtgttcccagagcccctctgtggggacactgtgctggtccctgaactccagctgagggacacagggtccaggcaggcgacggtctagttcccagctggagacgctctaggcaccccaggacctggccgccctgactccctggacaccgttcccttggagcctcggagccccccctggtgtcccctgggtgatggtcctggacaagagggctgggaagaagcgggcagcaaggggaggattctgccccagacgtccccaggccgggggtccccatgggctctgccctgacgtcttactcctgcacccagcggctcccaccacagagactgctccaggtgagggtaccacactgagcacaggtcagcctgtgtctcccgggaggctcctggcacatcacagctggggcccagaggaggccccggccggtggggggagtggccctggcttgtctctttccctgcacacggactggagccctgccctgagtcccacggggactttgcgggggaacttctcgaaggtgctgtgggggcagagggaggtggtggagccagccaggctctgggaggccccagagaagctcccactgcccacctcagtcctagctggttttgggccctgggctgggcccccacaggctccaaagggaaaggttgtccaagggaaagccctggaggccgctggtatccgggtaggacacacagaaggctaccaggtgctgtgggggccctggggtccggcacttgaggcagacaggtccactggcttgcgaatgtcctgctgcccccgcacgtggtggtcaggacccgggagggctgcccctcccccccccattccacacctagtgataacctaggtgaaggagagagagccagggggagctggcactgccacgtgttccagagctgcccttgggcagagtctgtggggctcggccttgtgaggggtgggggcaccgggtgtctcctgctcactcacagctgccccccagggcccctcccccgctgctctgcgagcccctccctggagctgcccttggagggcacctgcttcaggtctcatctccagggtggtgctggggaccgggcactgtctcctgaacagtcccacatggtggcctgggcggcacgcctgtgggatggggaaaccgaggcacagacagtcacgtgctcttccagttgcaggttagaccccacttgcggttgtgtgttccagaagtctccgggcgctgtgtggcaggatgaggagctgcccccctggaggatcacgcaggcctctgggtggcattcagcaggtgagccggcggccgtgtgcccggcagcccggggatgtcagcacttgccctgccaccagaggtcactgccccgggccctgggcccccggccctctgctcactgttcatcagcaaagcgtctgctttctggactgcagggttggctgcggcaccggctgaccacagggcccacctttccagtcccggcaggagggaagcgtctcaaccatgttgcaggcacacgggtgagggtgctgcctgcctccctgactcttacctccccaagagaggaaaac

SEQ ID NO: 1128 - DNA, 3406 bp, Homo sapiens
tcaaatatggagaaagtagctggatgttggaacctagcagagttgtgtcttgaattttataatttattgagcacctactatgtgccagatactttactgaaaccatatgttagagctggcaggggatttaaagatcacttgaatcctgtcacagaggtccagagagggtgggtgacttgccctaggccacacagctggttgatgataacagggcccaagcttggaacccaggtctcctgactcagtgcccactctgttaccacagggatggcacccagatgggaagctgcctgaggctgcagggaggctgggatcacaaactcaggcctgttcccagagaggggctcatcagactgtggggacaacggctccagcctcttaggtgggggctgggcagtcccctctgggtggttctcatgtttgttgtcactgccgctaagggctgcagtgagctgtgtgcagcctggactcactccctctgctggaacctgggccgtgtgtgggttgccacaagtgagcgtgttctctaatatgagggcaggttcattctgttttgggataggaagtttgttctaccccgaggccagatttgaatccaaactcagctcttctagagatgaggtcctggggagggggtgaggatttactaaacgggtaaaaccaaatctgggtgcttatctgactgagaggcattcaacccttccattttcaaatggtaatcataataataatagtagctgacgtttatttagcacttcctatgtgccaggcactaggctaagactctacataattagtcattcaattctcacagcaaccctctatggcatggattcttatttcccattttacatatggggaaactgaggctcatggacgttaagtaactgggaaattgcagatcttggctttgaatctaggcaatctgactccaaactgcaaggaagaagacagatccagcctcagaggccgcttaacagcttgagggcctcagccgtcctgggattaggatcaggcagattcccagggaaggacttggagccatgcctgggttttgaggccgggctggcacctccacttccagggcatcacgggagggtgcatgggctgtgctcgcaggcatgcgggacccagaggcagcccggtgaagggtagtgggggactcgactcactgtgggcctggggaggtgtggtttctctctgctggcttagttacaggtggtggcctgtctctccggggtctggctgtagccatgtccctgcacccaccttgccagccagggacaggccccatcaagacccaggagcagctccagcctcagccagactgtccccgaggtcccaagtgaggccccagccactcaggcatgcctcaggaagctcctgctgcacatgctcctctccctgcgccagcaccctgctgtctggcttccttcctttggccacagggcgggtgtgtgtgaaaccacagggtttacagaagctcgaggtgccactgagtggcaggattatgcactgcactcggggaatcaaaggtggagacagaaagaactatggctgttgtgacacgtcccccacggctccccggttggcagccactgccacccgcagggacttttctgtggcttccagaggtgtggggcaaaggtggagtctggtgactttctccctagggccagcccctgggctgtcgagcctgggaaactccacatccctctccacacctctagaaggactcacaatgaggggggcccagacaggaggcatcaccacctggtttgggctttaccattcacccagggataaggcaaggcaaacaccactccacatcagatctgaatttgagctctggcttcatgacactgacacatgaagactcttggagcctcagattccccagttgttaaatagggagactaatatctcacagagttgtttagacccgaggcgttcaaccttggtggcaatggatgtcaactggaagcatgaaaaatcaccaatgcctgatcctatcctcagagattctgatttaattgttttgggggacagcttgggcatcaggattttaaagagtttccctggtgattttaatgtgaaggtaaggctgagaatccctggttttgacagtacctatagcctataagcctttaatacacctctgaaaatgcctgagacctgaataagaagtttatggttccacagaagcagccagacacaaaaatgcatatgcaccatgtgattccccttatatgaaactgaaagacaggccaaactcgcctttgattgggagtcaggatcaagattaccctgggtcgggggtagcgaatggatggggacctggggggcttctgggagctcaggatgttctgtttcttgatcagagtgccagttacacggggtgctcacttcatgagaattcactgagctgtatacttaagagctgtgtatttgtctgtactggtgatatatttcaataaaattcaccagaaaagcctgttggctacaaaataggaaaagaaaggacacacttgaaattaacgttttgttaaatatctggaaatgtaacacatatgccaaacagacaactgcaactctatgttacgtgtgtgtgtgtgtgtgtgtgtgaaaatgtaatgtctgctctgctgtgggtgggccctctaaaagggaaggtccctgatgcctaagaaaatctgaaaacagcccaggttcacaccaggagttcttaacctcgacccgactgcattcaggtgcatattatgtgccgttatctgaggagagcatctacagctttcagcagattctcaaaggggtatgcaaccccctaaaaaggttaagaacaattggttttgaggagtcagtaagaaactggccatgaatgtgcttggcatgaaagagatgcttggtaatgtcggtttctttccttcctttcagagcccagccttcggaggtttccgcatgagccttctcgggcgacttctaggaggatttattcccctggcagtgccaagggcagcctgcaccaagctcacaactcttcctccaagaggatgttcaaagggcctgtcatttcagcatctgctggacagcagaacttcgcatgcaggatcctggagctgcgtcgggttttgaatcagggacaatggaggaagtgggaaactgtgaagagagtcagagggctgtgccagctgccccctttcccacccccagcaattcacttaactttcctgagtctcacctttgtcattatgagaatgtgtatatttataaataatcatctgtttctccaatgtaagatattgttattgcagaagtgatactaggacctcgttatacgatggcctcatgatgtagatttatagcaggcttcagattctggcatagaataaacagatatttatccaag

SEQ ID NO: 1129 - DNA, 3261 bp, Homo sapiens
aatttgttaaaggctttggtgttgtacagtactgaataactgccaatgccatctgcctgtggccttctcaagtttgtctgcacctgtggttatcctgacttcaaacccggggagacagaggctagaagaggcagacagctcttgtgtattctcctgtccagtgcaaagaacacctggaactctgagccctaaccttaaatgcaagacctcatctgcaggtgttcctcatccttttagcccctcagtgatgtaagcaacaaacgtcacccagctcctggggcacacttcactcccagatgagcttgtcctggatttgcagggagcctggctccctagaccttttggccaggtccccacaggggaattgtgcaggtgcgccctccccagatccccagttggtattggaatcacaccaactgtcacacatggggagggcagctgcacccagccaccctctgacttctctcctcccacagattggccatctgcaagcttcccttctccgtggagagcaggaagacagtcatgggacctcagggagccaggagacaggctttcttggcatttggggatgtcactgtggatttcacccagaaggaatggaggctgctgagccctgctcagagggccctgtacagggaggtgacactggagaactacagccacctggtctcactaggaattctccattctaaaccagaactcatcaggcggctagagcaaggggaagtgccctggggagaagagagaagacgccggccaggcccctgtgcaggaatatatgcagaacatgtcctgcggcccaagaatcttggacttgcacatcagaggcaacagcaactacaattttctgatcaaagcttccagagtgacacagctgaaggtcaagagaaagaaaaaagcactaagcccatggcattttccagcccacccctaagacatgcagtaagctcaaggaggaggaacagtgtagtggaaatagagtctagtcaaggccagagggaaaatcctacagaaatagacaaagtattgaaaggaatagaaaattcaagatggggagcattcaagtgtgcagagcgtgggcaagacttcagccggaagatgatggtaatcatacacaaaaaagcacattccaggcagaaactttttacatgcagggagtgtcaccagggctttagagatgagtcagcattgctcttgcaccagaacacacacacaggagagaagtcctatgtgtgcagtgtgtgtgggcgaggcttcagcctcaaggccaacctcctcagacaccagaggacacactcaggagagaagccttttctgtgcaaggtgtgtggacgaggctataccagtaagtcatacctcactgtgcatgagagaacacacacaggagagaagccttatgaatgccaggagtgtgggcgaaggtttaacgataagtcctcatacaacaagcacttgaaggcgcattcaggggagaagccttttgtgtgcaaggagtgtgggcgaggctatactaataagtcatacttcgttgtgcacaagagaatacactcaggagagaagccttacagatgccaggagtgtggccgaggctttagcaataagtcacaccttatcacacaccagaggacacactcaggggagaagccctttgcgtgcaggcagtgtaagcaaagttttagcgtgaaaggaagtctcctcagacaccagagaacacactcaggggagaagccttttgtgtgcaaggattgtgagcgaagctttagccaaaagtcaactcttgtctaccaccagagaacacactcaggggagaaaccttttgtttgtagagaatgtgggcaaggatttattcagaagtcaacccttgtgaaacatcagatcacacactcagaggagaagccttttgtgtgcaaggactgtggacgaggctttatccaaaagtcaaccttcactttacaccagaggacacactcagaggagaagccttatggatgtcgggagtgtgggcgaaggtttcgggataagtcctcctataacaagcacctgagggcacacttgggtgagaaacgttttttctgcagggattgtgggcgaggctttaccttgaagccaaatctcaccatacatcagaggacacactcaggagagaagcccttcgtgtgtaatgtgtgtgggcaaggcttcagctggaagagaagtctcaccagacaccactggcggatacactcaaaggagaagccttttgtttgccaggagtgtaagcgaggctataccagtaagtcagacctcactgtgcatgaaagaatacacacaggagagaggccttatgaatgccaagagtgtggacgaaagtttagcaataagtcatactacagtaagcacttaaagagacacttacgtgagaagcgtttttgtacagggagtgtgggtgaggcttcatcttgaagttatatctcaccatccatcagaggacacactcaggagagtaactttgctttgttacaagctttagttgaggctgcataacttgttcgtgaagatataacagaggcagacagaatccagagggctacagagaacctgaattcaacccatgtgtccccaagagattcagagaaaagaggtcaatgtttagggaacagagatgccagttgaggggagggcattacctgggctattggggaaatgtggtctctttcctactgagcacatattcttgttgtatttgtgccaggctgtgctttctaaggactgctcttagccagtgactgcagagcagggataccaaggcaggcctgttacactctccccaacctccttggactgcaaacaatctaggacacctccaccaaacctcctcttgcactttccctctggcttccctcccagccttccttggtttggatgttttgtcccctccttaatttatgttgaaactctacataaactgtttactgttgaaacagtgtaagtattaggaggtgggacctttgggaagtgattaagtcaagtcacgaagatagagctttgcgaatgggatcaggtgcccttatgaaaaggctcgatagagggagtttgtcctgtggcccttctattttctgctctgtgaggacacaatgctcctcccttccaaaagatgcagcatgaaggcatcatcttggaaacagacatgagccctcaacagacaactgcacctactgatgttttgatgttgaacttcccagcctccagaactctgggaaaataaagtcctctttatac

SEQ ID NO: 1130 - DNA, 2786 bp, Homo sapiens
agtaaggaggagaggctgtctcagctgcagaggggtcatccctgcttcaagccagtgcctcttcccagctcccatggggaccaccgaagccacgctccggatggaaaacgtggacgtgaaggaggaatggcaggacgaagatcttcccaggccactcccagaagagacgggggtggaactgcttggcagcccggtggaagacacatcctctcctcccaacacgctaaatttcaacggagcgcatcgtaagaggaagacgctggtggccccagagatcaacatttctctggatcagagtgaggggtccctgctgtccgatgacttcttggatacccctgatgcccggggacagcgcggatctatttggggacggcacgacggaggacggcagcgccgccaacgggcgcctgtggcggacagtgatcatcggggagcaagagcaccgtatagacctgcacatgatccggccttacatgaaagtggtcacccacggagggtactacggcgaaggcctcaacgccatcatcgtcttcgcagcctgcttccttccagacagcagcctccccgactaccactacatcatggagaacctcttcctgtacgtcatcagcagcttagagctcctggtggctgaggactacatgatcgtgtacctgaacggtgccacgccccggcggaggatgcctggaatcggctggctgaagaagtgctaccagatgatcggccggaggttgcggaaaaacctgaagtccttgatcatcgtccacccctcgtggttcattcggactgtgctggccatctctcgccctttcatcagcgtcaagttcatcaacaagatccagtacgtgcacagcttggaagacctggagcaactcatccctatggaacacgtccagatcccagactgcgtcctgcaatacgaagaggaaagactgaaggccaggagggagagcgcgaggccccagccggagtttgtgctgcccaggtctgaagagaagccagaggtggcaccagtggaaaacaggtctgctctggtctcagaagatcaggaaacaagcatgtcctgaggcgacgtgagcataacaaaggacatggaagaagattccagatgccagaaaacctctgtcagacgcccactggccccagatctcatcctgcctcatcctgagtcccaatcttccaagggtgccagcccctccgttcatctctgaaacccagcatccttttcagctgcttgaaaacattgtattttttttttttaacgatgcagtatttgtgcgttccagaaaagggcccagctctgagcccctcacccttccacactcacgaactctcagccgaggaaggcaagaagcgcagggggtggcccgcgtggcgtcggtggcctccgctcctgctcgcagcccctgtggtcagagctggatacaagattcaagacccttctcttgcttgtcacccgctccaggttggagccacagacacccaccgccaccccggctgggtctgcgtcctttcctgtgcctttccctccagaatgcggcctcagacctagaagctcaacccccctatgagggccacgtcctggggtagctcctgacctccgaccttatgtccaaatttcacacccatggtttttcatttgacccgcccccttctcgctcataatgacacccagctcctttgagaggatcagagcccattgcacaagaagagccgctgccaaccatccttgtcctccgattgcaaaatgacaccccagtaatctagaacattctcaagcccctttaactcagatgtcaagccaccgggcaaaccccgtcaatacctcccaccaaggaatgagatatgtggacctcactgctcccccaacccagcgtcaggctgggacatgccaacgctgttccgggttggaacagcagaggctcagaaactggctctgaaataggcagacctagcaagaggaagatacagggtatcgggcgtttgagtgtttcagaagtcattcgggaagataaatccagtgcgctggccgcagccacctgcattcaaagcttggaccagcgggttcttgttcgggaggcaaatttccctaggaaaaagaagacagacttttctaatgtggtccaaatgcggatcactggtcagatggactctagaagcactgagctccctgtctctggaagtatttaagaaaaggctgggccaggcacgatggctcacgcctgtaatcccagactttgggaggccgaggcaggcggatcacctgaggtgaggagtttgagaacagcctggccaacatggtgaaacctcatctctactaaaaatacaaaaattagccaggcgtggtggcaggtgcctgtaatcccagctacttgggaggctgaggcatgagaatcacttaaaccagagaggcagaggttacagtgagccaagatcgtgccactgcattccagcctgggcgacagagcaagactctgtctcaaaaaaaataaaaaataatcagggcacagtggctcatgcctgtaatcccagcactctgggaggctgaggtgggtggatcacctgaggtcaggagttcaagaccagcctggtgaacatggcgaaaccccgtctctaataaaaatacaaaaattagccgggcatggtggtgcatgcctgtaatcccagctactcgggaggctgaggcaggagaactgcttgaacccaggaggcagaggttgcagtgatccaagatcatgccactgcactccagcctgggcaacaagagcaaaactccgtctcaaaat

SEQ ID NO: 1131 - DNA, 3404 bp, Homo sapiens
ctgctcctcggccgccgcggcttcctctagcgtttcctcctcggcgcgggctgctgcgtacgggactgcgccatgcggatcccgccctcccggcccgcgcggggcctgtggacgcggtagggccggccgtgatcgggcgccggcgtcaggggcgggcgctaggggcgcctgccgcgccgcgatgtgggagaggtgggtcccggtgaccgtgctccccggctgcgtgggctgcaggaccgtcgcggcgctggcgtcctggaccgtgcgcgatgtgaaggaacgtatcttcgcggagactggcttcccggtgtcggagcagcggctgtggcgcggcggccgcgaggtcgatttggtcagacaacgccaccacttgttgattttctcaaggacattttgagaagatatccagaaggaggacagattcttaaggaattaattcagaatgcagaagatgctggggcgacagaagttaaatttttatatgatgaaactcaatacggaacagagactctttggtcaaaagatatggcgccatatcaggggccagctctctatgtgtacaacaacgcggttttcaccccagaggactggcacggcattcaagaaatagcaagaagcaggaaaaaggatgatcctctgaaggtcggaagatttggaattgggtttaattctgtctatcatataacagatgttccttgtatctttagtggtgaccaaatcgggatgctagatcctcatcaaacactttttggcccacatgaatcaggccaatgttggaatctcaaagatgacagcaaagaaattagtgaactttcagaccagtttgcaccatttgttggcatttttggaagcaccaaggaaacatttataaacggcaattttccaggaacatttttccgtttccctcttcgcctacaaccttcacaacttagtagtaacctctacaataagcagaaggttcttgagttgtttgagtcttttagggcagatgcagacacagtgctgctctttctgaaaagtgtgcaggatgtttccttatatgtccgagaggctgacggaacagagaaactggtgtttagagtgacttcgagtgagagtaaggcactgaaacatgagcggccgaattctataaagattctgggaactgctataagtaactattgtaaaaagactccaagcaataacatcacctgtgtaacatatcacgtaaatattgttttagaagaggagagtactaaggatgcacagaaaacatcttggttggtgtgtaacagtgtgggtgggcgagggatcagtagtaagcttgactctttagctgatgaactgaaatttgtcccaatcattggaatagccatgcctttatcaagcagagatgatgaagcaaaaggagcaacgtctgatttctcaggaaaagcattttgtttccttcctttaccacctggtgaggaaagcagcacaggcctcccagttcacatcagtgggttctttggccttactgataaccgcaggagcataaaatggagagagctggaccagtggagagacccggcagccttatggaatgagtttcttgtcatgaatgttgtccccaaagcttatgctactctgatcttagattcaataaaacgtctggagatggaaaagagctctgatttccccttgtcagttgatgttatctataagctttggccggaggcgagcaaagtcaaggtgcactggcaaccggtgttagagcctctattcagcgagctgttgcagaatgcagtgatttattcaattagctgtgactgggtcaggttggagcaggtgtacttctcagaacttgatgaaaatttagaatacacaaaaactgtgctcaactacctccagagctcagggaagcagattgccaaggtaccagggaatgtggatgctgctgttcagctcacagctgcctctggcacaacacctgtgaggaaggtgacgcccgcgtgggtgcggcaggtgctgcggaagtgtgcacacctgggctgtgctgaagaaaagcttcaccttctagaatttgtgctttctgaccaagcctacagtgagctgcttgggctggagctgctccctttacaaaatggcaattttgtccccttctcctcatctgtatcagaccaagatgtcatttatattacctcagcagaatatccaaggtcccttttcccaagtcttgagggaagatttattttggataacttgaaacctcaccttgtggctgctttaaaggaagctgcccaaacccgaggaagaccatgtactcagctgcagcttctaaatccagaacgatttgcacgtcttatcaaggaagtaatgaatacattctggcctggcagagaattgattgttcaatggtatccatttgatgaaaacagaaatcacccatctgtttcatggcttaagatggtttggaaaaatctttatatacatttttcagaggatttgactttatttgatgagatgccacttatccccagaactatactagaggaaggtcagacatgtgtggaactcattagactcaggattccatcgttagtcattttagacgatgaatctgaagcacagcttccagaatttttagcagacattgtacaaaaacttggagggtttgtccttaaaaaattagatgcatctatacaacatccgcttattaaaaaatatattcattcaccattaccaagtgctgttttgcagataatggagaagatgccattgcagaaattgtgtaatcaaataacttcgctacttccaacacacaaagatgccctgaggaagttcttggctagtttaaccgatagcagtgagaaagagaaaagaattatacaagaattggcaatattcaagcgcattaaccattcttctgatcagggaatttcctcttatacaaaattgaaaggttgtaaagtcttacaccatactgccaaactcccagcagatctgcgactttctatttcagtaatagacagtagtgatgaagctactattcgtctggcaaacatgttgaaaatagaacagttaaagaccactagctgcttaaagcttgttttaaaagatattgaaaatgcattttattcacatgaagaggtaacacagcttatgttatgggtccttgagaatctatcttctcttaaaaatgagaatccaaatgtgcttgagtggttaacaccattaaaattcatccagatatcacaggaacagatggtatcagctggtgaactctttgaccctgatatagaagtactaaaggatctcttttgtaatgaagaaggaacctatttcccaccctcagtttttacctcaccagatattcttcactccttaagacagattggtttaaaaaacgaagccagtctcaaagaaaaggatgttgtgcaagtggc

SEQ ID NO: 1132 - DNA, 2900 bp, Homo sapiens
aaaagctcattgtgtgtgggaaactatgactcattcatcacaaacatgcaggcaatctgagcaggataggcccaggccctgcctcagcactggtagcaccacctatgcagtgtccacactgccagatcagtgccttcacctctgtgtaaaccaccaggtcttaccagtgctggtttaaacattcagcaccaaagccggtggacagcggaacatatgaggaagttctggggtgagattgaacactaagggcattgagcagctggacacagagggagcactaggggtatgggttcagcactagggacagcaggcagctgggcacaaaagggaggcactaaggtgtgtgttcagcaccaagaacagcaggcagcgggacacaaaagggaagtgctagggatgtgggttcagcaccagggacagcggagcacaaaagggaagcgctgtgggtatgagttcagcaccaaggacagtgggcagctgatcctagcgggcgtgctaggcatgcacttcagacatgaatatcagttgcccaggccgggcacggtggttcacgccttaatcccagcactttgggaggccaaggcagatggatctcgaggtcagcagttcgagaccagcctggccaacatagtgaaactctgtctctactgaaaataacaaaaattagccgaagcagtggtgggcacctgtaatccctgctgaggcaggaaaattgcttgaacccgggaggtggaggttgcagtgagccgagctctcgccactgcattccagcctgggtgacaaagcaagactccgtcttggacttgttgcccaagtcatctgggaggcagctggccatctacgtctgaagtgcaggagtgaagtctaaagggagactcagaccccgggaatatctccggagccatcagctgaagccccaggagaggatgagattatctgggaaggcatatagagtgggaagagggtgaaccctccagtaaatggcgttgagtccctcatgtttccctgtccttagtgtgccgtgaagtccttcccagtccttccctcacatgaagcctttctcgttttattttactcccttcgtgtctcccaacttccttctcttcagctttaaccctatccctacatgtggaccgagttcactgcttctgactccggcttctaaatcaattttctatagacatgtctgtgtccttaaactatatatggtggtactgtgtgttaatttgtataaatggcactatgctctaaacctcatgctgtttcttgccttctttcactcaatgttatgtttttaactttaactatacacctagttcactacttctgaatactcctaaatgtgttagtttagatgcatctgtgtccttaaaaactctatgatgttcttgggtatgtgtttaattggcataagtggcaccatgcccagaatttcatcctccttcagagaaggggatgtgtgtcgtcattttgacttccttctactgactgttcaaagctaacatttattatacacttgtctgtgccaggcactgcccctggtgcttcccctgcatcctcacaactgctctgagctgcgtgctctcgtgatctgtggcacagagagcttaggtaatcagtccaggccacacagctactaagcaggggctcctgggctcaaacctgggccattcaactccagagacagcccatgtcacctacgtgctgcttcccaagtggaggaggcttatgaggtgaactggtggttcctggacccagcctaccttcactcaacaaatactgaacccttgccatgtgctagactctgttctaggccctggggatacaggaatgagtaagacaaaaatccctgccctcagggagctcacatcctattgcgggagacaggagctaaagggtggaacacatggtgtgtcagaggtcagactgatgagggtcatgaggccaggtcctgggtgtccactggtgggactgttggtgggggtgtgcagcacacttgtaggtctaatgtcaggggcaggtctcgcagcgatggtaacaggtaaaatgccccctgaaggaccatgaagctttaaacagtggcaagaaggatgacacagtttgatgctaatttgccccaacatccctgcggaaagaggaagagacaggccttcagcccccagacttccgcaggcaacctctgcatgggaagccagcctcaggacctgctagaacacaagtccattgccccattttcttggagcttatttttacacttactctctagctttaacagatggtgctggggttttctgctcacagtggtgagacaggtttcttttgaaatgaagccaggtgaaaacgagtcacagaatgagtggcccgctggagtccctgtgtaagtgaaggtagtgaaatgctccctcacacactctaatgggttagttcaggacaaggctgagctgttctcacaaggagaccccaaaacactgcagcttccatgagggagggttcactcctctcactaacagtcccaaggcaggagactgagggcagtaggggggcctcaattccctgtgacacacacacacatccttctctggatacaacagagagcacacattgtgggtgcccaaggaatagcagcagatctggtgcggtggctcacgcctgtaatctcagcagtttggaagcttaggtgggcagattgcttgagcccaggagtttgagacccgcctgggcaacgtggtgagaccccatctctacaaaaaaagtagccgggtgtggtggcacgcgactgtagtcccagctactcaggaggctgaggtggaaggatcacttgagtccaaggaggtggaggctgcagtgagctgtgattgtcactgcactccagcctgggcaacatagtgagaccctgtctc

SEQ ID NO: 1133 - DNA, 3929 bp, Homo sapiens
ccacacatgcgattggcagcgatcccctccggcagaacatttatgagaatttcatgcgagagttggaaatgagcaggaccaacactgagaacatagaaacatctacagaaaccgccgagtccagcagcgagtcactcagctctctggaacagctggatctgctctttgagaaggaacagggggcggtccggaaggccgggtggctcttcttcaagcccctggtcactgtgcagaaggaaaggaagcttgagctggtggcacgaaggaaatggaaacagtactgggtaacgctgaaaggatgcacgctgctgttttatgagacctatgggaagaattccatggatcagagcagtgcccctcggtgtgctctgtttgcagaagacagcatagtgcagtctgttccagagcatcccaagaaagaaaatgtgttctgcctcagcaactcctttggagatgtctaccttttccaggccaccagccagacagatctagaaaactgggtcactgctgtacactctgcttgtgcatccctttttgcaaagaagcatgggaaagaggacacgctgcggctgctgaagaaccagaccaaaaacctgcttcagaagatagacatggacagcaagatgaagaagatggcagagctgcagctgtccgtggtgagcgacccaaagaacaggaaagccatagagaaccagatccagcaatgggagcagaatcttgagaaatttcacatggatctgttcaggatgcgctgctatctggccagcctacaaggtggggagttaccgaacccaaagagtctccttgcagccgccagccgcccctccaagctggccctcggcaggctgggcatcttgtctgtttcctctttccatgctctggtatgttctagagatgactctgctctccggaaaaggacactgtcactgacccagcgagggagaaacaagaagggaatattttcttcgttaaaagggctggacacactggccagaaaaggcaaggagaagagaccttctataactcaggtcgatgaacttctgcatatatatggttcaacagtagacggtgttccccgagacaatgcatgggaaatccagacttatgtccactttcaggacaatcacggagttactgtagggatcaagccagagcacagagtagaagatattttgactttggcatgcaagatgaggcagttggaacccagccattatggcctacagcttcgaaaattagtagatgacaatgttgagtattgcatccctgcaccatatgaatatatgcaacaacaggtttatgatgaaatagaagtctttccactaaatgtttatgacgtgcagctcacgaagactgggagtgtgtgtgactttgggtttgcagttacagcgcaggtggatgagcgtcagcatctcagccggatatttataagcgacgttcttcccgatggcctggcgtatggggaaggactgagaaagggcaatgagatcatgaccttaaatggggaagctgtgtctgatcttgaccttaagcagatggaggccctgttttctgagaagagcgtcggactcactctgattgcccggcctccggacacaaaagcaaccctgtgtacatcctggtcagacagtgacctgttctccagggaccagaagagtctgctgccccctcctaaccagtcccaactgctggaggaattcctggataactttaaaaagaatacagccaatgatttcagcaacgtccctgatatcacaacaggtctgaaaaggagtcagacagatggcactctggatcaggtttcccacagggagaaaatggagcagacattcaggagtgctgagcagatcactgcactgtgcaagagttttaacgacagtcaggccaacggcatggaaggaccgcgggagaatcaggatcctcctccgaggcctctggcccgccacctgtctgatgcagaccgcctccgcaaagtcatccaggagcttgtggacacagagaagtcctacgtgaaggatttgagctgcctctttgaattatacttggagccacttcagaatgagacctttcttacccaagatgagatggagtcactttttggaagtttgccagagatgcttgagtttcagaaggtgtttctggagaccctggaggatgggatttcagcatcatctgactttaacaccctagaaaccccctcacagtttagaaaattactgtttccccttggaggctctttcctttattacgcggaccactttaaactgtacagtggattctgtgctaaccatatcaaagtacagaaggttctggagcgagctaaaactgacaaagccttcaaggcttttctggacgcccggaaccccaccaagcagcattcctccacgctggagtcctacctcatcaagccggttcagagagtgctcaagtacccgctgctgctcaaggagctggtgtccctgacggaccaggagagcgaggagcactaccacctgacggaagcactaaaggcaatggagaaagtagcgagccacatcaatgagatgcagaagatctatgaggattatgggaccgtgtttgaccggctagtagctgagcagagcggaacagagaaggagcagcccgaatggagctcagaggtgatggatgtactagatcccaggggaaagcttacaaaaggcactctggaagaaccacggacactggtaacagaactttcgatgggagagcttctgatgcactctacggtttcctggttgaatccatttctgtctctaggaaaagctagaaaggaccttgagctcacagtatttgtttttaagagagccgtcatactggtttataaaaaaaactgcaaactgaaaaagaaattgccctcgaattcccggcctgcacacaactctactgacttggacccatttaaattccgctggttgatccccatctccgcgcttcaagtcagactggggaatccagcagggacagaaaataattccatatgggaactgatccatacgaagtcagaaatagaaggacggccagaaaccatctttcagttgtgttgcagtgacagtgaaagcaaaaccaacattgttaaggtgattcgttctattctgagggagaacttcaggcgtcacataaagtgtgaattaccactggagaaaacgtgtaaggatcgcctggtacctcttaagaaccgagttcctgtttcggccaaattagcttcatccaggtctttaaaagtcctgaagaattcctccagcaacgagtggaccggtgagactggcaagggaaccttgctggactcttacgagggcagcttgagcagcggcacccagagcagcggctgccccacggctgagggcaggcaggactccaagagcacttctcccgggaaatacccacaccccggcttggcagattttgctgacaatctcatcaaagagagtgacatcctgagcgatgaagatgatgaccaccgtcagactgtgaagcagggcagccctactaaagacatcgaaattcagttccagagactgaggatttccgaggacccagacgttcaccccgaggctgagcagcagcctggcccggagtcgggtgagggtcagaaaggaggagagcagcccaaactggtccgggggcacttctgccccattaaacgaaaaaccaacagcaccaagagggacagaggaactttgctcaaggcgcagatccgtcaccagtcccttgacagtcagtctgaaaatgccaccatcgacctaaattctgttctagagcgagaattcagtgtccagagtttaacatctgttgtcagtgaggagtgtttttatgaaacagagagccacggaaaatcatagtatgattcaatccagatatgggttaaattcctcattttacttttaaactggtggtaaagtggaaattgc

SEQ ID NO: 1134 - DNA, 3057 bp, Homo sapiens
gttcgacgccaggattggctgcaagtagggagctttcgccgccgccccgggcccctcggactgtgccggcgccgcacccgaggctctcgccagcccggcgccccggtgctgagccggaaaataagtttgttgcgctgcgaggcagccacaaaacaaggaaccgagagcccggaatgctgcgggaagccttcaagtcagctcctccgactggttcgggctactgccccctctccgtgcgccctggcctctggcgccgggttcccggcggggcttttcttctgacagcccagtcacagcccgcagcagagggacgcgaacctggggagtggagggacctgggactaaaggaacaggagcccgtagccgtggtggaaggagccgcgtggagacggaggctgatgtctgtggcgcccgctgggtgccgggctggctgctgagcgctgaggctgcggcggcgagcgacaggccaggtgcctgctcttagggaaggaatcattgacatagagtaactccacagcatgtgtcttcaagagcttccctaaaagattaaaggttatacaaaacttaaaagaagcagcaattctattcgcttgttattggacttgaaactccctttgacctcggaaactgaagatgaggttgccatgggaactgctggtactgcaatcattcattttgtgccttgcagatgattccacactgcatggcccgatttttattcaagaaccaagtcctgtaatgttccctttggattctgaggagaaaaaagtgaagctcaattgtgaagttaaaggaaatccaaaacctcatatcaggtggaagttaaatggaacagatgttgacactggtatggatttccgctacagtgttgttgaagggagcttgttgatcaataaccccaataaaacccaagatgctggaacgtaccagtgcacagcgacaaactcgtttggaacaattgttagcagagaagcaaagcttcagtttgcttatcttgacaactttaaaacaagaacaagaagcactgtgtctgtccgtcgaggtcaaggaatggtgctactgtgtggcccgccaccccattctggagagctgagttatgcctggatcttcaatgaatacccttcctatcaggataatcgccgctttgtttctcaagagactgggaatctgtatattgccaaagtagaaaaatcagatgttgggaattatacctgtgtggttaccaataccgtgacaaaccacaaggtcctggggccacctacaccactaatattgagaaatgatgtccagtaccaactattatctggcgaagagctgatggaaagccaatagcaaggaaagccagaagacacaagtcaaatggaattcttgagatccctaattttcagcaggaggatgctggtttatatgaatgtgtagctgaaaattccagagggaaaaatgtagcaaggggacagctaactttctatgctcaacctaattggattcaaaaaataaatgatattcacttggccatggaagaaaatgtcttttgggaatgtaaagcaaatggaaggcctaagcctacatacaagtggctaaaaaatggcgaacctctgctaactcgggatagaattcaaattgagcaaggaacactcaacataacaatagtgaacctctcagatgctggcatgtatcagtgtttggcagagaataaacatggagttatcttttccaacgcagagcttagtgttatagctgtaggtccagatttttcaagaacactcttgaaaagagtaactcttgtcaaagtgggaggtgaagttgtcattgagtgtaagccaaaagcgtctccaaaacctgtttacacctggaagaaaggaagggatatattaaaagaaaatgaaagaattaccatttctgaagatggaaacctcagaatcatcaacgttactaaatcagacgctgggagttatacctgtatagccactaaccattttggaactgctagcagtactggaaacttggtagtgaaagatccaacaagggtaatggtacccccttccagtatggatgtcactgttggagagagtattgttttaccgtgccaggtaacgcatgatcactcgctagacatcgtgtttacttggtcatttaatggacacctgatagactttgacagagatggggaccactttgaaagagttggaggggattcagctggtgatttgatgatccgaaacatccaactgaagcatgctgggaaatatgtctgcatggtccaaacaagtgtggacaggctatctgctgctgcagacctgattgtaagaggtcctccaggtcccccagaggctgtgacaatagacgaaatcacagataccactgctcagctctcctggagacccgggcctgacaaccacagccccatcaccatgtatgtcattcaagccaggactccattctccgtgggctggcaagcagtcagtacagtcccagaactcattgatgggaagacattcacagcgaccgtggtgggtttgaacccttgggttgaatatgaattccgcacagttgcagccaacgtgattgggattggggagcccagccgcccctcagagaaacggagaacagaagaagctctccccgaagtcacaccagcgaatgtcagtggtggcggaggcagcaaatctgaactggttataacctgggagacggtccctgaggaattacagaatggtcgtggctttggttatgtggtggccttccggccctacggtaaaatgatctggatgctgacagtgctggcctcagctgacgcctctagatacgtgttcaggaatgagagcgtgcaccccttctctccctttgaggttaaagtaggtgtcttcaacaacaaaggagaaggccctttcagtcccaccacggtggtgtattctgcagaagaagaacccaccaaaccaccagccagtatctttgccagaagtctttctgccacagatattgaagttttctgggcctccccactggagaagaatagaggacgaatacaaggttatgaggttaaatattggagacatg

SEQ ID NO: 1135 - DNA, 3638 bp, Homo sapiens
ccttttttgctgcgcccttttccgcacttattgctcccagattttagaaactgcttggtggtcctcagatgacctcactagctttctcttaggcgcagggaggagtgggaggcaaattatagccgagaaaccaaagctggctgatccgtgctcagatccttgtaatgtcagagcagacatgaggactttgtatttagacaaaaaattcagccccctttctttttctttttttttctttttctttgagacggagtctcactctgtcgcccagactggagggcagtggtgcgatcttggcttaatgcaagctttgcctcccgggttcaagcgattcttctgttgcgtcagcctgtagctgggattacaggcgccagccaccacgccccgctaatgtttgtatttttagtagagacgggctttcaccatgttggccaggctggtctcgaactcctgggctcaagcagtctgcccgcttccgcctaccgaagtgctggcattacaggcctgagccacagcacccggccctcagccccctttgttaattatcgtaggtgattgagtttagtttccagatagttgccaagtctttagtgcatcttaactaattaataaagaatcccatatttggctactcactttccatcggaagatattctcttggtaacagcttctcctgttattaaagcagttacaaatttcaagcagatttctaaaatattggaagaattcgatgttgaagaacaatcaagtaccatgttaggaaaacgctttcccaacattaaggttatagaatctggcgtaaagcaactgaagagtgaagaacactgcattgtaacagaagatggcaatcagcacgtatataagaaactctgtctgtgtgctggagctaaaccaaagttgatatgtgaaggaaatccttatgtattaggaatccgtgatacagacagtgctcaggaatttcagaaacagcttactaaagctaaaagaataatgatcatagggaacggtggtattgcacttgagttagtgtatgaaattgaaggctgtgaagtgatttgggccattaaagataaagctatagggaatactttcttcgatgcaggagcagctgaattcttgacttcaaagctcattgctgaaaaatcagaggctaaaattgcacataaaagaaccagatatacaactgaaggaaggaaaaaggaagctagaagcaaatctaaagcagataatgtaggaagtgcattgggaccagattggcatgaaggcttgaatcttaaaggaacaaaagagttttctcataagattcaccttgaaactatgtgtgaagtaaagaaaatctaccttcaggatgagtttagaattttgaagaaaaagtccttcacttttccaagagaccataagtcagttacagctgatacagagatgtggcctgtctatgtggaattgaccaatgaaaagatatatggctgcgatttcattgtcagtgctacaggagttacaccaaatgtagaaccttttctccatggtaacagttttgatctaggagaagatggtggcctgaaagtggatgatcatatgcacacatcccttcctgatatctatgctgccggtgacatctgtactacatcctggcagctgagcccagtctggcagcagatgaggctgtggacccaggctagacagatgggatggtatgcagcaaagtgcatggctgcagcgagttcaggagactctattgacatggatttcagctttgaactgtttgctcatgtgacaaaattttttaactataaggttgtactgctgggaaaatacaatgcacagggcttaggttcagatcatgaattaatgctgagatgtaccaaaggacgagaatacatcaaagtcgtcatgcaaaatggacgaatgatgggagctgtcttaattggtgaaaccgatttagaagaaacatttgaaaacctaatcttaaaccaaatgaatctttcatcatatggagaagatctgctagatccaaatattgatatagaagattattttgactaaaaatggaatttcttcaggaatcatataaagttccaaatgacaccagaagaatcacaagtcaataaaatgaatgactgtattgagttaatgatgaccacactgaaaattacagaagtgataatgatattagtggaaaaatataaaaacataaattctaagtttgaaatcagttcaaagtttatttatagatatctttccaatacaacactgaccgcttagataaaaatcttaagttatttatttctgtgttttaaacataaatatgtttacttgtgatttagctttggagcaaatttaggtaagttatctacttagccaaatgtactctagtagactagaaccattctttgtgaaatgtcaaaatatggctatggtttcaggaactttaaaatcggttgtattttactttaaatagagatgtagcaatatctcgtttgctaatatttatattgatgacttactccttttttgttgaattgtacttctggttttataacctgaaatcatctacaagcttgtccaactctagcccacgggtctaatgcagcccagaacagctttgaatgcagcccaacacaaatctgtaaactttcttaaaacatgagatttttcttgcaattttttttttttttaagctcatcagctatcgtcagtgttagcatattttatgtgcggcccaagacaattcttcttccaatgtggctcagggaagccaaaagattggacatccctgatctacatatttaacttaaagtatcactcagtgaacctctgtcagtataatattgctttcaaaaagatggttatgtcaaaagaaaaaatatagctaagtatataaaggcataaaaaacttaagacaattacatgaacttattctcaaatattttacattttttgtaaactttcttaaaacatgagatttttcttgcaattttttttttaagctcatcagctatcatcagtgttagcatattttatgtgcggcccaagacaattcttcttccagtgtggctcagggaagccaaaagattggacatccttgatctacatatttaacttaaagtatcactcagtgagcctctgtcagtataatattgctttcaaaaagatagttatgtcaaaagaaaaaatatagctaagtatataaaggcataaaaaacttaagacgattgtatgaacttattctcaaatattttacatttaaagggttttacataaaaatttttcccttgttttatactggaaaattatataattcatgatctctaattttcaaacattctcaaaagtttagatcttcagagataagctctgaaaatatagatccatacatataaaatatctatgaaattcttttaaaaactattgtctaactacaaaaataatggcatatacatgcataaaccatctttaattagaaaatttagtaacattcatatcaggcatcatcgatttttcttttcttagctcctgtattcttagaaccagattgctgaagcatgtttgcagccttcttctggaagttgcctgaatttttttcctccatctttttatcaccttgttcagagtgacaagtttgagacgattcagcctac

SEQ ID NO: 1136 - DNA, 3633 bp, Homo sapiens
gcacaagcccagcccgggcaagcggccgccacctgcccggcgccgcctccgcccgcccccaccgcggcgcaacttggatggagttggggtcctgagcgccggccccccacagccgccagcgcagagctcgtgccgccaccttcgttctgggacccctctctccgctgctcttcgctcccgcgatgggaaaagttggcgccggcggcggctcccaagcccggctgagcgcgctcctcgccggcgcggggctcttgatcctctgcgccccgggcgtctgcggcggcggctcctgctgcccctcgccgcaccccagctccgctccacgctcggcctcgacccctaggggcttttcccaccaggggcggccaggcagggctcctgccacgcccctgcccctcgtagtgcgtcccctgttctcagtggcccccggggaccgagcgctatccctggagcgggctcggggcactggggcatccatggcggttgctgcacgctccggccggaggagacggagcggagcggatcaggagaaggcagaacggggagagggcgcgagtcggagcccccggggagtgctaagagatggagggcagcaggagcctgggactcgggagcgggacccggacaaagccacccgcttccggatggaggagctgagactgaccagcaccacgtttgcgctgacgggagactcagcacacaaccaagccatggtccactggtctggccacaacagcagcgtgattctcattttgacaaagctctatgactataacctggggagcatcacagagagctcgctttggaggtcaaccgattatggaacaacctatgagaagctgaatgataaagttggtttgaaaaccattttgagctatctctatgtgtgtcctaccaacaagcgtaagataatgttactcacagacccggagattgagagcagtttattgatcagctcagatgaaggggcaacttatcaaaagtaccggctgaacttctacattcaaagcttgctttttcaccccaaacaagaagactggattctggcatacagtcaagaccaaaagttatacagctctgctgaatttgggagaagatggcagcttatccaagaaggggttgtaccaaacaggttctactggtctgtgatggggtcaaataaagaaccagaccttgtgcatcttgaggccagaactgtggatggtcattcacattatctaacttgccgaatgcagaactgtacagaggccaacaggaatcagccttttccaggctacattgacccagactctttgattgttcaggatcattatgtgtttgttcagctgacatcaggagggcggccacattactacgtgtcctaccgaaggaatgcatttgcccaaatgaagcttccgaaatatgctttgcccaaggacatgcatgttatcagcaccgatgagaatcaggtgttcgcagcggtccaagaatggaaccagaatgacacgtacaacctctacatctcagacacacgtggtgtctacttcaccctggccttggagaatgtccagagcagcagaggccctgagggcaacatcatgatcgacctctatgaggtagcagggataaagggaatgttcttggctaacaagaagattgacaaccaagtgaagactttcatcacatataacaaaggcagagactggcgtttgctgcaggcgccggacacggatctaaggggggaccccgtgcactgcttgctgccctattgctcactacaccttcacctgaaggtctctgagaatccctacacatcagggatcattgccagcaaagacacagctccaagcatcatagtggcatcaggtaatataggttccgaattgtcagacactgacatcagcatgtttgtctcttcagatgcagggaacacctggagacagatctttgaagaagagcacagtgttttgtacctggatcaaggtggagtcctggttgctatgaaacacacatctctcccaattcgacatctttggttgagttttgatgaagggagatcttggagcaaatacagtttcacatctattccactttttgtggatggggttctgggtgagcctggagaagagactctcatcatgacagtgtttggacacttcagccaccgctctgaatggcagctggtcaaagtagattacaagtccatttttgatagacggtgtgccgaagaggactacagaccttggcagctgcacagccagggggaagcatgtatcatgggagcaaaaaggatatataagaagcgaaaatcagagcggaagtgtatgcaaggaaaatatgcaggagctatggaatctgaaccctgtgtctgcactgaggctgattttgattgcgactatggttatgagcgacacagcaatggccagtgcctgccggcattttggttcaatccatcctctctgtcaaaggattgcagcttgggacagagttacctcaatagtactgggtacaggaaggtggtttccaataattgcactgatggcgtaagggaacagtacactgccaaaccgcagaagtgcccagggaaagccccgcgggggctgcggatagtcacggctgatggaaagctgacagcggaacaaggacacaacgtcactctcatggtgcaattagaagagggtgatgttcagcggacactcatccaagtggacttcggcgatggtatcgcggtgtcttacgtcaatctcagctccatggaagatgggatcaaacacgtctatcagaacgtgggcattttccgtgtgaccgtgcaggtggacaacagtctgggttctgacagcgccgtcctgtacttacatgtaacttgtcccttggagcacgtgcacctgtctcttccctttgtcaccacaaagaacaaagaggtcaatgcgacggcagtgctgtggcccagccaagtgggcaccctcacttatgtgtggtggtacggaaacaacacggagcctttgatcaccttggagggaagcatatccttcagatttacttcagaaggaatgaataccatcacagtgcaggtctcagctgggaatgccatcctacaagacacaaagaccatcgcagtatatgaggaattccggtctcttcgcttgtccttttctccaaacctggatgactacaacccggacatccctgagtggaggagggacatcggtcgagtcatcaaaaaatccctggtggaagccacaggggttccaggccagcacatcctggtggcagtgctccctggcttacccaccactgctgaactctttgtcctaccctatcaggatccagctggagaaaacaaaaggtcaactgatgacctggagcagatatcagaattgctgatccacacgctcaaccaaaactcagtacacttcgagctgaagccaggagtccgagtccttgtccatgctgctcacttaacagcggcccccctggtggacctcactccaacccacagtggatctgccatgctggtgctgctctcagtggtgtttgtggggctggcagtgttcgtcatctacaagtttaaaaggaagtatttccatagttgctgagaatcaaagcacaaaagaaatccctacctatgtaaatgtttgaatggaggacgccagt

SEQ ID NO: 1137 - DNA, 4120 bp, Homo sapiens
tattattttattttcagaagttcccaaataatgcctggtctttgtttatagtctcttgtttccaggcctcgcagagtgagtgaggtgtttttctggatctggtgatttccctgtctgaaatgtgctgcatctgcggggacccctcgcagcctggggcaaaggtggagttttgcttccgcgggcaccttcaggtgccacaggaacactgcttggtgtgtggctcaggctttcactcagctctcaggtgttacccacctggcctctgaatctgtgtctcctcctctctcctccccggcactgaggcttagggcaggtgcttttcttacagatgccactggaggaaggggatgctttctttgcagcctttgggtacctttgtgggtacagtgtctccctccaggatggcagctggcagtagcacggggctcttttgcgagctccccaccgagaactggcctatacctggtgtctggtcagctgtgtcctgtgcgaccctggagatcacggggtgcgtctccatgtggccagcgatcccgggcagaggttgtgcagcttttctgctccgtgactcgtgatgcccgcctgtgcttaggtttggagactggcagttcctgactctttgcaggtttcttggtacatttaagatttcttgctagtgctttatttaagacgtctcaggattttcagtgctgtgccaagtaagtcctggaccattgtggtcttgagatgggccctggagcaccggctgcatctttgtttcccagcagttccacagggggcgctcagggcacttatcttagtgaattttatttataattgtttaagtgacagtaaactagtaaatgccttctgattgattttaattttagtaaggactaacatttatttcgacctttgttcatgtgtgagtaaatcatgtaatttcacatttttcgcagaataatcttgggaaatattattttcatccgttttctgtaagtaacaggacccagcaagagaccagggtccgtgagggccttgtgcagggagggcccttgaaatcagggcccccagcagctgcccacgctggagcctctcttgtgttctgggtgcacgccatgacggtgctgataggacacacaggtggcccagagcctcttactacgtcaagacagcgggagatgcatgcagtagcaagtgcacagaaagtgggcactgggtggaaagtgttgctttataaatagccagatctcaatcatgactaagaagaatgtagaaaaatgataaaattaccagcctcaaaaccttggtgcgtcaccgggttccccacttcagctggctgccctagctgcactgtacagctcattactggaacgtcgtccaggcctgtcatatgcagagcccttgggactcacaagacgctcaaatacttaccatcctcagtctgattctttcatataaacttgcagtcgtttttgtgaaaagaaaaaatgtgtctgaaatatgagaccaaaaataagcttaaatgatgagtgatggcaaattggggaggcagtcagttgactcaccatgcagtggaacgacttgctctctcactgctgcaggtgggcacactacgagaattgctcttctgtgtcacctggtcattgtgttttttgcattaactgaggacagaaagggaggaaaaatctctttttgtgcacatactcctttgaattgtatgtttggctttttttgttttgtcaaaggttgcaaaacttcctcaagttgttcaacagcaaacacccgtggccagcatccagcaagttgcctctgcttcccagcaggtaggacgcatagacaaagtggaaacctcacatttcccaggtcagagaatgggttgttttcatctgaggtcatgattagggaatcacttttgatttttgtgatacacacaaaaacattaacttcaggggaaaaactagatacacttaataatgagaagagtgaacaagcgtttagaggttgtgtcagccatactgagggagcctcaccttgggctcattcccaggacccttcattcactgatcatcgcgggtgtgtcctgcaagtcgcagacactgccctgtggttttagggaggcacaggcctcaggcaagcaggctccgctcggggcccgcccttgagcagaggcgctgtgggcacagtggccttgcctcccacagaagcccttcaggcgctttcactgttgtcactgatgctccacaatatgactctttagcacagtgctttaaatgtaaagcggtgctttaaactttctaaattttgtttaaagtcacactggcatatagatttcaagaaaccaaactctattaaaagctttactacaacgacaaaatcagtccctgacccagctctcacccttttcccaagaggcatctggtgttagtctaaaagcaaccatcttttaattttccacttgtgtttaattggaaaccagaggtcatactgttgtgtgactggtcattcttccgtgtcataaaagcatagtcagtgaagtttctcgagtcctccccatcccaaagaacgtccattttcctgtccctggactgagtttcctgggcaatgtgtgttttctgactctctcggctcaggcttctccacagactgtggcgctcacgcaggcgacggcggccgggcagcaggtgcagatgatccctgcagtgaccgcgactgcccaggtggttcagcagaaactcattcagcagcaggtggtgaccacggcgtcggccccgctccagactccaggcgctcccaacccagcccaggtgcccgccagctccgacagcccaagccagcagcccaagttacagatgagggtccctgctgtcaggctaaagacacctactaagcctccgtgccagtagtcagggcagcagggctgcctctcatctaaagcaaaactaccttcctcacagaaaacgctttattagtgaaccttgggaccatgtcacgcaagagattcagcactgggaaagatataattgaaacaaaatagtgtaatcattttattaaaatgcatcccacactgcaggacaaatggtccttatggagtgccgcgttctctgtactacgtggctcatggaaaaagtgacaacatggcttcctctaaatcatttcacctttcagtccccacccgcacccgtcccctagagccatagtactgtgttctgaaagccatttagaatttctttgtgagcatgtagtgctttgcacgccacagaagccgtctgccgtgtgtgaggagcatacaatggactttctaaagataaggcgtgggcttccacagtgtctgccagagtttagttctttataccttactgaaaaatgcctcgtggtcttcgcagaggggaaggcctgtctaaagtcaatcatccgagatgggttttccattccaaagaaaggcaatatggttccttccttccctcctaaaatatgacttaacttttaagagaaatgttctgacacccacctaaacacacaaggcacgttcctggcctgtgttcaagggaaatgatcagtcattgcattgttattccaaagagcagccaacagtggcctcccccaggccctaccctgcaatgggattcgctttcatttaatggaaacttctgggactgatgcccaactcagtgcactcaagacgcatctccagctttcgggggaagctggtatttgacatagtgtgttaaacagctcctgagaacctttgggacactctgccatggctggcgtgaggcccagaggaccacgcagaggcaatggtagtacagatgtcacagctgagggtacgatgaggcctgggctcagtgagccaggacgaatgtgacagacaccccttgctgccacagtcagccctttgacgaaggtgggctggtgattctggaagtattggctatagcagtgggcccagtcaactcttccttgtggacttacgacagcagattttctctaggataagcttgtgtggttctgccagtgaagcagagaaccacctgtgctgttgtggaaggcgtgccgttgagggggaaaacgaagcccagtatttgctactgtttttcctttttttactatgacaggaaaataaatgcaattttagtgg

SEQ ID NO: 1138 - DNA, 4421 bp, Homo sapiens
ttatggattcattagcatcgcccccactgacttcatatgctctccttagagtgtacccagctcccccaccacgcttcatgcacctgttgctccaccgcgcctcccagcgtgagcgccgcccgcccctccccctgtagcatcgtggtgtcctttgactgtgctggctggcgagttccctgtcctccctcactggtctttcaaaacagttttggctggttttgtacatgtgtctttcatatggtttttacttctatagtcagaaaaactaagcatttttcaaagtcacatttagaatcattcaatcctttcatgagcgtgagtgccaagttctcctgtgggcttgctggactcctctgctctgtcccggagcgggctggcctcagcctcgggatctgcagacaccccctttggcactctgcaggcacactgtcctcaaaccttcttgcacccagtgcgaggtgggaccattaggattatccccatttcacagatgagggacactgaggcacagcaaagttgagtaagttgtccaaaaccccacagaggtggagctggtcctcaaacctgagcagtgtgactcatgcagctgcactggtaaccaccgtgcagcctcagctgtccttggccctagatactcctcccagtggaaacattggtgacaacaggagcaggaagatgatctggctggtggatgcctcctccccagtattgccagaaaggctttcgaggtcaagttcaggacgtgttttcctctcacgaagtgcttttcctggagttcccagcaccctcagttctagtgcccctgcgtgtgggtggtcccagcattcggttctgtagaatcaggtgtgttctctaatgctgggactttcttcacgctgtacccagaggtacagcagtagaactgcgtgtcagcggtaacagcggctgccatcgagtgtgtcggctaggcgctgagatgtgctctttgaatatgggatctctttttgactctccggaacccagggaggtggaggtggggcatctccagcttgcatgtgaggaagcgggagttgagaagcagcaggcagggccaggcagggccgggcctggggcctggtgtccgaccgcagcccagcccccctcatcgcctgacactctgcctctgcacacagggcagtgccacacgcacctctctgcagaaccccccagcttacccgaaagggttggcctacccaggaagccaagggagattcaccccaacacctccaaacatgaaagcaggtgtcccggccgccagattccctcgtgaaagcacttcaggtggtcagaccgcttcccagtgagatcccatcgggacatgtttctagtgctcttcagttcctagcattccccggggagctgcggaagcattttctcatggacacactgtctcttgtgaataggttccaggtcagcccaggagagccatagcagctgctggtgccaccgttcagcaggggtgagtgccctgcctgcagtcaggaggcttgtgcccgagctctggaacaaatcatcacttaggatacagcttccctggaaagaaattaagtgtcaggacttttagaccataagttgcttgaaagtcgagaatggcagacatagggttgtggtgttgccagtccactgcaggtgctccagcccgcggcgcggcctgcgctgctgtctttgaggctgtagcacaagcatgagctcgggccccctccctgtgcaccggagacccagccaggtccagccggtctgtccatggtgccccaccagcagcatcgtgctgggcagtgccgcctgcagagtcatggagccttagttactgagcaggtgcacgtggggggcttggaaggccccactgcattaccatgccagctatcacacaccccgtgccagaggactgcatgtgacacggcttgattacgtggcactcgctgctgcaaagcaaagtcagatgtcatcatggaaactcaagcaccagtctttttctctgaattggaatatagctgtaagaatgtggtatgattctgttcctaaatgtgaattgattattatgttgaaacaggtaaaaaccccaaaattttcttgtcacgtgttcctgtgtctctttcgaagtgtgtcaccttaggtcactgtgtggacacagcaagggtggaggacgctaacttggcctttgcagtgatggtggggtgggacaggtgttctggggcacgaggggcccctgagaatcccctgcctgggtgtgtttcttctgattctgtccctcacgtctctgttttctcccttttctgtgctccagagcagccatcagcagggaccctttctacgaaatgctcgcagcacggaaaaagaaggtctcctccacgaagcgacactgagcgtgcagccaagggcgttggtctgcgggggccttggagctcctgctcttctcccgcacctccatggatgcactgctgccgagcagagcgtcctctgccaggccccgccctggattcctagagactagcttcagcttttgctatttttttaagtgggagaagggtgggcagttatcactggggaagagaggaccggccacctgtccagcatgggctccagagccttcctctctcacagggcagagctcttgtcggcagggcagcctcctggccagtttctctgctcagtgttctggtagcagagctcagagccaactgtttacctcttggttgtccccgtgaagaagccttcaaaccctgcaccataaatacatgtgtccatatattattatatgttaagagaaaaaggtggaaaggaagagaagccacatactataaagatctattttttttttttaagagagaacgtagggctgttcaggtgcattctgccctggctgcgctggggagcttctccctggagaagagcacctggggctgcggccaaggggcatcagcctgggcccgcggcagggcctggcctgcctctcctgtgctgtgggagctcgctgcctggtgcttgtctgggcgagatggacaggtgaggtcgaggacgcagagggcagaggcccagtggagcctcagacggcacagtcagagtcgggggcctgccctggccggggtcgcagtcggcagcagcgtgcagtccggcatctcccgcggatgcttttccatcccaagtgcctgcggagcgccgaggagaggagagagctgactggacgcttacgttattttcctccttcagaatccaagttcttgttgggctttaaagtagaaagtcagcattttccttgagctaaatacctaataaccaaaactgtgaggaaggttatcgggacagaggttccggataacctgtttcattttgggttttcttcctcttccccagactccagtcctcgttctagaggaaggagtaggacttccccgatccccgtagggcttcagctttttctgcctcaaaaccagccctaactggactactctggatgcattttgtggtgggccccctagaggggaagatgggcctttatctgctccgtggggtgcactggagtgaggggggtggccgggctgcctctcgcatctctgtcttcccctgcaggcgctgtgtgagctggccctgcccctcctcattacagtatgaagggagccgtgacacgcagcattttcctgccgttctctcagggactctcagggcagctcctgccactccgccagggccagcatgccagtccaggcagagcaggtggctggctgtctggccgtctcgccccgcccctccacaggaccctggaccagggcggtgcagggcgcagccctgaggaggcaggtggaggagctgcgggttttcacagggccgcgtcgccacggctcctctgatcctttagggttggcgagcatctctggaaatagcttttgcagaggagtggtgggaggaatagagggggacagtctgtcacctccctccccgccactttgtgtagatcctacctggagggaatggctttaggcacttttgtgccagagcttgtgagggtgacagaagagggtccaggctggaaacctgaactttctgggtgggagaaccaggtggtgcctgccgaggtctgggcgtgtttgggccggtgctggagcctgtccagctggcccgggccctggcctggttctcaagtgtttcctagacagagaggcacctgggtcagtattagtctatttatcagaggtgtaaataatctatgtatagtttttctccttttagattattttgtatttgtttaaaagaagttttgtcaaaatacaaaaatataaagaaatgactgaaagttgttgacagggtttttaagaaataattattctaattgtttttgtttgtttgtttttgccttgtaaactagcgccaaggaactgcagcaaataaactccaactctgcccaagcc

SEQ ID NO: 1139 - DNA, 3634 bp, Homo sapiens
ctggttttttgaagtcaacacaggaaatgtatttttatgacggtgtctccagagatgcagcttcagctgccctcgcagatgccgctgaggagctgctggaccgcctcgcgtcacacagcatgctgccctcagacgtgtccatcctgtaccacatgaaaacgctgctgctcctgcaagatactgagagattgaagcatgctctggaaatgttcccagaacattgcacgatgcctcctggtgggaagtctgaagctcagagagcctgggccaatggtacaggtcacacagcacatcagtggctacatgtgagctcagacctgggtctgctgctgtctgtcttcccaatatccatgaccttgactgatgcaggtgtccagggatacgtccatccccgtcctgctggagcccagagcacggaagcctggccctccgaggagacagaagggagtgtcggacaccatgacgagagcttggtgagtaccaggccaagctgtgctttcctcctccacggcacagctcgggttggggttccagagggtcccagctggccctggaaggtaccttactctaggcaagaatgaacaggttccaaccgccagcatttccttagctctccctggacagcctccgagattaagagaccaaaaactccatgatgtgatataaatcagcaaatataaaaaacaaaatcttcactctgcaactgagagacaggacaggagtccaggggctcaggatgaggatggcatcgcgatgagagacagacgccagctggaacaccctctaggcaggccaccctctgggcaggccgtcagccacagttccatgtttaggaggaccttgacaaggtcattcataataaaattattccccggcagagcatcacttctcggagggaactgtgtctctgaactgtgttcagtttttgtcccggggagctctgtctggtgctcacctttgtacctgcagcaggtgcactgggcaccatgttattagtgtctcagagctgagttcatgtgcatttcttcacctaagaacccactcacaatgaccccaccccagctcctgcagacccggcagaggctaggacgtggctcaggagacaagtagggtctttagagaagccccccggtcactccctttcaagccataagttcccaggtcctcaatagttggctctgagtagaattgtcagagaatgggattttcttaaccatcacaatttccaagtagactcaggcctaactcccagcaatttgtatgtcagactctacagacaattctgtgctgtctatttttgctcatctttaaaacagccacgaaatatgcagcttcctttccctgagaaaatggcaaagaaaattcaacacagaaggccagggagggtgtgtggaaacgattcacatgttcaaaagatttatatgtgtagaagaaagctgtgaagtgtgaagtatattttctattgtagaatggatgaaaatggaataaaaataatatcctttgctaggcagaataaataacttctttaaacaattttacggcatgaagaaatctggaccagtttattaaatgggatttctgccacaaaccttggaagaatcacatcatcttagcccaaggtgaaaactgtgttgcgtaacaaagaacatgactgcgctccacacatacatcattgcccggcgaggcgggacacaagtcaacgacggaacacttgagacaggcctacaactgtgcacggttcagaagcaggtttaagccatacttgctgcagtgagactacatttctgtctaaagaagatgtccctgacttgatctgtttttcagctccagttcccagatgtgcgtgttgtggtccccaggtatcaactccaaattcctgggagcagtgctctggccgtacctgtctgggtttgttggccagccctgaatccgcttagccaggagagcatgcggggtgcggggttcagtcagcctcacacacgtggcaggagtttctctctggacggcggccgcccacacctggccgacaggagcctgtcttcagcaactttcagttaacgcgtccctcttgccccatgcttgtcctgccacacaaatgtgaaaatgcaacgttacaaagatctgtgcctcagacaccatttgaacacagagaaactcgtgggcttatgtgactacacttttcaggttacggaatttctttaaggtgtactcttgagtttaatatacttattaataacttatcattacagagaaaaaattaccagaagtacagggtgtttttaacggactttcttctcttacacattgctgggcatggcgtgtactgtgacagggcggagtgatgggctgagaatgtgtgtgtgtctccaacagttcccaaacgtctacattttcaagaaaaaggcaatctacatcatctggaaaattgtaacttagtaattaattaggataatttccctaggttctctgtgctgcatgagaccacagcgtattcattaaagaggaaagctgaatattggcggaaaacagggttgtaaatttgtaacaagttgttctatcagaaaatgaaatgcaattttctgtcctctctgagcttttaccacatagctcttagcaatgggtgttttttctgtcattccactcaattctcactcgagtaaacctccaagcaataagaatgttgtctttcctgtttagactagactgactacctttccaggacagtccattaagttgatttccaatggtgaagggtcagacacgcctcccctgggcagatcagggatagttcatagcatttgccaaatagctgtctgcagctgcagccatcacctccgtaatcaacactgccattgtctgagccttccctttgcaggaatggtgtcagtgcacccaggcctcgtagagatgacagccaccccaggcactattgtgaccattgctttgatcattgttctgtttatgactgaggaaagcagggcttaggaagactaatcttagttatctctttatcccagcaatcggcacacatctgtggatcaataaacattgtattaaaatgatgaacacaactgatctcccttaacctgattttccaggagtcctaagcagacttaaagccaagaaaataagaagaggaaagagagaggggctgccttaaccagctgtggtgctgacttggacaattccaggtcaagaggaactgtctactttcgactttgtgtgatagtaactttttaagcagtggaccgggagcccaagactcagatgcagcaagctttgcaaggctgacgagagctgagatcttcagtggccgatgggtacagggctgctgggagcgtagccacgtctgctccaaggtggcttgaatgaggcagtgcccaagtccttttgactggctgaggtgagcctgtggctcagtcacactttgtccctctcgtaataagtgcatttcccagacagcagctccttggtgtcatgcaactgaggaacctaattggctgggtgggttgttcccatccaacttccacctgtcacgaaggttgctttttcagatcagtctccacagctaccatcttgtcgggcacagagccgggcatcaacaagtgtatgttgaataaagaatgaattgatg

SEQ ID NO: 1140 - DNA, 3839 bp, Homo sapiens
atagtttcacacagagaaaacttgcaagaactcttgtatatcctttacccagattctccaactgtcaatactttgtcccatttactatttgctttagacattttgagatttgtttttgaaccatttgaggaaaacatcctacccttctacccataagtactttttcagtgtgtacatcttaagaatcaggactttcccttccataaccacagtccatcagatgcaggaaataagacaataatgcaatactatgacttagcccacagttcatgttcaaatcttaccgatcaccatgcctctttggtcttgcttaatctgaaacagttcagatttttattggactttctcggctttgacattttggagagtgaggtgttattctttagggtgtctgtcagtttacatttggggctttcccgtgatcggattcaggatttacatttttggcaggaacagcacagaaatgatgctgtgacccacatgcatcacattaggggcccatgatgtgggactgcgctttccttgctgctgttaacttttatcagttaaggttgtgttttccgcattgtgaagatactgtttttccttttaataagtaatttctggagggatactttgaaactaagtatcctgttcctcatcaaactttcacctactagtttcagcctcaattgatgattcttgctgaatcaattaccaagatggttgcaaaatggtgattttgcaacattatcgtttcttctaattattggcatgctcttataaggcagtttgttttctcgaccttagaagttttgtgttcatttagttattggcatagactcaagagtcttgtgttctatgtggagtctgttactgtgattccttgtgatgtccagattgtatgtatttggccaatcttgagttccttcaggaaacctcctggatcccatcattttaagggtgcttccttactttctagcatgagatattccaggcctaccttgtactttccctgctgcagccctggagtcagtcttttgttgtggttttgctttttagagacagggtcttgctctgtcgctcaggctggagagcggtggtgcagtcagctcactccactcctgggctcaagccatcctcctgcctcagcctcctgagtagctaggactataggcatgcaccaccacgcccagctttgaatccgtcttttatccaaggagctctggccttttagcggagaatagcggatgacatgaatgatgggcctgaagcaggaagtgaaatgcaatcctgaccaccagacagatgggatcttcagctgcactcaggcaagaactaggctcggggtagaggtgacagctctgtgatggggagctcaggctgcaccaggaggccatgctaggtttgacttcatttaaaaagcacactacacagctgacgggctcaggagctccatgaagggcaccctgcagaggtcaggagggtagtgagaaggtaccaatggggcgagcatgcctgtgtcgggaggctgatccgggtaggaataagcccagcatgccccacatgagcccaccatgaggaagcatttggagagaaagcttgctctgtgttgtcagaagggagattgaagaaggtgggcccaggggtgctgttgacagtataggctcatgtgctgttccaaggctcatctctggctcttgcctggtctggccataccatgtccacatccgctgtacttaggacttcctctgggcaccagggcagtggcctcaccaagacctggaggcctagatgatgaaatcatactggtgtttgctgtgcttgtacattcccatcagcagacatccgtgtttgggcctgactagccaacagggaagtccagggaggacacagtataagctgcttgggtagaggtcagctggaacctcttgtgaactctgcaccagagtgaagccttcacccatggcagtattcctgtgggtgggagggaagctactgcagactgaaagcaaatgattccaaggaaacacagtactttagagaattctctttagatccgtgagtgctgcccatggagctgggccattcctcctgagatacaggacaggacgcctcaactctgcttctttgggctctcccagacctacccaggccactggagtgagtctagagaaatgaccagggtggtgaagagacaccctgcaaactggcacatacgagaggaacccaggagggcagcagaccccagggggatgagggtgctgcctgcaaatctctgagagttgtcacagaacagagtgaagagatgtcctttgggggccccaggaggtagagattctgggaatgaggttgggtttgtttcctcatttgtctgcctgtctgtccgccatccatccaacacttagtgagctttgctctgtgctgggcatagagaatcaacagtgaacaagatgggcaaagtccctgccctcaaccaacagactgaaaagagaggattcagtgccatctgcaggtggcatgtggctgagtgggcacaggagcatggagaaggcgcagttaactgttatttgtagagacaggggaaggtgttccatagaagtagtgactaaggagcttctgaaggaggggtagaatttagcgagggagagagactttggctcaattaagtaaaaagttagatgggctcagttttcttgggcaagtctggcctgttgtgcaaagcacccgcactccctgactcttccccaaacacaagagctaaggtgggtgttctgttcctcccacttctgcctccaaatgacctggagggaatttgtgtcccagctgttcccttccctgccacctttgctccaggtaatagccctcctcacacctctccacatctgatagggaactttcccctgccggatctcaggagcatcagcactcccagcctccaaaatggggacaatgagctcaccaagtcaatgtttaatacattattgacagaacttacgatgattttaggtggctcagggatgtagtaaagtacttgtgttctgctggttaggctaagctgaagtgacaaatggccctcaaatgtctggtttcaacaaaagttcatttgcttttgttgaatgtctggcacatgtctgtcagccagcaggcacctgggaccctgctccgggttagcttcaccccgggactcgggctgccatgtctgacacgtggtggtccactggcagagggacacacgatcggggcaagttctgctggcccttaaagcttctacccagaagtgaccattaaccacttctgcctacattcactgggcaaatcaggtcccatggcaacgtgagagggcatgtactctccctgaggggcagcaaacagtaactaccaaaaccaatgaatattttcattttaatagtttaatgtatgtttatagtaatataaaaagtcttttcagtgtgtgaaaaaaagacatgttgtaggatgggatcctggaatggaaaaaggacattaggtaacaaactaaagaaatctgaggccaggcacagtgactcatgtttgtaatcccagcactttgggggattgaagcaggcggatcacttgagcccaggagtttgagaccaggctaggcaacatggcaaaaccccgtctctacaaaaaaaatacataaattagccaggcgtggtggtgcatgcctgtagtcccagctgctcaggaggctgaggtgggaggatcacctgagtgagcctgaggaggtcaaggctgcggtgaaccatgatcacaccactgcactctagcctgggcaacagagtgagatcccgtttcaaaaagaaaaaaatctgaataaactatggactttagttaat

SEQ ID NO: 1141 - DNA, 3648 bp, Homo sapiens
cattttcctacaaatatgtatgaagtgtactgcagtgctctgctgtcggatggcaccattacagaaagcccagattgtcagaatggtgaagaatttaaaaggcagcccaataactctgtcgataggtgatggtgccaatgatgttagtatgatcttggaatcccatgtgggaataggtattaaaggcaaagaaggtcgccaagcagctaggaatagcgattattctgttccaaagtttaaacacttaaagaaactgctgttggctcatggacatctatattatgtgagaatagcacaccttgtacagtacttcttctataagaacctttgtttcattttgccacagtttttgtaccagttcttctgtggattctcacaacagccactgtatgatgctgcttaccttacaatgtacaatatctgcttcacatccttgcccatcctggcctatagtctactggaacagcacatcaacattgacactctgacctcagatccccgattgtatatgaaaatttctggcaatgccatgctacagttgggccccttcttatattggacatttctggctgcctttgaagggacagtgttcttctttgggacttactttctttttcagactgcatccctagaagaaaatggaaaggtatacggaaactggacttttggaaccattgtttttacagtcttagtattcactgtaaccctgaagcttgccttggatacccgattctggacgtggataaatcactttgtgatttggggttctttagccttctatgtatttttctcattcttctggggaggaattatttggccttttctcaagcaacagagaatgtattttgtatttgcccaaatgctgtcttctgtatccacatggttggctataattcttctaatatttatcagcctgttccctgagattcttctgatagtattaaagaatgtaagaagaagaagtgccagggttcatcacttaatttcctcttctgcataaaaagtatagtaaaaacttcgttatccaatgcaggtgaatccgaatcttgaactgcctatgttattgtcctacaagcatactgacagtggttacagctaaaaaagaaagcatgaagaaacaactacaaaaagttatcatctcaggatacttgatatgcaacacactaaaccactctcatgtctagagttcacaataaatgttcattaaaataccaaatgattctcttaagcatttaccattattgtaagtagcctttatggccaaagctgtaagttaagaattatatgaaagttgaaagcaagaatacttagaattctggctttagttagagtaatataactcaaatgggtgctcttttaacccatgaactttgtgaatggatttaaatacaatagtatgaagtagaagttatgcaatgagaatgaatagattttgctaatactactttttttgcctggcagaagaaatagactatttggatcacatttctcattcctcctaaatgatcatcttaattttttttcccaagtacataaggaatacttgaaaatacagaataactaaatagtatcaatgcatcagacagaatagttaatcccttctgtttacccatgtgctactaatgtcttggtagaatattcttgccaaaaaaataccttgaacgcttatgtggaaagtgttaacttacgggtatttttgtgggaatagaaaaaaattgtttattttttattcttctgaattaaaccccacttatgggtgtaagcctactagacttgaaaataaagtataaaacatttccaatcacttagtagcccctcaaagtagttagaaaataaacagatttttccagtgttgattttactgggatctgcagtaaggtggtttaaaccatagttatataaaaataaaggtcattctgaatatcagccttttataattttatgtgaagaggaagaaatatagcttattttaaacttttgacggcttttatttgaaagagattgcatttatgcatatatgcagtgctttttcttaaacttggccaatttggaaagggggaaggagccaccccaaaacggtggttcagcttgtagagccatgactctgtgaagatgaatgttgtctcttaacttggacagggaaatggtctaactctaaaccatgtaactgaccttagtaaagtccttgactaactgaactagaaggaaggtttagccttctaattagttcacttgaaacataaatgtgaaatgtcttcattcaatgttaaacacatacttttttggatataaatgaccatatttatttgactgctagtttttttgttttttttttgtctttctggcatgcctgtactattattaatgtttatattgtaccttgatttggaaaagtattggagttaatctgtattatatttatatagtccatatggcacatttgattcttccacatatattttgtgttaatgtttaggtatgattttttttctaaattctagaaaagaacataatttcagttatcagaagccattccatcattatagaccctttttcattatttcatttgctctcatatatcagtattatttttgagcattttgttacatgtcattcacaacttacctaagtgtgctgtgttctggtagcccgtatttgaggtaagctgctgaaaacaaaagtctctatattctttgcctattccaaagagctaaaaaagtctaacccaggaaagcttttgatattttgtgtttgttttcttgttcttatggttgttgttgctgtattatgattgctgttttacataaaatctatgggaactgtgaatacagacaagagagccacagtagagaggcttgtttaatgcagtaccattggagagttaacagaataatctagtagaaaaataactggttgcatgtaaaattccttccagccagaaagaaagaaagacaaggagtaagggggatttagagttatgtctcagctacacattacattgtgatactgcagctcaaattcagaatggcaatgatacatgatatcatggcctagatccttgagagggacctggctttcctttttaaaagatattttactgaagagctaaaaactggccagtgtggggttagcagatcgaataacttgaaatagaccgtgcagtattcctagcactcaatgtaatcaccctatttgtgacagagaaagggaaaaaaatataataagatcatctacctataatttgaataattttgagctatcaaaatgtctttgtaattttcacaaccgctgtccattgtttgaggatgttacctactaaactgaaaacattcattccatatctacttacacatacaccagcaacagtataaatgtaagcctaactttgcaaaattcgtaataatttagtgatggaattttttaataacatgcagtatataaatgtgcagattttatgcgtgttgacaaaatcatttttcagcttgcaaaatgggactgcaatattacattcacttaagcagttttttacatctacgttgttgctttctaaaatgaatgtgaatgccatcttttatgactgcaacttgccttttccattacagaaatttttgtttgatgtaatcaataaactttggtatgatatgattg

SEQ ID NO: 1142 - DNA, 3423 bp, Homo sapiens
aaatcagcacaggacgagtacaaccgtgggagtcacacctggagaagtctctaattcctctgggcatgaatcagacctgccgcccatgcctggggaggcagtagaatatcacagtattcaattaatacgggatgaatttttaatgaacgtgcagaaatttgcaagtaatattcaaagaaccatgcagcaacttgaaggtgagatcaagttagaaatgccaatcatcagtgtggagggagaggtgtccgacctggcagctgacccggaaaccgttgacatcttggagcagtgtgtgataaactggctgaatcagatatccacagcggttgaggcccaactgaagaagacacctcagggtaaaggccctctggctgaaattgaattctggagggaaagaaatgcaaccttaagtgcgctgcatgaacaaacaaagcttccaatagtcagaaaagtcttggatgtgatcaaggaatccgactccatgcttgtggctaatctgcagccagtgttcaccgagttattcaagttccacacggaggcctcagacaatgtgcgctttctctccaccgtggagcgttatttcaagaacataacgcacgggtctggcttccacgtggtcctggacaccatccccgccatgatgagtgccctgcggatggtgtggatcatctcccgacactacaacaaagacgagaggatgattccgctcatggagcgcatcgcctgggaaatcgctgagagagtctgccgagtggtcaacctgcggactttgttcaaagaaaatcgagcgagtgcccaaagcaaaaccttggaagccaggaacaccctcaggctgtggaaaaaggcctattttgacacccgggccaagatagaggcttcggggagggaagatcggtgggagtttgaccggaagcggctgttcgagaggacggattatatggccaccatctgccaggacctctccgacgttctgcaggttttggaggaattttataacatatttggtccagaactaaaggcagtgacgggggaccccaagcgcattgatgatgtcctatgcagagtggacggcctagtcacccccatggaaaacctgacctttgaccccttcagcatcaagtcctcccagttctggaaatatgtgatggatgaattcaagattgaagttctgattgacatcattaataaaatctttgtccagaaccttgaaaatccaccactgtataagaatcaccctccagtagcaggtgcaatatactgggaacgatctctgttctttcggattaagcataccatcctccgatttcaagaggtacaagagatactggacagtgatcgaggacaggaggtcaaacaaaaatatttggaagtaggtaggacaatgaaggagtatgaagacagaaagtatgagcagtggatggaggtgacggagcaggtgctgccagctctcatgaagaagagccttttgaccaagtcttccatcgccacagaggagccttcgactttagaaaggggagctgtttttgcaatcaacttttcaccggctctcagagagattattaatgaaacaaagtacttagagcagctggggttcactgtccctgaattagcaagaaatgttgctctccaggaagacaaattccttaggtacacagctgggatacagcgcatgttggatcattatcacatgctcataggaacgttaaacgatgcggagtctgtgcttctcaaagatcattcccaggaactgctccgagtgtttaggtcgggatataagaggttgaactggaactcactaggtatcggtgactatataactggttgcaaacaggccattgggaaatttgagtctctcgtccaccagattcataagaatgcagatgacatttcttccaggctgacattaatagaggccataaatctctttaaatatccagccgctaaaagtgaggaagaactcccaggcgtgaaggaattttttgaacacattgagcgagaaagggccagcgacgtggaccacatggtccggtggtatcttgccattggaccactgctgaccaaagttgagggcctggtcgtccacaccaacacaggcaaggcccccaagctggcctcctactacaaatactgggaaaagaaaatttatgaggtcctgacaaagctcatcctgaagaacttgcagtcttttaattctttgatccttggaaatgtccctctgttccacactgaaaccattctgacggcacctgagatcatccttcatcccaacacaaatgagatcgacaagatgtgcttccattgtgtccggaattgcgtggagatcaccaagcattttgttcgttggatgaatggcagctgcatagaatgcccacctcagaagggggaggaagaggaagttgttataataaacttttacaatgatatctctctgaaccctcagataattgaacaagctgttatgatcccccaaaatgtccacaggattctgatcaatcttatgaagtatctacaaaaatggaagcggtatcgacctctctggaaattggacaaagctattgtgatggagaaatttgctgccaagaaacctccttgtgtagcatatgatgaaaagttgcagttctattccaagatagcttatgaggttatgcgccaccctctaattaaggatgagcattgcatcagacttcagctcaggcatctggcaaacacagtgcaggaaaatgccaagtcctgggtgatttcgcttggaaaacttctcaatgagtcagcaaaagaggagctctataatctccatgaagagatggaggtactcaatcgctgtgtgtaattgaaactacttttcgtgtaagttgggtcttcatttgcgccattactgttttttctgtgtttgcttagtgttctttgtactttctgttatagcacctggccaaaaaccttaggaagatccccaatacccttgaagatctcaagtttgtccttgcaacaattgcagaaattagaagtaaatctctagtcatggaactcagatatagggacgtccaggagcgataccgtaccatggcaatgtataacctctttgtaagtcaacttgtattttcttattcatttaacaattggattgaccactaacgacccttttcagaaatgcttctcaagtatactgccattgatttgttttcaaataagtgactttaagtaatacattgtaaatgtaaagcaatgccactgttatttagaataatgaaaatatagagtatttttcaatctgtatggctcaaatggattgatctgtaactataccatttccattctcccttttcttttcttcttttttttgtgttaatttcctttaatagataaagagctcttgcaaaaatgataagaagagagtgaaagatttaagataataaaagaaactggtag

SEQ ID NO: 1143 - DNA, 3161 bp, Homo sapiens
gacgcactgcgggacatggtgatgtcctgggttggggctgaggaaggcctatgcgcggagggtgcggccttcggctaaggcagaggaccagggttgggtccgtggcggcgggaggggtggcctcctgcgctggtcgccccaggggacctgagaggcgcgacaaacagtcggcgcgtttggtactcgcgcctgcagagctttcaacctccgcgccggctgcgcctgtttctcggccaggggagcaaggccacgcggcctacgcagccgagtcggaaccaaccggttgtttggtgaaacctaccccagagcctcccgcggcccacagagcacagacagaatctccctctgtcacccaggctggagtgcagtggcatgatctcggctcactgcaacctccacctcccgggttcaagcgattcttgtgcctcagcctccggagtagctgggatttacagacgtgcactaccatgcccggcaaatttttctatttttgcaaagacaggatttcaccgttttgtccaggctggtcttgaactattgacctcaagtgatccgaccgccttgacctcccaaagtgctgggattacggggtgtgagccatcgcgcctggccactttctccaaagttttaaaccaaagccttcttcggcagagctacgacccttcctctatggcccattctatcctatgctgcttccctttataaggacactcccactgttgtgctataatcatctcttggtatctccagactctgccactctgagccctccttacagcctagaaaaaatgacagatctcgtagctgtttgggatgttgctttaagtgacggagtccacaagatcgaatttgaacatgggactacatcaggcaaacgagtagtatatgtagatggaaaggaagagataagaaaagagtggatgttcaaattagtgggcaaagaaacattctatgttggagctgcaaagacaaaagcgaccataaatatagacgctatcagtggttttgcttatgaatatactctggaaattaatgggaaaagtctcaagaagtatatggaggacagatcaaaaaccaccaatacttgggtattacacatggatggcgagaactttagaattgttttggaaaaagatgctatggacgtatggtgcaatggtaaaaaattggagacagcggtaagttgactatttgatgactctaagtgccatgtgtctcagttaccattgaattgttgctgcatttcctaattatagagatcttataatgaatcaaggccctcttgataaaaacaaaaaagggattaagtactcctgacttcagattctgaaaacctttgccagatggtgcctggtaccgtgagtttggaaacaactcatgttcttagctggcactagcttcatactctccctttcctgtcctggaccaggctccagcatagcaagtaaaatacctaaaaagagcccctagttaaaaaattatatccccagaggttggtgtcctcttgtgttgatccatttgaagtggtgcgttatcactgcttctcaaacttgcatgcacagaaattgcctggaatcttgttaaaatgctaattctaacatttccctaggtgctgctaatgctactggtccacagatcacactttaggaatgctttacaccatacactcaaagcagatggttcttttctgaaagcgagatttttgtaaaatgagtgatacaatatcagatgacacgaaggtagacgaacaggaaagggcactctcacgaaccccagaggacaagtggaattttagaccagcagtgccaatgcgaggagaaagaggctcccccagtcactgtggccaggcacactgaaatccccatctagatagactccagtgtgtttgacttttgctatcaggtgcttggattactatggctgtggatgggatgaatgtaggagtgaatttcaagcaggagtgaaacagtagtagtgtgcacaggggagagagtgggaaacagaaagtgtgggactaggagccgaaatcactgggtggtaatccccatgtcttatggggtctgtgggccaagcagggagtgctatccctgggacccacctttcatgctggctccagatgtgaacatcagggctagagataatcggaagctctcttctctggtcacattttgcatgttgtagttgcttttatctcatttgtatagtataggtttaagacagtgagaaaaggtgattttggtagttggaggaaaggaggtctgggattaattcattcagaagaccacctagaacctacttggtctgatagctgtttctgaggaggtgacaaaaccagaaatcaaaaattacaaagatgaagccacacgtggtagcacaggtctgtagtggcttcctacttgggaggctgacgtgagagggacccttgagcctaggagttttaggccagcctgagcaacatagtgagacccatctctaaaaaaattaatcaatcaattgaaatttaaaagttacaaagatgaatgcttttctgtttctgagtcctgaagaatttaatttgggctcactctaaattgagtgcttgagctgctctctgggttaaatctactgatagagacttcttttatgcagagaggcttggagagtgcttcagtattttatggccccctttggaaaaactccagttaccactaacatggatcagatacctactgtgtgcccaatgccatacctggtggttcttcctgttctttttttcctaccctggaattctctagatagggaatcagcacttttgaattgcatttcctcccatattcaagaaattctccagtgcacatgtaaagagaatgctgttttatggtattaagaatatggttgtactgggcgaggtgactcatgcatgtaatcccagcactttgggaggctgaggcgggcagattgcttgaacctaggagttagagactagtctgggtgacatggcgaaacccctctctactaaaaatacaaaaattaatagagcatggtggcacatgcttatagtcccagctactcaggaggctgaggtggaagaattacctgagcccagggagattgaggctgcagtgagccaaggttgcaccacggcactccagcctcggtaacagaatgtgagaccctgtctc

SEQ ID NO: 1144 - DNA, 3457 bp, Homo sapiens
aaagtttcatctacaatggcagttgctgggggtggcggggcatattgcattcccatttgctggtggggcaagcaaagccaaacctgcctttgcagacatgtgccagcaaagaaatatcaggagttgccatggtgtcacgggaagctgcagtatggggaagaaatgtgggctggtgcagtcataggggctgccttgctggagctcttcatgagtcaggcatgtccctccagtgcagatgctctggtatgagcttccagggtacctgagactgccctgtaagcagctgtggccagactgggtccctgggagaggccagcagaccaaggagtgctcagttggaccagcttcttctgatttgcaagaccatcctgcagaaattaggcccaacagttcccgtagggctaaagtctcttatgggagacagttgagcctagagaaatggccatcactggccacactttactacagatgctcttgcaccaaaccctctggccaccacatgagctggcttgctgcattatctctttgcttgtcttctgggggctgcatctcagagagatgtaggtcagcaattactcagtgcagccagcccaggatggaagatctttacttttggccaagttaggggtttactgtctgctgaggagcagtgggtagtttgtgggacccatggaggatgggctggcttcctctccttgggtaaactgcagtttgaggtgtgaataaggcacttagggtttgggattttttattagtctgagggtagcaaggacagttgtactgcagaggcccctggaggctctgtccagggagttgctaagctgctactggctcaatagctctggcaatgattggctagtggcccgggcctggagaacctgcctcgtgagaatatatgagaacaggcactcacgtaacagtccgaccacttctgaaggtctgctgcagtatgctgggtgtccactacagtttctagtcacctcagattttccagtactggaagttatcaccactgaatgctgcaaaacagcaacaatggcagcatgcccttttctctgggagcgccatcccagggaggtatagacctgttgccagcccaaaagcacctgtaggaggtagctggaagcccctgttgaaggtcctacccagtgaggaaaacatgattggggacccacttaagaaagcagtctagccatatttttgcaggacagctctgctattcagaggtaccacttccacccccagtttatttggattctccaaagccagaaggctggaacagctaactcacacaaacagcaaaaatggcagctcactcctccctctaggaactgtatcccaaagaggtttcaaaactccatcaaccaaagagcgctggtggtggtagctggagaccctcattgggaagtactttccagtgagaaggaatgaaacgggggacctgctttaacaggcagtctggccatgtctttttagagcacctgtactgtgctaggagatcctttccgccccccggtcagcttgggctcttcaaagcctgaaggctggaatggctaagttgctcaagcagcaaagatggtggcccactcctctttctggtagctccatcccagggaggtgcagtgctgctaccaatggttggctggaatctaagccagtaggtcttaccacgtgaggcattgttgaagtgggtcctacagaccatcactatcagccccctggattctgcctctttcctatgggtatgttcaggggtgtaacctgctttgctcgagttgcagctactttttctgggaagcctggaaagccagtatctaaggctcttgaatctgcgcaggcctaagtggcttatctgctgagactccatgtagctctgtgtgttaaactgaaggccttggtgaagtgggttcatgagggtatctcctcacctgaaggttgcagagatctgtgggagaatcatgggtttctagggtcacacatgcactcactgctttactgggtggggaggttcccttggctccatgttgttcccaggtggcccattgtcctgccttgctttactccattctccatagattgtttctttgattattcccaatgcaagtacctggatgtttcagttgcaggtgctgtatttatgtataccttgcattcctgtctatgagaactgcacagtctagctgcttctagtcagcaatctcgatcacttttctctaaagggaacctacttttttatattaaaaggattcaatatttttcaaaagcaaatttcaatgtaatttaactcttacatttgatgctgtgtcttcatttctagaatttatgtgaaagaacatggtcagtggttgcaccagagttgtgagaggttcttctatattagatggacagatttatatacttttccatggaggattaagtaaactgaaacctaagacacacgaagaaattctaagtggaaaggccacttattagttagtttacagcagtatcgtaagtgacaggatgataggagtgtggtaagtgatcaggataataatctgcttagtaagagaaacaatttgaattttagaaggaaattgccttaccatttgcaaattaaggtaattaaaatacagtgaatttcaaaatgcctttttaatgacaatgtgtgaacttaatttgttttaataaaccaaaattgttgttattgtgttaaggctattttacattgaatgtgtatcttgccactgatgttaacttatcccatcttacccaaggttgtaggtaacaatatactattgggtgacagtggactaacatctctagtgatccctttgtcagtggtctttaacttaaaataatttagagaatatggtttctacaacttacatttttgttttcttgtaactacagattattatgatggttgtaatgaagattatgagtataattggagctatatgtttctgaattctgaacaactatttataaaattttatcctacttttttctgttgaacatatgacttctctggtctgctaaacacatacagacctttagttttggtttacatggatttaaatatatagatatatcactgtaaaataaacttcaggtgtaacagatttatagagaaagtaatcatatttgtttatggttgtgtacctactttgagaagaaaagaaaaatattagaatgaacagataattttacaagtgttgatcacttaccagcaaaccagaaacttcagagattttgaaagcaaatctattttctctgctgtgtattaaattcatttatctaaaatgttattgctcctggcttagaatcatcttgtgcaaattctctttttttgttgtttgtctgtttgcctgttgctcaccatagacataattttcttttcataaaacattctttgtataatcacctcagagattatgaaagtgactttgataaaatttaatggtgttcacaaaat

SEQ ID NO: 1145 - DNA, 3519 bp, Homo sapiens
cggatcttcccggcgtggccgcgtcccgtcacgcggcgtcagaaactcgcatcttcctggtgtggccgcctcccgtcacgcagcgtcagaaactcggatcttcccggcgtggccgcgtcccgttacgcagcgtcagaaactcgatattcctggcgtggccgcctcccgtcacgcagcgtcagaaactcgatcttcctggcgtggccgcctcccgtcacgcagcgtcagaaactcgatcttcctggcgtggccgcctcccgtcacgcagcgtcagaaactcggtcttcctgccatggccacctcccatccggcggcatcagaaactcggaccttcctggtgtggccgcgtcccctcacacagcgtcagaaactcgatcttcctggcgtggccacctcccctccggcggcatcagaaactcggatcgtcctggggtggctgctcttgttacgcaacgtcagaaactctcctgcgtgggcaccaggctcagaagagtccggcttgtggtggcagggccaagctttggctcattgtgattttttgtgtgagagcttgacttgtatcctcggccacaaaccctgtcggttgttctgggagtgagggacttgggccgttcactttcacgccgtgctctgccagatcccgcgtccgcacagccagggtgggtgcactgctcgtccgtccgccattcttcctgggaaaagcagctctgctgcacgaccctggtcctccgtgtgaagcggtgcacctggtgcccactcgcgggtgtaagccgtgtgcgtgagggtgagtgtggcgggtgaagccgtgtgctcgagggtgagtgtggcagggggcgtgggcctcagctgctcccgcatctgcgcaggtgtgagcacagtgacgggcaggccgggcatgctctgcctgcgaccacatgcctggctttgactcacagaccctctgaagggtcctggggaccccgagggccttggagcccatgtcgggagcccctgccttgagtcgtggaatcaggttgtcagccagtgagggagccccagagtccattgatccacggcggggcccgtggtctctccaggtcacggaaagaagctgcgaattggagaccaattggaaattgtttaaaaggaggacagcagctcacgtgcaggcctcgctgggacagcccatcctgccagatccacgcaacgcccccagctccccacactccctggcaaatcccagccctgcctgcgccctcccagctctcctgtcctgcactacacaccatcaacccgagttctgagcttctcctactctcagcctcagcctcactcgtcctcaggaccttgctctaggccgaggagaccagtgcccctgtgcaccagctcagcctgcagccccggccctctcgcctccccaggactgcacagggcatctcccttccccactgcacggtacaggccattctttctcctgtctttaaaaaaacaaaacacagatgccctgtacgccgcccccacctcccccaccgcacatccgcctggcagcaggctccctggaagcagcccgccttacccctcctcgaggccctgggcccatggcaggcatccgcagccgtccacctgcctgcacctctgagcagcgccaggcacagctggcggccacgcaccctcctctggctgcgggacgcccgtgctcagtctcttggtctttccctcgcccatgtgggcccctcactgctcctctgctgtgtctgcaccgctccctcagagctcttctcctggcctcagctccacacacaagtgcagctgcctggtgccgaaccctgggccgctacccccctccctgactgcctgccgggttccgccaccctcagtggctcagtggccatctgtcctcaagactgaaggcggagaccttgaggtcctcctggaccccctcttaactcccagcagaatctgatagactccccagccactgcagcaacctccccatcctcttcctgcctcagctagacacgcccaaccctttctggcccccacccctgcagctcccactgcccccatcacacacaccaccacgagcccctgacacgtttgccttcctgattttcatcatcggccactgcttcccgatgaaccctccgtaagcatgggttcatttccggctgtgtcggtgatgcctggcccgtgggaggtttgcagtcactgcggcaggtggattggcatccgcaaattggataagaaagtcgcctgtttttctgagcctatttgctcctgtgaaacctgtttctaagcccaaaaatgccacctgaagactctgcaggacatcatttcatggtctgcccacaactgccaggaggcgattttcagttctttgaatgcacgttgtgactgccgtgcacccacccagcagcatcaggttcctcatattcacatagtgaccatgcagcatcaggtcacttgtccacgttgtgactcaggtcattcgtatccacattctgactgccgtccacccgtccagagtgtcagcttacttatatccacgttatgactactgtgcacccatccgctgcatcaggtcgctcgtgtccacactgggactgccgtgcacgtggccagcagcatcaggtcacttgtatccacattatgatcgctggacacccatccagcaggatcagatcattcgtatccacattgtgactactgggtccccatccagcagcgtcaggtcattcgtccccagattgtgagtcgggtcactcgtatccacattgtgactactgtgtccccatccagcagcgtcaggtcattcgttcccacattgtgagtcggatcactcgtatccgcattgtgactactgtatgtccacccagcagcgtcaggttatttgcagatgcttttacagatgcttgaacttcactacaaagccaatttgcacgagaggtaagattggtttcatgcttgtttctggcatgttcaaggtgtttttctgttttacagaggtcctcaaagagggcagcgggctgttcccagatctcctggtgagggagacggaggccgtcatccacaagcaccgctcggccacctactgcgagcagctcctgcagcatgtgcaggccgtgccagccacacagtgaccacgctggtttcagccacggcacacccttgtccccacctgagccagagtttgtggcctttaaatctcataaacaaggcacctctgtgccagcagtgagactgtgacagcaagaatgtactcctcaggacacctgcccgctctttccctggaataacagcctctgagtggattctgcatgttatgtgatttgttctgttcatcaagagggctcccaaacatctgcagctgatttgaaattaaaagtaagtcgcagccgctcctcccgcagccacttcagcagcatcttagattttaagcctcacgtgcgcagctggttcatgaactattggctgcatcctgcttaggtgcccaccaagaaggtttttacctacttaacaaaaaagaaagaagccaaagtg

SEQ ID NO: 1146 - DNA, 3428 bp, Homo sapiens
ttggagtgttgccccaagcacaggtgccctgggccagccagtcaagaatccccagtgctctccaggcaggcccagattcctctgtactcttggacaatgacagtattatcctgtgcggagtccccctgccccccagggagtgcagatgtgtttgttcagacatgcacaccagctaatcccaggacacaaacctgtaaaacccatgcactcctgtgggattgcccctgagctccacagtctctccccagccctgcttttgagagccactttgccctggtcccaggtttcaggggcccagacagttctggcttggacagtctctgtggctgaggaagtatttggggccctcacaagcttgccctctggagcttggatgcctggatccctcctgcctcccccgtcaccaactgtgctcccaagcccttcccaagcactcacttcccggtggtgttggtgctgtcctgatatcctgacccccgaggctccagcctcatccctcaccagaacacttctccctccaaaagctggcgtgtgagaccccggctatccgccaccaagaggagttgcggtctttaggggcgttgtccccacctctgcaccccagagttcttcccattcaccttttttcctgcttgcagccatgcacctagatgggcatagggttggggtgagtttgtgggagagtgagggggaggccaggggcaaggaaggtaaatgtggtggccccacaggaattgtgagagatgagatgcagccccccaaggcctttccagtctcactgtacccccaaggcagtctagtggcctcgccaaaacctgagcttctccaattccacttttaaaaccagagttaggggctgtgtgtggcacgctgggttctgagggcatccctcccgcccccccaggccagcccccagtggtgccagcagcacctgcccctcacctccacctcttggtctcgtctgaagcctcagtctgtgtgtctgtcccagggacaatctggtctcctcctgtgtgctgtggctggcatggcctcagtgtctgagggcttgtcctgggaggggtatcaagaatccaattctcacctggttgtaggacctcttgggggatgctaggagggcgccctggcacagccagggattgcctagggctgaggggcccaggagaagctacttctctcccagaaaggggctccctcctgcatctgcagtcggatgcccagaccgcccactctggacagcccacaatgcctcctccgtcctgccatgcccattcgcatgtgtcttgtccatctccgctcctgtgatgtgggtcagtcctttgtggtgccgcgtccagggctgcagggtcccacgtcagtgagcagtgggtggccggtggagggggtggtggtggccgggctcccttcctgcccatggcacctagaacagcagtgaggtctcagagaagcccccgcctgggctccctgggagctaaccttgcagcctctgggttatctttggcaaaggggtctaaagtcccctatccccagcccctctacttcccctgctgggcagcagtggctgcccagtgagtggtgctatccatggaggggggagggagctgggcagcgctgactaggcggcgggtggggctaagagagtttctgcagggacccagctgcagggtcagcagcctgtgggccctgagtggggtctttgttgtcctcaggtgggctgtgggggaagtagcggagaaatgaagtgacgccaggggccaggcatgggtgttcttttccgtgttgttcacattttctctctttctctctctctccactaatcatgtttctctctctctcctcgttttgttgcatgacttgtgccggttctcgtgattgttccctgctcgtgtctcacagactgtccccatttagcctgagacttttttcctgagtccccagctgggcagatccctcagggctaaacccaaggaaatgcccagcaacccccaacccaccccagccccgcgtgcgcccctccggtgcccgcagctggtgtgaacagtaagtactttggcggtgcctggagaccagggcagaaaagccagctgtgctgactgagggcccagcctcgggttctccttgctccaaagtttaaaaaaaaatgaccctctcgcagatgctcatctcagcccatttcaagcctggaaaccatctctgagacgctgcccatgctgccatttcatcactgcaggcctgtgggtctagtgggggcctgggggccctgggctgggggaggcagggcccccagcctctggaaagcaggtgggaatggaggctcctagccactatctcatccaaaggatggggcaggggcgggggctcacacctttgaccctattcatgggttccccagatttatacagttggcccctcgttggtttctctttcttcaagccacccctctggagttggggagggagaatgccccagtttctgaaagcatcttaaaccatagatagacgaacagcccaggggcctgggccccttcacagagcaagacttaagcttccccacccaatcattagtccctcctcaaaggttagggttgagagaagcagtaggccctaggggtgtcccgggaatcccccaggagggaaaggtgccaggctatcatccctccagggatccctgatggatgttccttgtcccctgcccaaaaccatcccgaactttgggccctttagtgattgtgagagctgggagcccccagggcctgggggcttgtggacagaaccagtgggcgggggcccagcattcagagccagagaagggtctcaggcggcaccatctccacagaggcagaggcagagagaaggcacccccctctgacccacccctccccaggcaagaactgcaggctgtggacacctcccctggcagaggatggccaacagagactcagcaagtcctcactcccctcccagaaggagacgctgcctgggaggacccactgttctccccttgaggaaaatccatgcagggtgctatgggcctcaacccccacatcgtcatccgcgtcctctccatactgtttccctcccctctcccaacaccctcctccctcagcccggagacccttggatggaagactgggccagccagagtgggaggcaggaccagcgtgtctgcgagcacacgtgtgtgcctgcagacatgccccaagaccccagagacgccccggccccagtcacatggtgtcagagttaccttggcaactggcctttttggttcagagtaaattgggaagtgaagcccctgggatttgtcgagaaacgcactgtacgtgaaatgctttgccatcttgtacgaaagactttttttttaagttccaaaattatgatgggatttttttggatttgctttacgaataaatctgattggtccatttc

SEQ ID NO: 1147 - DNA, 3217 bp, Homo sapiens
aagacaccggtgaggggcgaggaaccagtgttcatggtgacagggcgacgggaggacgtggccacagcccggcgggaaatcatctcagcagcggagcacttctccatgatccgtgcctcccgcaacaagtcaggcgccgcctttggtgtggctcctgctctgcccggccaggtgaccatccgtgtgcgggtgccctaccgcgtggtggggctggtggtgggccccaaaggggcaaccatcaagcgcatccagcagcaaaccaacacatacattatcacaccaagccgtgaccgcgaccccgtgttcgagatcacgggtgccccaggcaacgtggagcgtgcgcgcgaggagatcgagacgcacatcgcggtgcgcactggcaagatcctcgagtacaacaatgaaaacgacttcctggcggggagccccgacgcagcaatcgatagccgctactccgacgcctggcgggtgcaccagcccggctgcaagcccctctccaccttccggcagaacagcctgggctgcatcggcgagtgcggagtggactctggctttgaggccccacgcctgggtgagcagggcggggactttggctacggcgggtacctctttccgggctatggcgtgggcaagcaggatgtgtactacggcgtggccgagactagccccccgctgtgggcgggccaggagaacgccacgcccacctccgtgctcttctcctctgcctcctcctcctcctcctcttccgccaaggcccgcgctgggcccccgggcgcacaccgctcccctgccacttccgcgggacccgagctggccggactcccgaggcgccccccgggagagccgctccagggcttctctaaacttggtgggggcggcctgcggagccccggcggcgggcgggattgcatggtctgctttgagagcgaagtgactgccgcccttgtgccctgcggacacaacctgttctgcatggagtgtgcagtacgcatctgcgagaggacggacccagagtgtcccgtctgccacatcacagccacgcaagccatccgaatattctcctaagccccgtgccccatgcctccggggcccactccactgggcccaccctggacctgttttccactaaagccttttggaaagcggtgatttgaggggcaaggtgcttagagatactcgctcgctggggaaggggggagggaggcagtggtggctggagggtgcgccactttcagagcctctggtcaccctgtcctggaaagattgggagggggccagactgaaaattttactagagttacaactctgatacctcaacacacccttaaatctggaagcagctaagagaaacttttgttttgccagaggtggccactaaggcattctgacgccctctgcccacctcccccgctgtgtgtcactccaccccttcttccgaggagggggtgggtaaaagggagagggagaattaccacctgtatctagaggtgctctttgcaatccctaagccctctggtcctgacctccgacctcctaacatgaccctttacctcccaccccacccccatatcctgtttgggaaactgtcaccagtttccagcagtgtaagggagttggagtcctatcagaagttgcatagatcttctaggggttggggagagaagcatgtcaatcgtttctgtggctgaaaggctcagaagccatctgtccccacaaagctgggctagaggaatctggagaggagtcctcctctctgcccctgtcccccgcagtgtttcccttcactctctccgcctatcttcccttcctttgggatcttccctttcctcaactctttcctttccctccagctctttgctttgctttcttttggtggctgtcactcccagctctgtcttgttccttgtctttgtctttcttcccttccccctgcccctgcccctaccagcccagctttggggacaccatccttctggggagaagtagggggaggaatatttggatggtccctccattcctcttcaggcatctggaggccctctcccccactcctccaaagaaacatctcaaattattgatggaatgtatccccattctcagtgaaaatgtgaggaggggactaatactggggtaaagggtcaaacccccaccttcatcactatgggcattatatttagggagtagttcttgggctggattttctggttgtggaagtgggggcgccagagtagtgtgtctgctatttaaaggagcaggaaagggcgtgaggcaggaggagagactggtggagggaagagctgctcctcccatgcagtgcccgactccctgcacccctctcaacctgacctgaacctttattgaatccttattagcttgaatccttattagcttgaatcctccatgcaaatcatggagtctgtgtcccacctgatgtggttgaggagaagccaggtcttcaaagaggggtcagcctggggcaaagcaggactggggggaggtgggcagcagggcctattctgagaatcacatattgttacaggccttgcaccccctttgctgcttccctcctgctcatttggggctgccaccagctctccaccctcctggttccgctggccgggccaagagaggatggagggatgggagtcccaggagatccttgtaaatagtggggtgggactgttctgagtgatcacccgagcacttaaagctccagagtcccattcttcctggatggagcaggtggaggtgcagaggggatttcctcctctccttcctcctgtcgagaattaacacctctccacagccttcccctccagaacaccagccagggaggggtggggaaggaggtcacagccaagaaaactgccctgtgacgacttccctccttcccgcctatgtgagccatcctgagatgtctgtacaatagaaaccaaaccaaatgggcaccctcggttgccggggggcaggtggggaggggggtgggaagaagggatgtctgtctgtcgtccccctccccctctccactctttacccacaaaggcagaagactgttacactagggggctcagcaaattcaatcccacccttaccaattgagccaaacctagaaacaaacacaaaacacgaatagtgagagacaaaatagaggagagaaagagagcatgagagggagcgagacaggcgaccaacacagaggagagaaaacaaaaatagc

SEQ ID NO: 1148 - DNA, 3304 bp, Homo sapiens
cttttgggaaatacgtccatcaagatttagatctgcctgtaaaatctatacaaagtatatgccactacaggtttgactcgccccctcccccgtttttttgttttgttttgttttgttttgttttgttttgtgttttctctgctgtgtcaaagaacaagacagaactatctctgtttctggctccactgcctgccagtgaaggagttttcattcagactttccgaagagaggtggagaaacctaaagactgaggagaagagatcctttgagccagatggggcattagttcttctgcttttctcagcatggataaaccatttcctcaaggattttctcatgtgccctgaaatccatgtaactacaagggctcctctttatcaccataagtgccaccctgacttaaaaccactcagagctaaaaaatcaaggcaaaatggatgctgcggtgacagatgattttcaacaaattctgcctattgaacagctgcgctctactcatgctagcaatgactacgtggaacggcctccagccccctgtaaacaggccctctccagcccttcccttattgtgcaaacccacaagtctgattggtctctggctaccatgcctacttctctcccccgcagtctcagccagtgccatcaactgcagcccttgcctcagcatctgagccaatctagcattgccagctcaatgtcccatagcaccactgcctcttctaccactgctccactgatgatgaagacaactgtgctgatgagccctgctcttgtgggcctagttcttgctttgtccgctgggcagccatgagcctcatctccctcttcctaccctgcctgtgctgctacctgcctacccgtggatgcctccatctgtgccaacagggctatgatagcctccggcgaccaggctgccgctgcaagaggcacaccaacactgtgtgcagaaagatctcttctggtagtgcacccttccccaaggcccaggaaaagtctgtatgaccttccaacaaggtggatccagagcttttctccttcgagtccccaacagcaaagcataggcctcatctttggagagggggaggagtgataaactagccaaagttagggcctctcttttgttcctgcagtgtcaggggaatgaccaagtacatcctggtgcaggatgccttgttctttctcacagtatctatcccactcctcttcagtctttacaccctgccagctcagcctttatggttgtcatggcaaattcaggtgatatatgggtatgaggtttgaacactgaggactgacagggccagcaacgtggaggtttaggggctccccaatgtaatacctctcgatgcaggctctgatcgtcactctgttttctgctgtgcctttggaagctttcttctaagatggttttcacaggtacatgtggaacagcgttcaaccttccagggaatacgaccccttctccctgttactgcccttctcttctttattcctctctcctctttcattattctgttctgtattcctttccccttcattctcaccctgtctgcttttactttttctctttcttcctccctttctccttctcccctccttctttttcagactgatcctttctctgcctgtatttctatctcatttgatctatatttgtctctctctacctgtccctttttctctaacatgtccaaaagtgctgtttttccatagatgtttccttagatgccaaactttgctatgctatactatttactaatttttattaagggaaatggattactgtaatgaactgatcactagcaatagtgtgtatcccgatgtgtgtgtgtgctcacaaccactctcacctgtttgtgagcgcatgaggcgaagttatcttatatttccaggtttaactagttggagtttttctccctttctcaataatcaacttatagtgctgacagattccactagcatgctgagtaggatagtaaatcaggatgctcataactttgtatgtctgacccaagtgccaaaggcagacgtgctttatagctaaatgaacaaagcaaaggatacagaggtatgttctctcttagaagctaacttccctgagactgcatggctcaggcgttaataatggacataaaaagtcataaaacgttagagctggaaggaatcttaactattaatctagttcaatgcccttattttacagatgggaaaactgaggcctggaggtaggaagggacttgcccccaaggccgcacactgagttaacagcagaattgagactggaatataggccttctgactcccagttcagtattcttacccctgtaccacattgagtcatgggactttttcctagggctctattaacagcgacagaaagccattcccattcaattacttttcaggaaccatgcctagttagtgtggtggtctttctccagtgcatggtgggtagctaattaactatcaggtgttgaggctgcccccagtggacatcacctttggctctgtcaccttgtagaagctcaagtgtggaaaagaaaagcttaaagaagccctaaccaagctgtatcttcgccattgcatctactctttgctgcacacactgtgcttgctcctggctttgtctgcaatggcagctgcctgagaacttaaatttcagcaacagtgaaaaactgagatgaaagatgtataatgtagagaactgacttctctcttaaaaagtacagagagcctgtgctgtgaacccccttcaatgggaaaaagctgcagtggtgatggcaggctcctaaagactgctgctaaaagacacaagaattatacagtttccctctataagtgaatccaaaattcactgacgaattcagagattgagggcacttgcttgaaatcaaggtgctccaacttagtttaagacctccagactctaactttatagatcatctcttctagagtgtgcatggatgtgtgttgcagggtggagaagtggggagaagtgtatagtagtacacggggggaagaggggacctccatgtccctttgttggatacatattacagaaatatgtgccactcactttttgttggttctgaatcttcctgaagtgtactgacatttgggctgcacagagccccacaccttcacttacacctcctcttctagaattgctttgctctatttttgtatatataaatatgttatgatgattattaataatgttaatgatattgctgcaaatggtgccatatataaggttaggcttcttggaacatttataaacccaaaccaatacctgtaacctctt

SEQ ID NO: 1149 - DNA, 2434 bp, Homo sapiens
gcaaagtgcgcagccacaggcggctggtgcagacttggagtgtgggggagcagcgctttagctcgagagcatttctcagcagtccccgtggtgtctgggaagccagggctctgttttgaggagtgtcgtcagagcatcaacaccaaagtgcttaattaaatggcagccttgacctgagggggaggaggggctgaacatccgcctccgactgcatttcacaagcaaaagaacacggtgagtgtgtttccatggtaaccgctctcgggttcccatttccacattggtcagcccggacttggatccaaactacccatccctggcccaagcctccatggaggtaagttaccagccctgctttgggccaacgcagtttttggggacctcaaccatgtgttcagcccagggccaaggcttcgggctgagccagctctcccagcctctctctcttctcagtgtcgccccctcccacggctctggctggctcctctgcggagctccatggcttttccagcgtctgccctctctgctggctgccaagtgcctccacacgccggccatgctctgcgcacctccaaccctccacatccacccttcccctctttcagacctccccaggtctaccttgggcaacaccctttgcccccggagggtcacagattcttgttgaagaaccacaggcattgtccctgtgtcccaagtaccagcccagggcctggcacaagatagatgtacaataagtaagtcacacccacaaccccaaggacactgggaaccttccagaaccacagcctgatgtcatttaaatgatcgtgggggagcggggtaaagagggacgtggtttgctaggtgactgctgcgtgcttatccgacaatggtttggtcaacaagattgctgacaggcctgtttttgaaaatccgagtcacgttatgcttacaaatgtttgctgctagagatctggcacgacagtgacgggtcagctgagtcggagacggaaaacctgttggtctgcgcaccgtttttgcagctgcccggcagactggaggcctctccccaaccctgctcaccctgaaggaggttctcggtcccttttgacctcacactgggcagtggaaggggaatcgctagttcttcatccctggttcagttactttccctcttctgaacaaattgggtccacaaaccccagtggcagtcacagccccacatcagcagtggggagccctaggctccctcgtctatgtcgggctattgtcactcctgtacgcgggaacactggcatatctactaaagggcacagagaaacgctgtcatgtatatattagtgtgacatgtgtgtgcgtatatatttgtgtatgtgtatatatacatatatttgtgtgtataatatgtgtctatatgtgtacaggtgtgtttgtatatgtgtgtatatacatacatttgtgagtacaggtgtatatatgtgtgtatatatattcatgtatttgtgtatgtgtgttatatatacttgtatgtgtatgtgtgtgttatatatatacatgtatgtgtatgtgtatgtgtgttatatatacatgtatgtgtatatgtgtgtgtgtatgcactaagacggcaaaactgcccagaagaaggttggtacctgggctttccatcaccctcactgtgccacttggtccccaacagggccaatggtccatctcttcaaactgaagctgagagtccaggtctaggcagaggagacagggggactgggcaaccccagtgggggacgggggacccaggacttcacccaaacacaggtaccagagacaggtgccatgagctccttctgctggagccctcagcacaggggagtggtctatacccttaaccttctctgcaatgtccagggtgcaagttcaaattccagaatcctttagaaacttacccccacatgtactagccttgtgacccagcccagagtcctgaatgtctctaagcctcagtttcctcatccacaaaatgggtcaaatacttacctcataaagtggttgggaggattacatgaaaaagaaatgagatctgaagggttggctgatgggaatcattgctgatttttgacccccaacacctctccagtgaaactgccctcaggggtccacaggggcctcctaattgccaaagccaacagcatcttctccatgcccactggtggcgtttcacgccattatcaattctgccctccttgaacctctcccttcccacggcacccagggcatggtgccatcttggttctcagagcactgatcccgccttctactttctccccggctcttccaccccctctgtctccacacacacactccccagggttccacctcatcctctcctttcccctgacactctctccctgggagatctcagctaccaccacagaacactgacgcaccagccccagcc

SEQ ID NO: 1150 - DNA, 2155 bp, Homo sapiens
gcttttgcagttgcttctgcggaaaggtggtagttaagaatttgtaaaggccagagaactacctacgattctctcagcgggtaattggctgctcctagtctctcttctcctcaagtttgaaatgctttatctcatcgggttgggcctgggagatgccaaggacatcacagtcaagggcctggaagttgttagacgctgcagtcgagtgtatctggaagcctacacctcagtcctaactgtagggaaggaagccttgggatagagaagttaacaaacttgcctaagttcatgcagatagtgaatgatagagccaggagatgaaccaaagcagtcctgagttgaagtctgccactctttttattattattattatttattatgtttttttattttgagacggagtcttgctatgttgcctaggctggaatgcagtggtgcgatctcggccccctgcaacctctgcctctcgggttcaagcaattcttctgtcacagccttctgagtagctgggattacaggcgtgtgccattgcgcccggctaatttttgtatttttagtaggatgagatttcaccatgttggccaggctggtctcgaactcctgacctcaggtgatccacctgcctcggcctccaaagtgctgtgattacaggaagagttttatggaagaaaattggttgttgctgatagagaagaagtggaacaagaagcagataatattttaaaggatgctgatatcagtgatgttgcattccttgtggttggtgatccatttggggccacaacacacagtgatcttgttctaagagcaacaaagctgggaattccttatagagttattcacaatgcctccataatgaatgctgtaggctgctgtggtttacagttatataagtttggagagacagtttctattgttttttggacagacacttggagaccagaaagcttctttgacaaagtgaagaagaacagacaaaatggcatgcacacattatgtttactagacatcaaagtaaaggagcagtctttggaaaatctaatcaagggaaggaagatctatgaacctccacggtatatgagtgtaaaccaagcagcccagcagcttctggagattgttcaaaatcaaagaatacgaggagaagaaccagcagttaccgaggagacactttgtgttggcttagccagggttggagccgacgaccagaaaattgcagcaggcactttaaggcaaatgtgcactgtggacttgggagaaccattgcattccttgatcatcacaggaggcagcatacatccaatggagatggagatgctaagtctgttttccataccagaaaatagctcagaatctcaaagcatcaatggactttgaacatagatatttaccattgtctgatgtaaatttcagccatatatggattgatatggtttggatgtatccccacccaagtctcatcttgaattttaatcctcataattcccaggtgttgtggtaggtaattgaatcatgggggcagtttccctcatgctattctcatgatagtgagctttcatgagatctgatggttttataagtgcctggcatttcccctactggctctcattctcactcttgccgccctgtgaagaggtgccttccaccgtgattgttaagtttcctgaggccttcccagccatgtggaactgtgagtcgaaaattaaacctcttttataattacccagtctcgggtatttcttcatagcagtgtgagaatggattaatacctggatgcatgcatgtttgtgtaacaaacaggtcttttggcttatctagtaagtataaaacaagtgaccaaaaagaagttgactcaacaatgcttggtttcttgtggcagtgagttttttccctatgatatcatcagttgttgctgctattttggcaaattttcaggatgtacacataaagcagaccaggctggaaagcttgtggatagacatccactgacagaatcatttaagagcagtttttatttatgaaaccaatttatacaaggtggttgttaacagaatataacttagaggtaactggaatttgaatcacttgaatctgttttaaagggtaaaaaatgttatgagtgccaagaaaagcaaataaaagattagtaaatgttcac

SEQ ID NO: 1151 - DNA, 3466 bp, Homo sapiens
tttttctcaccattgaagatgtaccgaacaataaccatctttcatactgcccgtgtgcatgtaggttcagttcttttatgtctcagctatctattgaaattttactgatttttttaagctatttgaggactgaggtgttttgttcgtaataaaattgaggaaggacattgtataagaagtaaactgtcctagggagcattgattcttgaagcgtggtcctcagataaacagcatcagcgtctcttgggatcctgtaaacatgcatgtgtttgggtcccactccagacctaccgaatcagaagcctgggagtccagtacagaaatatgcatttaaccagccccccagttttaagaaccccctgctgtagcggtcacagggtttctcagcagtggcacattgacacttgggccagagaattctttgccgctgggggcgggggcggtcctgtgtgctgtaggctgctctgcggcagcttcagcctctgcccgctcattgaagcacctctcccctggctacaaccaaaaatgtcaccagacattgccaaatgccctggggctggggctaggggcacaatgtctccccttactcatcttgaaaaccactgctataaaagaactgggacagctaaagaagccatcatctccaggaaatcctgttgcaggttttccctgaataagggagttagtatcctgaggaatcctccaaaagactgttggcctagtctctcttgatacaggagtttaggagaaatcctaatgcattcagctttcactgtataaaatagttcagatatttcatctccacaaaacttacataaaatcacagagaaaattaagatggtatgggtatgaggggttaccctgaaactgaatctgttttccaactattccagctcttacagacttacctgtaagtaatgtgaattcatatatttcaaagcctgatttcagttttacattgcaattgtagttagagtttcaaaatttcttgttcatactaccaattttgctgtatttctctttagtataagcatattaaaagggaaaaaagcatgtactagcctgcactccgaagtcaagactttagtaaaattaggacgttggtcttgattaacttaattggattgctgaaatctctactgctgattggtaaaaacggcagttagttaattcagcactttcatattgttaaaggagtttgccgcaaaattctcactagcttttaacattttcagaattaataacagtaactttcaaactagaaaaatatctaatattcattgagttcacagatttcaaatatgtttatactgtaagaattagagcatttcattaaaaagttggtattctattggttatcaaattagtaaggaaacatagatcattgaaatattacaaaggcatcatttaatcagtaatttttactacatctcttccaaaaactagaaccagaagtcctgacacctgatttcccatcactagcaattttcctgattcacccacccaggagacaagatttgaatgagcagtaaaaatggccaaagatgagatgaccaaaaaaacagtgataggtctcaaacacagccagagatcaatcaggtgctgctttgattctactagtggttcttaaataaaagtattatattttctacgtcagtggagcatacatacattgtattggtcttctatgctaatatgtgaagtgaattctacctttgaccttagaatgtatatagatatgatcaagtctttttagtcaactgtcatttgataaaaacaattaagatttagttaattgttgaattaaatggacttaagatattagataagtgggtaattcagagagtaatttttacattttatttagaaaaccttaagtactcaagttgaccaggaggcaccaagtggtataaatacagccagatgtaccagatattcctggagagccctacatttaaatattattctctttcattgtaccagcaattatattaatatatgtcaaaccatttgaccagatttctagtacaaaaatacaatcatgctattttgaaatgaaaagggggctggatttggagccagggtccaggttgtagctctgccgcttgtgacttggtcaagtcagatacctctctgagcctcagtttccacacttctaaatgaaaaataaatcccagtgggtgatgctgcctgttgcgtcatccatgtcatgggttattgtgaggataaaacaatgccgtattctaaagcatttttgcagcagtaaaatggctctgtcttctacaggatacattctacttttaggggtaaattgcatggtattagttaattacatattcctaacggattgtgaactttctcatggttggcattcttgtcatgtcaaaataatgttttgccaggtattatcatcacatacaatagcatttctattggagcaaaataaaaagttcattttttaaagttggcgatacctcacatcctaattagcttcagctgaagataatttcagaaactttccaggcgctagttcccttgtattaggagggttgctgcagaggtgaaatagttgtatattccagtagctatgtttatttagttcacacattatatgcagtttatctttttttcatttaatcttagtgatagttgtgggtgtaggggtggattttgtttttgttttgttttgtttttaatttcagttctggccaggaatgatggatgaactctccgagttgagagaattctatgatccagatacagtggagctgatgaactggattaagtaagaggattttttttaacttttaaaattttaagtgccttttaagagtcactatagaccacatttcgttttgggggttttttgtttgtttctgaatctaattacgaagaaacattcgtccttactagatttttctttaaaactccatatttgaaaataatgtctttctatttaagaaatattctctccagctatatctcatgaagaaaggaaaatacccatttggagaggaaaaccgattcaataaataaatttcaaaccactgacagaaatggcaataaaagtttataatatctgttgaaacttaaaatttgatgtctctgccaattttatgtttattattttcattttaataccattctgattttccactaatggtgacacttgaaagtattctttctggccgggctcaatggctcacgcctgtaatcccagcactttgggaggctgaggtgggctgatcacccgaggtcaggagttcaagactagcctggccaacatgatgaaaccccgtctgtctctactaaaaatacaaaaattagccaggcatggtggcaggtgcctcctagctactcaggaggctgaggcaggaaaatcacttgaactcgggaggtagaggttgcagtgagtcaagatcgcgctactacacttcatcctgggcgacagagcaagactctctct

SEQ ID NO: 1152 - DNA, 2177 bp, Homo sapiens
agtgcaatggggcgatctctgctcactgcaacctctgcctcccagattcaagcgattctcctgcctcagcctcccaagttgctgggattacagacatttaccaccacacctggctgattttgtatttttagtagagatggggtttcaccatgttggtcaggctggttcagactcctgacctcaagtgatcctttttaaggttgaatagtatccattgtttgtatatacatacacattttgttaatccattaatttggacttttgggttgcttccacttagccacataggactctggactgggttgccggatggttcctttttcttatttttggttctatgtagcatttctccttatatcaccatgggcagcatcagtgattacaagaaaaatgctaagtcccagctatggatttcaggcctctacacttctgcttactggtgtgggcaggcactagtggacgtcagcttcttcattttaattctccttttaatgtatttaattttctacatagaaaacatgcagtaccttcttattacaagccaaattgtgtttgctttggttatagttactcctggttatgcagcttctcttgtcttcttcatatatatgatatcatttatttttcgcaaaaggagaaaaaaacagtggcctttggtcattttacttcttttttgcctccaccatcatgttttccatcactttaatcaatcattttgacctaagtatattgattaccaccatggtattggttccttcatataccttgcttggatttaaaacttttttggaagtgagagaccaggagcactacagagaatttccagaggcaaattttgaattgagtgccactgattttctagtctgcttcataccctactttcagactttgctattcgtttttgttctaagatgcatggaactaaaatgtggaaagaaaagaatgcgaaaagatcctgttttcagaatttccccccaaagtagagatgctaagccaaatccagaagaacccatagatgaagatgaagatattcaaacagaaagaataagaacagccactgctctgaccacttcaatcttagatgagaaacctgttataattgccagctgtctacacaaagaatatgcaggccagaagaaaagttgcttttcaaagaggaagaagaaaatagcagcaagaaatatctctttctgtgttcaagaaggtgaaattttgggattgctaggacccaatggtgctggaaaaagttcatctattagaatgatatctgggatcacaaagccaactgctggagaggtggaactgaaaggctgcagttcagttttgggccacctggggtactgccctcaagagaacgtgctgtggcccatgctgacgttgagggaacacctggaggtgtatgctgccgtcaaggggctcaggaaagcggacgcgaggctcgccatcgcaagattagtgagtgctttcaaactgcatgagcagctgaatgttcctgtgcagaaattaacagcaggaatcacgagaaagttgtgttttgtgctgagcctcctgggaaactcacctgtcttgctcctggatgaaccatctacgggcatagaccccacagggcagcagcaaatgtggcaggcaatccaggcagtcgttaaaaacacagagagaggtgtcctcctgaccacccataacctggctgaggcggaagccttgtgtgaccgtgtggccatcatggtgtctggaaggcttagatgcattggctccatccaacacctgaaaaacaaacttggcaaggattacattctagagctaaaagtgaaggaaacgtctcaagtgactttggtccacactgagattctgaagcttttcccacaggctgcagggcaggaaaggtattcctctttgttaacctataagctgcccgtggcagacgtttaccctctatcacagacctttcacaaattagaagcagtgaagcataactttaacctgggagaatacagcctttctcagtgcacactggagaaggtattcttagagctttctaaagaacaggaagtaggaaattttgatgaagaaattgatacaacaatgagatggaaactcctccctcattcagatgaaccttaaaacctcaaacctagtaattttttgttgatctcctataaactcatgttttatgtaat

SEQ ID NO: 1153 - DNA, 2371 bp, Homo sapiens
attttttggagctgataaaccaatgagaagaaaggtttgttgctctaggcggtgggtgagggcatcatagctgactcttggtcttggtcactttcggaggagatggtttatttaacctgacttccttcctgatgcgcaccgtaggcgcagtgaaatccgggaatcgtggggaatccttggcgctgtgggtggaggctcctcttggccctgtggccaaggtgaccaagggccgaaggaaaagcgagaacgggagggacgggacgcaagagggcagatggggaaccccatactccagcaacattatataagagaggcgacgatggagcagggcacccggccaaaaaagcctccgtgcgcctactctacggtgcaccgcgtcccctctgcaccagaagggccctgtcctcccacatccaccgcgccctcctccgggcccccgagggcactggggcgcttcctctgccagacctcccctgcgactcactcttccggctccagagcccccccgccccaacagcaaagcagccgtgacctgccccaggggcgcagccctgccccaggctggaaggcagcagagctgtggcgtcgaggcacccagcggactgcggggcgggcgtgcccgcggttacctgcgcggccagagggctccgcgagatcgaagaaccagaagagcagcatgaggagccccgccgggcggcgaggggtcgcccagcctgtcctcatcctgagctggcgcaagccttccggccgggtcctcgggcgcacgcggctcccgccccgcctgctgagcgcggcctgccccgcccgcacctctgtctaggcctctgggggcgccccggccccgcccccgccgccctcggccaatcagacgtgcgtctcctcggccccggggcggagcgggccaggtgtgggaaatgaacagggctgggcgctagatacctgcgtggggtaggacccgcgaggaagaggtacgtgcggatcggtgggagagccaggcaccagacaggctcctgcactggagggttcggtccccgcctcttcatcagccaagctggggagatgcggcccttactgggacttggcaccgccctggtgggtgggttctatcagtttagaaccttggcctctgcctggcgcactgtggtcagggacgacttctccattccagcctggactggaaagggacccatgatctcttctaccccggaggaggaagtgagcacctgccctgtgggtggctgcggccaagcctaagaattcagtcgtccttggcaacgtcttgggtattttgacagtgcaaacaaaggtggaataatggtacactgcagttctacccatagttgttaaagaattaaaagcaagaattactagaatgaccaaacgacacttccaaggatgacttatgctttataaaaagttgacctttgcgagtaagctctttgcttaataatttaatgataataataattagctggtagaaatgtagaagtctgcatgcagaaccagaaatttcatgtcccactcactctcttcctgtggacactgctatcattataaagaggccaaattcttaatgacctaagttgctcaaatgtgaatgttttatacttttaaatctcgtctttgctgagcacataatgtgtacttgaggtggcctccatccttgttgcatgaggatgcaaagacctaggttgctcttcctgactcccactgccaaggtttcacagttggctcccaaacctgctctgtcctctccccagggtctggcctttcagttccatagatatagtgagcacctgccatcacaggatctgggcacgccatggaacagaaggacaaaaagacaacatctctgccctcccctgaatactggggagactgaggcactgtgatggataatattgtcagctcgattgatatgaacgaatgcaaagtattgttcctgggtgtgtctgtgagggtgttgccaaggagattaacagtggactgggagaggcggaccagccctcagtctgggtgggcaccatctcatcagctgccagcatggctagaataaaagcaggcagaagttggaaggacttgactggctgagtctcctggccttcacctttctcccgtgctagatgcttcctaccctcgaacatcggactccaggttcttcagcttttggactcttagacctataaaagtggtttgtcaggggatctctggccttcggccacagactgaaggctgcactgttggcttccctacttctgaggttttggaactcggactggcttctttgttcctcagcttgcagacagcctattgtgggacttcaccttgtgatcatatgagtcaatactccttaataaactccctttcatat

SEQ ID NO: 1154 - DNA, 1930 bp, Homo sapiens
attcaacttcctgcctgccagccccagtgtgtggttcccagcctgacaaccttggcaccccagcaccccagcaggaggggtttctgcttgtggtcccctggccaccagcctcggccagctggttgtggaccagccgtgacctggggcaacccagccaacctcaccgtccaatgggctgcagccacctctctccagtgaggtctgagacccagccttaacgaggctacccccttccagggtctctctgtgttactcaggctggagtgcagtggcgtgatttctgctcactgcagccttgacctcccagcaggctcaagcaatcctcctgcctcatcctcccgagtagctgggactacaggcatgtgccaccacgcccagctaagatcttttttaaaatgcttaatccagaagtcattacaaacaaatactagatcttatttattctatctaactatatctctgtacccattaaccattctgccttccctgcctccattacccttcccaatctctggtaaacatccttctactctctgtctccaggagttcaactgtttttcatttttggctcccacaaataagtgaaaacttttgaagcttgtctctgtgcccaccttatttcacttagcatcatgacctcgagttccattcatgttgtcacatatgacaggatctcattcttttttatggctgaatagtactccattatatatatgtaccacattttctttatccattcatctgtttgttggggtttttttctgtttttgttttgagatggagtctccacctgtcgcacaggctggagtgcagtggcatgatctcggctcactgcaacctctgtccacctcccagggtcaagcgattctcctgcctcagcctcccgagtagctgggattacaggcgcctgccaccaggcccggctaatttttgtatttttagtagagatggagtttcaccatgttggccaggctggtctcgaactccttacctcaagtgatctgcctgcctcagcctcccaaagtgctgggattacaggcatgagccactgcgcctggacaatttttacttttttttttgagacggagtcttgctctgtcacccagactgaagtgcagtggcgccgtcttggctcactgcaagctccgcttcccgggttcacgccattctcctgcctcagcctcccgaatagctgggactacaggcgcccaccaccattcctggctaatttttttgtatttttagtagcgatgggttttcaccatgttagccaggatggtctcgatatcctgacctcgtgatctgcctgcctcggcctcccaaagggctgggattacaggcgtgagccactgtgcccagccaatttttactatttttatatttccaaaagctttgaactaattttactacttatgtgcaaattcttttttttttttgagacagagtttcactcttgttgcccaggctggagtgcaatggcacgatctcggctcatcgcaacctctgtgtcccaggttcaagcgattctcctgcctcagcctcccgagtagctgggattacaggcatgcgccaccatgcccagctaattttgtatttttagtagagatggggtttatccatgttgctcaggctggtcttgaactcctgacctcgggtgatctgcccacctcggcctaccaaagtgctgggattacaggtgtgagccaccatgcctgggcttcaaattctttattttgaaacaatttcaaatgtacagagatgttaaaaggctagcgtttccaggaaagtctagaacgtcaggataacatttacccagattcaccagttgttaatattttgccacatttgcattttctctttctgtgtgtatattatacatatatatgtgtgtgtatgtgtatatatatatatatatatatgctttttttgg

SEQ ID NO: 1155 - DNA, 2295 bp, Homo sapiens
ttttataccaaagccaataaatgaactgcatatgataggtatgaagtacagtgagaaaattaacacctgtgagctcattgtcctaccacagcactagagtgggggccgccaaactcccatggccaaacctggtgcaccatttgcctttgtttgtctgttggtttgcttgagacagtcttgctctgtttcccaggctggaatggagtggctattcacaggcacaatcatagcacactttagccttaaactcctgggctcaagtgatccacccgcctcagtctcccaagtagctgggattacaggtgcaaacctggcatgcctgccattgtttggcttatgatctaaggatagctttttaaattttattcattttatttttttttgagacagtgtctcactctgtctcccaggctggagtacagtggtacaatcttggatcaccgcctcccagtttcaagtgatctccctgcctcagcctcctaagtagctgggactacaggtatgtgccaccacgcctggctaatttttatatttttagtagagacggggtttcaccatgttgtccaggctggtctcaaactcctgacctcaggtgatctgcccacctctgcctcccagggtgctgggattacaggcatgagccaccatgcctggccatttcttacacttttgtatgacatgcctattgcaagcttgcgtgcctctgtcccatgttattttactctgggatttaggtggagggagcagcttctatttggaacattggccatcgcatggcaaatgggtatctgtcacttctgctcctatttagttggttctactataacctttagagcaaatcctgcagccaagccaggcatcaatagggcagaaaagtatattctgtaaataggggtgaggagaagatatttctgaacaatagtctactgcagtaccaaattgcttttcaaagtggctgttctaatgtactcccgtcagtcatataagtgtcatgtaagtatcccattgatccacatccttgctaccctctggtactatcaggtgcccttaattttgccaagccagtgggtatagaatgagatctcactgtggtcttagtttgcatttgcttggttactgatgagcaccttgtcaaatatttatataccatttgtgtttatttttttaaataaaatgcttgctcatgcttttttgcccatttgcaaaaaaacttggggccgggtgcagtggctcatgcctgtagtcccagctctttgggaggccagggtgggcagatcgcttgagcccaggagttcgagaccagccttggcaacatggcgaaaccctgtctttacaaaaaatacaaaaattagccgggtgtggtggtgtgcacctgaagtcccagctactcagtaggttcgctttgagcctgggaggcagaggttgcagtgagctgggaccgcatcactacacttcagcctgggcaacagagaaaaaccttttctcagaaacaaacaaacccaaatgtggttgtttgtcctgattcctaaaaggtctttatgtattctagataataatctttggtcagttatatgtgttaaaaaatatcttctttgtggccaggcacggtagctcacacctgtaatcccagcactttgcggggctgaggtgggtggatcatctgaggtcaagagttcaagatcagcctggccaacacagtgaaaccccatctctactaaacatgtacaaaacttagctgggtatggtggcgggtgcctgtaaccccagctgctccagaggctgtggcagaagaatcgcttgaacccaggaggcagaggttgcagcgagccaagattgtgccattgcactccagactgggtgacaagagtgaaattctgcctatctatctatctatctatctatatctatatatatatatatatatatcctttgtaatttatttttccctttttaaaattttttataaaattcttttttatttttatttttagcagaggtgaggtttctgaggtttcattatgttgcccaggctggtcttgaactcctgagctcaagtgatcctcccacctcagccttccaaagtgctggaattgcagacatgagccaccgcgcccctcctgtttttctctaattaatggtgtctttctttgtctttctggtaataagcaaaaagttcttcatttgatttggttaaatttataactgttttctcatatggttaacattttttcttgcctggctaaagaaatccttttctgcccaatactataaagaggtttgcccacattttattcc

SEQ ID NO: 1156 - DNA, 3295 bp, Homo sapiens
caggacttgaagcaaagcgagggctccgaggaggaagaggaggaggaggacagctgcgtggtgctagaggaggaggagggggagcaggaggaggtcaccggggcatctgagctcactctgtctgacacggtgctgtccatggagacggttgtggccggcggcagtgggggagatggagaagaagaggaggaggcactgcctgagcagtcagaaggcaaagaacagaagatcctccttgatacagcctgcaagatggtccgctggctgtctgccaagctcggccccacagtggcctctcgccacgtggcccggaacctgctccgcctgctgacgtcttgttatgttggacccactcggcagcagttcacagtgagcagtggcgagagcccaccgctgagcgccggcaacatctaccagaagaggccggtcctgggcgacatcgtgtcagggcctgtgctcagctgcctcctccacatcgcccgcctgtatggggagcctgtcctcacctaccagtacctgccctacatcagctacctggtggccccagggagtgcctcaggccccagccgactgaacagccgtaaggaggcggggctgctggccgcggtgacgctgactcagaagatcatcgtgtacctctcagacaccacactcatggacatcctgccccggatcagccatgaggtcctgctgcccgtgctcagcttcctcacctccctcgtcacggggttcccaagtggggcccaggctcggaccatcctgtgtgtgaaaaccatcagcctcatcgccctcatctgcctgcgcattggacaggagatggtccagcagcacctgagcgagcccgtggccacctttttccaggtcttctctcagctgcatgagcttcggcaacaggatctgaagctggaccctgcgggccgtggtgagggccagctgccacaggtggtcttctctgatgggcagcagcggcccgtggaccccgccctgctggacgagctgcagaaggtgttcaccctggagatggcatacacaatctacgtgcccttctcctgcctgttgggtgacatcatccggaaaatcatccccaaccacgagctggttggggagctggcggcgctgtacttggagagcatcagccccagcagtcgcaaccctgccagcgtggagcccaccatgcccggcactgggcccgagtgggacccccatggtgggggctgccctcaggatgacggccactcagggacctttgggagcgtcctggtggggaaccgcattcagatccccaatggctctcggcctgagaaccccggaccactgggccccatctcgggggtgggtggcgggggcctgggcagcgggagcgacgacaacgccctgaagcaggagctgccgcggagcgtgcacgggctgagcggaaactggctggcgtactggcagtacgagatcggcgtgagccagcaggatgcccactttcacttccaccagatccgcctgcagagcttcccgggccactcgggggccgtcaagtgcgtggcacccctaagcagcgaggacttcttcctgagcggcagcaaggatcgtaccgtgcgcctctggccgctgtacaactacggcgacgggaccagcgagacggccccacgcctcgtctacacccagcaccgcaagagcgtcttcttcgtgggccagcttgaggccccgcagcacgtggtgagctgtgacggggctgtgcacgtctgggaccccttcacagggaagacccttcgcacagtggagccgctggacagccgggtgcccctgactgcggtggctgtcatgcccgccccccacaccagcatcaccatggccagctctgactctaccctgcgctttgtggactgcaggaagcctggtctgcagcacgagttccgactgggcggtgggctgaaccctgggcttgtccgtgccctggccatcagccccagtggccgtagtgtcgtggccggcttctcctcaggcttcatggtgctcctggacacccgcacaggcctggttctgcgaggctggccagcccacgagggggacattctgcagatcaaggcggtggagggcagcgtcctggtcagctcctcctctgaccattccttgaccgtctggaaggagctggagcagaagcccacccatcactacaagtcagcatccgaccccatccacacctttgacctgtacggcagcgaggtggtcactggcaccgtgtccaacaagattggcgtctgctccctgcttgagccaccctcgcaggccaccacgaagctcagctctgagaacttccgcggcacgctcaccagcctggccttgctgcccactaaacgccacctcctgctgggctcagacaacggggttatccgcctcctggcatagactgaggcaggagctggccgggcaagggtgggaagacatctgcgggcgcgtgtccactcaccctgttccctgagcagcagctccctccagggaggccctgggtcccacgccctgggtgcccacatggcctgccaactagggcctgcaaatggagtgggggagtcctggcccctgaatcaccagagccaccaagcctgccagaggggtctcattcatggcttggggacacagggctcctagcaagcaggaagttaagagcaggaggaagcgttgctaccttcacttctccccagctctgccctctgggtccacatgaggacagggaagctcgggaaggggaagggagactggccctgcccagccggtctctagcccctcagcccccgctgggcactctctgtcccatccctctaggacagggaagctggcctggtccagggcactgatggtgcttggattccagcctaaggaaggctggccgtggtccaggagttaagggcttgggtctggggtttaagtggccacccatccaggccctggccagtgtgggaccgggacgggaaggaagaaggaggctaggagcagggggaaaaggtgcacttggccagtggcgcctgccaggagtgagtccatgcgttgtctgcccacccctaccacagtgtttgtgccttcagctgagggggcagcctctgggccctgaacccctgctggggctccacgaccctgagagaaggggtgagaggaatcatctctgcacctcgggtctctgccagaggaagacttaagcatccctgcgacctcacattctagacagagatgaggtccaggggttggcccctgctgccttctcacaatttgcaatagatgtaaataggaccaataaatcctttggaagagc

SEQ ID NO: 1157 - DNA, 2652 bp, Homo sapiens
ctgaatttatggccaggttacatgaacatctgaagtattttgtaaatatgaaaatttccacagacaagtcatggcaaggagttaccatctacttctcaggccatgagactcctggagaaggagagcataaaatcatggaatttatcagatccgagaaagcaaagccagatcatgatccaaacaccagacactgtctttatggtttagatgctgacttgattatgcttggattaacaagtcatgaggcacatttttctctcttaagagaagaagttcgatttggtggcaaaaaaacacaacgggtatgtgctccagaagaaactacatttcaccttctacacttgtctttaatgagagagtatattgactatgagttttcagtattaaaagaaaagatcacatttaaatatgatattgaaaggataatagatgattggattttgatggggtttcttgttggtaatgattttatccctcatctacctcatttacatattaatcatgatgcactgcctcttctttatggaacatatgttaccatcctgccagaacttgggggttatattaatgaaagtgggcacctcaacttacctcgatttgagaaataccttgtgaaactatcagattttgatcgggagcacttcagtgaagtttttgtggacctaaaatggtttgaaagcaaagttggtaacaagtacctcaatgaagcagcaggtgtcgcagcagaagaagccaggaactacaaggaaaagaaaaagttaaagggccaggaaaattctctgtgttggactgctttagacaaaaatgaaggcgaaatgataacttctaaggataatttagaagatgagactgaagatgatgacctatttgaaactgagtttagacaatataaaagaacatattacatgacgaagatgggggttgacgtagtatctgatgactttctggctgatcaagctgcatgttatgttcaggcaatacagtggattttgcactattactatcatggagttcagtcctggagctggtattatccttatcattatgcacctttcctgtctgatatacacaacatcagtacactcaaaatccattttgaactaggaaaaccttttaagccatttgaacagcttcttgctgtacttccagcagccagcaaaaatttacttcctgcatgctaccagcatttgatgaccaatgaagactcaccaattatagaatattacccacctgattttaaaactgacctaaatgggaaacaacaggaatgggaagctgtggtgttaatcccttttattgatgagaagcgattattggaagccatggagacatgtaaccactccctcaaaaaggaagagaggaaaagaaaccaacatagtgagtgcctaatgtgctggtatgatagagacacagagtttatctatccttctccatggccagaaaagttccctgccatagaacgatgttgtacaaggtataaaataatatccttagatgcttggcgtgtagacataaacaaaaacaaaataaccagaattgaccagaaagcattatatttctgtggatttcctactctgaaacacatcagacacaaattttttttgaagaaaagtggtgttcaagtattccagcaaagcagtcgtggagaaaacatgatgttggaaatcttagtggatgcagaatcagatgaacttaccgtagaaaatgtagcttcatcagtgcttggaaaatctgtctttgttaattggcctcaccttgaggaagctagagtcgtggctgtatcagatggagaaactaagttttacttggaagaacctccaggaacacagaagctttattcaggaagaactgccccaccatctaaagtggttcatcttggagataaagaacaatctaactgggcaaaagaagtacaaggaatttcagaacactacctgagaagaaaaggaataataataaatgaaacatctgcagttgtgtatgctcagttactcacaggtcgtaaatatcaaataaatcaaaatggtgaagttcgtctagagaaacagtggtcaaaacaagttgttccttttgtttatcaaactattgtcaaggacatccgagctttcgactcccgtttctccaatatcaaaacattggatgatttgtttcctctgagaagtatggtctttatgctgggaactccctattatggctgcactggagaagttcaggattcaggtgatgtgattacagaaggtaggattcgtgtgattttcagcattccatgtgaacccaatcttgatgctttaatacagaaccagcataaatattctataaagtacaacccaggatatgtgttggccagtcgccttggagtgagtggataccttgtttcaaggtttacaggaagtatttttattggaagaggatctaggagaaagtaagtttatgttagagaaatttacttaaagtggcagaaaaattaaatgataaagattaaatgcttaatatttcagtatttattttcttattaattgctctggattgtcttaaaattgtgcataaatttctctgatggtaatctttcatctgaatggcacatgttttaggtggttggaaaagacagttcttattttttagcagctaataaattgaaccttgaaaaaaggt

SEQ ID NO: 1158 - DNA, 2393 bp, Homo sapiens
gacacgtcccccgggcgccactgcagagcctgtccgtcagtccctaggtatccgcactgctcaggggaggattccctgggagcacccaccagctgagatctgcacatcagccacaatcctctcaggacggcggaaagggaagggctcagctgccagcctggccacagcctgcatcatctcatcccagaggcggagcacaggctcggggtccttcagggcctgaaggaggtagagcccggtactcacccagcaatcattgttgcctgacaaaagtcacagagaaggctcagttcttccttcctatgatagaagacttctaactctcaggaagtagtttgtttctcaaagagaaaacatggggtgttcagttggctgtgtggctgctcccatctgtagaggtgaagtggatgtacgtagtcttctatgctgacagaataattcaaaagaatgctttgaagagtttcgctcttgttgcccaggctggagtgcaatggtgcgatcctggctcactgcagcctctgcctcctgggttgaagcgattctcttgtctcagcctcctgagtagctgggattacaggaggattccctgggagcacccaccagctgagatctgcacatcagccacaatcctctcaggacggcggaaagggaagggctcagccgccagcctggccacagcctgcatcatctcatcccagaggcggagcacaggctcggggtccttcagggcctgaaggtttgtggttggcactgtcaggatgatgttgtccgtggccagctctccccagggagccaggttctcctgcatctgcctcttccactcctccagcgatgtcttacctgggaataaatatcatggaacctaccacacccacttctccaacttcccttgagctgaaaaataccatttgaactctggaagaacattgcaataatgaactactatcacaggcgtctataggctgtaaagtgaagaaaaggcttcctgactcttctctttgtctgccctgaagtctccatggacacagggtattccgtatcttctgcctccatgttccctcccaacagttcttcctctttctctccaccaaagctcatccctctcccatttagcaaccaccccacagttcccacggcatctgccactcttcctcctccctaaatgttcactccacttacccagcttgtagtatggggcaggcacagctcccctgatagtgacaggcacagggcctagttggctgcccttgggcacgatgacgtagaggaggccgccccagaggcaggagactgaccgctcagtcctgtccatccagcattggtgagtcaccacgggggctcgagatagcttcctggccttggtaaggtcatcggtgtggcagcctatctgtacctggacaggtgattccaccaagcgttggagaaattagagtctttgtgatgctttgtgatgtgcgtgtgaggttgtgtagatggaaggtattagacaaacatgcccatgaaaccccagcttcccttttctatgtgctaggcatggaaacttatgaaattttagcactccaaagtcatttggacttcaaggcatttaaaatcatttttctaaggatttaaacagctccactataagtcttcacctgacatgaattggtgagagaccaggctgatcctggcaaaggtcttgtgtctttctgccaggcaaaatcctgggttcttctagcaggacctaagccagtctggggacgctgatattgaggatgagctgggggactctgctctgtcctctgtgaacacacaggaggcccatccagagtgagtgaggttgattctctctccctctttgcccagagcttccctttctggccgccagatgggtggagatctgttttgtctggagtcctggagttgcttttcttaggtttgatataagcaagctccagaaagaatgctgacagaaaagggaccctagctgtggtaggaagtggccctcagagtcaaggaggcaggatgaatttaaattctgcatgtagggcatattttggggagtgatgggattatgcacacccttcaggtgtcaagataaagagataaaaccagagtttgtgcagaatgagcttgctgacacacagcctaaatttgtaccgcatgtttcatactaactccctctgagtttgcacatgggacccatgaggaggcatgaagaggtaactgcccatgcccgaggattttccagcccttccttttctttctgtcaatcacctactaatcacagaatccactccctacaccttttctactaaaataactctttaaaataagtacaatgggacagatttgagctgggctcctgtctccttgttaatcaaattgcaataaaatgttttcttttgtttttg

SEQ ID NO: 1159 - DNA, 2093 bp, Homo sapiens
tacaaaaattagccaggtgtggtggctcatgcctgtaatcccagctactcgagaggctgaggcacgagaatcgcttgattccaaacattcattcatccatatacccatccatccatacacctactcatccaactcgtgttcatccaaacatccatccatccatccatccatccatccatccatccatccatccatatatacatccatctatccattcatgcatctatacatatacctattgatcaaattcttgtccatccatccatccacctatttatccaacttctgttcatccaaacatccacctatccatctatctacccatccatccattcatgcatgcatgcatccatccatacatacatacatacactcactcatccgtctatatacccatccatccatgtatctatttatctaattcctgtacatccaaacattcattcatccatatacccatccatccatacacctactcatccaactcatgttcatccaaacatccatccatccacccatccatccatccatccatccatccatccatccatgtttcaagcagagaacaagacaaaatcactgcattcatgaagcttaaattgagtgaggcagggcttgcagatataaatcaaataatagtaaataagggtaaaattgtgacaatgataagtgctacagacataaagggcacatggtgctaggagagtccatcacagggcaatctgacctagtcatgaaggtcagcaaaggctctccaagtgaccatagaactgagaactacagggtaagcaggattaagtagaagaattggggaggaaaaaatgttcaggaagagagggaagggcacgcacagggcaagataaagttgggaagtaggcctgaccatgcagtgctcttgggcatgctgaagattttgattttgattcttagaggttctaagcaaggagcaggtgacaggatcagatttgtatttttaagagattattttggctgtggttacagaagatggaagcgggggatgggatgagcaagtgtgaaagccggaggcctgtgggaagccaatgtagatgtccaggaaattcatgatggaaccttggactggggaggtgatggggggaggggaggagtggatggacttgagggccatttaggagataaaatggacatgattgggccatgggttttgtgggaaggataagggtgagggagttatctaggatgacacccaggtttctggataaaactgttgccaggcaacagagagaaagccagaagggagtggggaaggggtgggacacattttcccttgcagttgtttttatgcccatgtttgcaaaataaagggtgttggaggtgtgggcgtgcacagctccctgactgcccacccaaggataagaagactggtttaagaagattgcatgttgcagggtaaagggagctaggtcttctactctgggctctgcatgcaggtaactgtgtgatttcactcccctggcccaggactctgaaacagacatccctccttgtctggcaatttcatggcaaaaagcagcctgagtcgtatttgtccactcatgctatttacaggactcctccttgggaagttatttcttgtagatccactttatccagagcctgaaggtgaaaaatcatcaagtctagaatgtgagatctgaaaggaatcacagagcccattttcccaatcttctaattttacactggggcagcccccgtgtctgacccatgtctctatgctactctactaccttgcctacaggaagagaggttaaggagtttgtccaaagccacaaagctattgggcataaggaggtgaccccacattccttttcttactttgggggtggggattcttctgcagcctgcagttatttcctaggacagtggggctaggtagagctgtggcgatgagctaagatcatagacacaggtgatgctgagcatctgggggaataattcatctgaagctgtgccctgctgagttggagtcctttctgactctttaaagatgcctcttgtcatgcacccagtcgtgactcctgaatatcctcctggggttgcaagatgctctttgc

SEQ ID NO: 1160 - DNA, 3291 bp, Homo sapiens
tgacctcgtgatgcccccgcctcagcctctcaaagtgttaggattacaggcatgagccactgcgcccggcctgttctttatatcttaacagcagttaacaagctgtgggggaagaactctgcctcttacagttcagtccaaattataataagcttggctaatacacctctgcacttgagagtatgaaattgggctacttctctagtttgtaggcttccccttgggggagggtaacactcagtatgtcaaagcttgctgtgttaacaaggactttagagggaatggcgatggagcacagactggagatggttagattcatctttaccagtccagcccccctggacaaggtcctaggaatggtgagggcttataaagagacacaaacagctattaatatttccctatatgatgccatgccctggaggccaaatcctcctctcctcttctttttttttttcttgacagggtctcactttgtcacccaggctggagtggagtggggagatcttggctcactgcagccacctcaacctcctgggctcaagccatcctcctgcctcagtcccccaagtagctgggactacaggcatgcaccatcatgcttggctagttttttttttttttttgagacggagtcttgctctcttccccaggctagagtgcagtggcatgatctcggctcactgcaagctccacctccctgattcacaccattctcctgcctcagcctccccagtagctgggactacaggcacccgccaccacacccggctactttttttgtattttttattagagacagggtttcaccatgttagccaggatggtcttgatctcctgacagtcaggaaatgattactgtaatgttatagtatggattgatatatgggtacagcaaatttcctttttccccaaaaaatattctcactagtcttttcatctgtccctctgtataagcttcataatccagattctttagaactttagaataaaaaattatttcctttgggattgcagtgacttatagattaaatgagaaatgacagttttagaaaaataatgctttccacttatgaacatgttctctcttgttatttattcagttcttcttttatgtttttcagtgaaggggtgtgtgtgtgtgtgtgtgtgtgtgtgtgcgcgcgcgcgcgtgcgtgcgcgcgcatgcgtgcacacgtgcatgtgtgcgctataggtcttgtccatcttccaactgaattttggggtatactattgattttctatgttggtcttcatctggccatctaattatctacagcgcatctgcttccttcccacgttcccacccagggcttgagtaggaatcttttgtttcaggaactagtgaccatcaaggatacaactttctatttcacctacaaacaatgggccagcctgatgcctgctcaaaagaccttgtacagagatggtatgggagatacagttctgttgcttctccagatgacgccctctctaggacttagcctttgtacttagcttcctggcttctttcctcttataggctgaggtatctctcataagctcattttcagaattccatgagctgagttacccaactcacccgcctcagggactgctggccagggagagccctagattctctgtagtattgaaacagatgtccccagttccctagtagaggctctgctttgggcacaatgggaaatgaaaatttttttgatgccctaattgagccctctgtccctacaccatccctgttttcttgagatcttagcctcctaccatgtgggtgggatactaccactatttcagcccacactctcacagggccagatgtgttacgctccttcctgagtaagacagttgggctccttctgtagagtgctccactttccctgagatcccgcctcacttgttctccggggtgttccagttcttcctccacttgctaaaggcagaagatgggctgaaaagagttccagatatcaattctggttgactccccacattttcctattccttttttttctccttgagaaacattttattcccaaaacaagttctgatatctctgctggagcaaggggaaataccatggggcccagatccctgggtgctgcttggcagagaggccctgagaggtgtctgttctggggagtgagagaacctgtgagcttcccttcctgcttttcctctttgtttttgtgtttgtctgtttgcttgttttaagagatagggtcactgggcacggtggctcatgcctgtaatcccagcactttggaaggctgaggtgggtgcatcacttggggtcaggagtttgagaccagcctggccaacatggtgaaacccggtctctactaaaagtacaaaaattagctaggtgtggtggcaggcgcctataatcccagctacaggccctggtgtgtgatgttcctctccctgtgtccatgtgttctcattgttcaactctcacttatgagtgagaacaggcgtgtttggttttctgatcttgtgatagtttgctgagaatgatggtttccagcttcatccatgtccctgtaaaggacgtgaactcatcctcttttatggctgcatagtattccatggtgtatatgtgccacattttcttaatccagtctatcattgatggacatttgggttggtgccaagtctttgctgttgtgaacagtgctgccataaacatacgtgtgcaggtgttttttatcgtagaatgatttataatactttgggtatatgcccagtaatgagattgctgggtcaaatggtatttctagttctagatccttgaggaatcaccacactgtcttccacaatggttgaactaatttacactcccatcaacgatgtaaagcattcctatttttccacaacctctccaacatctgttgtttcctgactttttaatgatcgccattccaactggcatgagatggtatcttaagactcagaggtgttcctctccatggaaatctttagtaaaaggtgaaagatttatatgatctgaagagaagccagagtataattttctactattttcaatacaaagatgtgttttcattacaattagaggaatataggcttctgtgagctagcctggaagcaaacataatcattattgttcattgtttctgtgagaaaatgtaatgctgtttctaaatattgacctaacaataaactctgaggaattcatgattgtaactggatggaaactggctttcttcatttgaaataaattaattgaacaagataaaaaaaatccagagacat

SEQ ID NO: 1161 - DNA, 1994 bp, Homo sapiens
agatacagcagtgaacataacaggtaaaaccctccccctctgccaaggggcaggacagggaggaaagggaagacagagacaggtggaatatggagtgttcagtgttgaaatatccaagacaatttcctggcagatttgatgtgaggtgtgattaaagaagaaccaagaatgactttagtgttgttggcctgagcaactggaagaacagagttgccatttattgagatgagaaggctgccagaagagtagagttgttttgtttcattatggagattgacggtttccagcagttagacctagagaagagtgtaccttccaaaaagactactcctaaaaggattatccattttgttgacggagacatcatggaagaatatagcacagaggaggaggaggaagaggaaaaggaggagcagagcacaaattcaacacttgacccttctaaactttcctgggggccctacctacgattttgggcaggacgaatagcaagcacctcattttctatgctgagcctgcaggccaccttgctactgaaggcagaaaaggaaggccttaaacaacttctgagaagtctgtctggatgcatggaagaattcctgatgtgggtcttggtaacactggattgagtttgggtttaatttgaaatatacttggagcagatgtttagccggtatgcatggggataatgaacaatacctgttctgattgctcaggacccatgctatacctgttgttaaagtatattgaaaatctctcctgatatatacatctggaaaaaatagtttatatataatcccatataaagatagaagatttgacaaatttcctttgaatcctagaatttttgagaggccaaggcaattgaaatgttttgtcagccttgaagttaagtatagtaatagaccactattactatactatcagaatagtttaaactctgggcatctcaactgatgcgaagctttagttagtaattcagtttacgcaagtgctcgttctttcttttagcatgtgaattccttggtggaagatttgctgtcttctttggtcttactcaacccaaatatcagtatgtgttaaacgagttctataggatacaaaacaagaaaagtgacaacaaaagtgaaaggagaggatcaaaggcccaggcagctgaggttcctaatgaaaagtgtcacttggaggctggggtccaagagtatggaaccatacaacaggatgtgacagaggccattcctcagtgaagcacctcatccagggagggtctggtggcagatcctagctcatgatggcagcaaagactgcagtttccctggatctgttccttggccattgattaccatggcaacaacaccagaggtagcacttctgagccagatctgatcctaatctctgtgtgacttagtctcaagcatccaggaattacaagcaataatgagagtaattttggacactttctcagaataatttctatattcaagccaccccacctcaactccacccctgtgatacaagtcccatgagtactgacatttgcacagtagcataaatgccttaaggaactttgggactgggagtttttggctgaaatcctctgtcatgggacgagggtacagtaaagaagctctattcctcagaagaaaatttgggcaccgcaaagtctaaataaatcccctttcaggatttgatatagtgtgtacttccaacaaccatcctggcgtagttggggattgttttacaataagtaaacattgctaataactgtgttacaagatcattatcaagatctttaagaattaggtacatccctccaaattaaaacaattgataaataatataagctctagaaaaaaatattaatggattattttcttatttatttgtcaagaaattttcaaaacctggaaagatcgaacatggaaatcattgttagataacacagggtgtgctggccaaagtaactgtgatacattaatagcaaaaaacaaacc

SEQ ID NO: 1162 - DNA, 2280 bp, Homo sapiens
aatccaaagacctcagatattccagttctattcagagccataaaaggactcatactggagaaaaattgtagaaatgtacagaatatggggaaactctcattgctctcatctccattcaaagacacgtgtcggtgcacactggagatggatggtatgaatcgaagaatacacactggatggaaacgttagtagtttggaaaatacaggaaacttccattttaacaataattaaaattcacatgggctgtgcacagtggctctcccctgtaatcccagcattttgggaggctggggtgggtggattgcttgaggccaggtattcaagaccagcctggcaacctggagaaatcccatgtatacaaaaaatagaaaagttagccagggatgatggtgttcgcctgtggtcccagctgctcgggaggctgaggtgggaggattgcttgagtttgggaggtcgaggttgcagtgagtggagattgcgccactggactccagcctgggcaacagtgagaccctgtctaaaaaaattaatcatgtgagaacatccactcgaaagaaatcctataaacgtaagtaattttgaaagcctgatgcaaattaattattatataatgctcaaaaacttaatcatgaatgagttattacacaaagttataaatatatagcatttatcagtggctcattcttttttctttcttttttttttttttttttgagatggagttttgccctgtcgcccaggctggagtgcagtggcacaatctcggctcactgcaacctccgcctcctgggtgtgagcaattttcctgcctcagcctcctgagtaactgggattataagcacatgccaccacgcctggctaatttttttgtatttttagtagagacggggcttcaccatgtggttcaggctggtctcagactcctgaccttgtgatccgccctccttggcctcccaaagtgctgagattacaggtgtgagccaccgcgcctggccttttttttttttttcccgagacacagtctcactctgttgcccaggctagagtgcagtggcgcgatcttgactcactgtaacctctgacttctgggttcaagcaattctcctgcttcagtctccggagcatctgggattacaggcgcacgccaccatgcccagctaaatttttggtatttttgtagaaacagggtttttccacattggccaggctggtcttgaactcctgacctcaaggaatccatcctcttcagcctcgcaaagtgctgagattataggcatgagacaccttgcccggcccctgtgactcattcttaaaaaggatctttggattatgggtttccacttttgcaaggaaatgtgagaatgatactctttaagcagtggtacctgaggtttaataggaagtgtttttatcctaagttagttaataaaatttttttctatccattttagttttcatttttttctatccattttaaagtgttggatctgtgggtgaagtgaaatttatttctaatatgtaagcaggtttaatttttatgtagtgtttaattgttctgtgatgaatgggccattacaaaatgagtctatttttgtttgttttcttttgtttttgagactgagtcttgctctgtcgccaggctgaagtgtagtggcgcgatcttggctcactgcaacctccacctcccgggttcaagtaatccccctgccttagcctcctacaggcgcgtgccgacatgcctggctgattttttgtgttttagtagagacggggtttcattgtactggccaggatggtcttgatttcctgaccttgtgatccaccccaccttggcctcccaaggtgctgagattacaggagtgagccactgcgaccggcccatgagtctttattaatagagatttcttactggtgttatgtggcagattctgcatattcctcacccatcatatgtattccactttcctttattatggggaaaactactctttttggcatgatacaatgttgactccattttctttgctaataaggacttggtatcaatttatcagtatgtaaagtttaccatagagtattgtctcatgtgaatcattcccattttttgctctttactctttgtcgttatttctgagtattatttggatggttcattttgacttaaggatagccctgtgatatgacaatatttttatctaatctgatggagaaagcatttagtctcctgatcaagtatgatgttagctgcaggtttttaataaatgccttaattcagtttg

SEQ ID NO: 1163 - DNA, 2669 bp, Homo sapiens
aaatcagaagcaaactttgttaaagcaagaaacaaaatattctaataaggatataaagaaaaagaatataaaccttcaaccaatgtggcagcttttgcctgtagagcaagacacatccaatgtaacagaaatgaaagtctctgaaaaaagtcacaatgcatttaaggcaaccaacaaaaagcgggagactgatgttcacttgaaaagccaggactttctaatgaaaacaaatacttccacaggcttaaaaatggcaatggaaaggtccctgaatccaatcaactttaaccctgagaataatgtaaaagaaagtgagtgcccccttccacctccatctccacctcctccaccaccttctaatgcatcatctgaaattgaatttcctcttcctcctccacctcctttgatgatgtttcctgaaaaaaatgggtttcttccctcactgtccacagagaagataaaggctgaatttgaaagttttccaggcctccctcttcctccacctccagtagatgagaaatctgaaagagaaagttcatcgatgtttctgccgcctcctcctcctccaactccatctcaaaagccagcacatctcctttcctcctctgctccggaaaagcacagtggagacttcatgcaacaatattcccaaaaagaagcctcgaactctcagaattctcaggctaaaatcataacaggaaaaaccggtgtgttgccacctcccacattgcccaaacccaaacttcccaagcatataaaagataataagaacgatttttcccccaaagttgaactggcaacctccctgtcagatatggaatgtaaaattactacctcaaaggatcagaaaaaagtaatggtgatgaccagcagtgaacacacggagacaaagcagaacgttattagtaagagtcttgatgaaagaaaacaattatctattgactctgcaaactgtctctcacacacagttccaggaacttcagcacccaggaaaaaacagattgcgcctcttataaaatctcattcatttccagagagttcaggacaacaaaatccaaaaccttatatgagaaaatttaagacacctttaatgattgctgaagaaaaatatagacaacaaaaagaagaaattgaaaaacagaaacaggagagttcttactacaacattgttaaaactcaaagccaaaatcaacacataacagaggtggaaaaggaaatgccattacaaaaaaccaatgaggaggtttccctatctggaattgattcagaatgcactgtggttcaacccagcccaggctctcaaagtaatgctcggatactaggagtgtgttctgataaccaactctccacaacatcgccagaaacagtcgctgccaagaggctccaccatgttttagcagcttcagaagacaaagataagatgaaaaaggaagttttacaaagctcaagggacattatgcaatccaaatcagcttgcgaaattaaacaaagtcaccaagaatgtagtacccaacaaacacaacagaagaagtatttggagcagttgcacttgccccaaagcaaaccaatttccccaaatttcaaagttaaaaccatcaaacttccaactctagatcatacattaaatgaaacagaccacagctatgaaagtcataaacagcaatctgagattgatgttcaaacctttaccaaaaaacaatatctgaaaaccaagaaaactgaagcaagcactgaatgtagtcataagcaatctctggctgaaagacattatcagttacctaagaaggagaaaagagtgacagtacaattgcctacagaatccatacagaagaaccaggaagataagctcaagatggttcccaggaagcaaagagaatttagcggatctgacagagggaaacttccaggaagtgaagaaaaaaatcagggaccatcaatgattggtcgaaaagaagagagattaataactgaaagaaaacacgaacatctgaagaataaatcagcaccaaaggtcgtcaagcaaaaggttatcgatgcacatcttgattcacagactcagaattttcagcaaacacaaatacagaccgctgaaagtaaagctgaacataaaaaattgccccagccatataatagtctgcaggaagaaaaatgtctcgaagtcaagggcatacaagagaaacaagtcttctctaatactaaagattcaaagcaagagattacacagaacaaatctttcttttcctctgtgaaagaatcccagcgggatgatggaaaaggtgccttaaatatagtggaattcttgagaaaacgtgaagaactgcaacagattttgtcgagagtgaaacagtttgaagcagagccaaataaaagtggccttaaaacatttcagacactattaaatactatcccaggatggctgataagtgaagataagagagaatatgcagttcacattgccatggagaataatttagaaaaagtaaaagaagaaataacacatattaaaacccaagcggaagatatgcttgtgtcctatgaaaatataattcagacagccatgatgtcctccaaaacaggaaaaccgggaaataaacccactagtcttgatgaaacatcatccaaagtatctaatgttcatgtcagcaataataaaaatagtgaacagaaag

SEQ ID NO: 1164 - DNA, 2532 bp, Homo sapiens
atagttttaaatttagtattttggtaggaaattcagagatttcctagatttcagagatggaattgtatttttggacatttcctttcctctttaaagatcttgagatctgttcagtactaatagatctaatgcttctttcttatgcttccagttagtttgcacttgttaccctatatatagcttcacatatgcttcagaagcttaagcaaattaaaaaaacaaatggggactgtgagagtttgagactgttttcaattcttgataaccattttagaggaaaattaaataatgtataaattattcagactcatcgctatttcaagattttctgccatttagctcctttccttaattatccagatttaaagttctgaacttcaaataaaggtttataaatgtcttatcttctctcagcccactgtgctcagatattaatcaaaccatctaaatcactgcacaagttttatttcattcatgacgtcacactgaatgtgctctctctccttaagatttcatttggtatgtcattcatgtatagttaacaaacatttaaaaatctaattactcatttttaagttaatgtgtaacataaatatactacttatatttaaatgtagttcaccttaactgacatactaaagacagattttagcaaatattttgattcagaatgatacctcaaactaccatttttctaactgccataatcctctattaaacttatataatccatttttagattgtaagatcttaaagaatacctaaaaaaaaccctcttaaatgttgatgaattgtttttccattataaagtcattttgacttttagaagtcaagactaatacattttctagaaaacaaggtacaaaagcacttgtgattaatggtagcactagatttctttcagcaaatccttaagagtacagaggttgaggggacttctgttgtttgtcacattccgcatttgaaacaactcacagtgactgtcagcctaagaatagcaaatgtagtcttgctttttgttaaagagttcttacttataccttatggcatttttgttgactattagaaatgtaaattgagaaacatataaactcttaagttcagagacgtaagttcatggaacttttagagtttaacagtgttaatgattacttaagaaattaaactgaatagcagttctttgtgcttttaacgagtagttttgtttttaagggcagcatatacttttcctacaatttagtgtttgaagggtgggagaagaggaacgattttgaaaagttagcgaatgataaagaaaaaaggaattaaatagaacataagttggttgatgccttgcaaacaacttagagcagaacttctttattatttagataggtcagggttccagttatacatgctacctagtgtctccttctgacctcattatctgtctgaataaacttcagatgggtactggatgtatattgactactgtcaaataaaatgaactttgttttagttaaggtcagatatgatgtggttggtatgttttggaacatgttttttcaggttgcatctggaggtggtggggttggagatggtgttcaagaaccaaccacaggcaactggagaggaatgctgaaaacttcaaaagctgaagagttattagcagaagaaaaatcaaaacccattccaattatgccagccagtccacaaaaaaaaaaaaaaataaaacaacacccagatagatacacatactccttcagacttacagacctaagctgcatttatggggtagtgatgaggtttagaacatatacatattttgttaaaattccccagatgattcttggtatgaacgactatattataaattttaagatgtacttagaaatccttaagacatctagccccgtctctaatagacaacacatttatattgcagatattacttttttttcagtttatgaccaggtatttatgaaggactattggcagggaaaatatgaatatgttaactttagcttatggcatcaatttactaaggaacaacaggctcaccaactgatgtcaaacataaaaacccccacatcagtctgatacgatatggtactactttgaatctgttactagtaccatcttgacagaggatacatgctcccaaaacgtttgttaccacacttaaaaatcactgccatcattaagcatcagtttcaaaattatagccattcatgatttactttttccagatgactatcattattccagtcctttgaatttgtaaggggaaaaaaaacaaaaacaaaaacttacgatgcacttttctccagcacatcagatttcaaattgaaaattaaagacatgctatggtaatgcacttgctagtactacacactttgtacaacaaaaaacagaggcaagaaacaacggaaagagaaaagccttcctttgttggcccttaaactgagtcaagatctgaaatgtagagatgatctctgacgatacctgtatgttcttattgtgtaaataaaattgctggtatgaaatgacact

SEQ ID NO: 1165 - DNA, 2090 bp, Homo sapiens
aagtaacagacatttattgtgcacctactgtataaggcatgaccgtgacagtaccaatagcagatgtttattgtgcacctgctgtatacagacatgaatgtgctattaccaacagcagacatttattgtgcacctactatatacagacatgaatgtgctattaccaacagcagacgtttattgtgcacctactgtatacagacatgaatgtgatattaccagtagcagatgtttattgtgcacctactgtatacagacacgaatgtgctattaccaacagcagacgtttattgtgcacctactgtatacagacatgaatgtgatattaccagtagcagatgtttattgtgcatctactgtatacagacacgaatgtgctattaccaacagcagacgtttattgtgcacctactgtatacagacatgaatgtgatattaccagtagcagatgtttattgtgcacctaccgtgcacaggcactgccctcatctcttcacatttgctattttaatagcaatccttcgaggagtgattgtccccattccccccatttaacaggtgaaaactgagacttaggtaaagtctcaggccgagggccacacgattatggaaaggggtagaggcaggatgcaaacccaggaggtctagtcccagagccccagccccagagctcataggactgggcctggcctgggccaccgtccccacaccactcagtgcatgttcagaggaacgaaggaatgagtcccactgtttgccattttcaacaacccaaggccgaccacagagaggaggtcacagctgtccctgtgaaccatgggtagagtgctggctatttcagtggccaaactagcatttcataccagtgcttctctgtgtcttttcatgatatatcaaatttgttttttaaaattatttgggcaaaaatgatacattttcatggggtacatagtgatgtttggatccatggaatgtatagttatcagatcagagtaattaacatatccatctcaaagtgtaacatccatctcatatttggcaataaaattcccatggagagcaccgtgtcattttttaagacataggtgactaggggcatcccccaagtctgaccagccgctggggtggggttgacgctactcaatagaagccttgtggctatgactgccgggggcagctccctgtagctacagctgagcagcaagtgccacttttattgattggcttcataatgcccttcagattcattcagaaaaatgaactttggtaaatactgattttaaaaaaattaataccttaatactaagatatgaatattagaagtggagagagtcgcgcctgtagatcggtggaatagcaacattaaaacaatattttagtcattgttgggtccagccccattttacaggtgggaagactgaggtccgcaagggtcaagtgactgacccaaggacacatgtttagagccagtttggcaaaactgaagccacaagtcctggttttatttcatctcttccaagatcttgcagctggttaccaaaaatgatttgcattttatgtgcatgataaatgtccccctggaacaggatgactggaaccctcaggttccctcgcccacgcaactgtgcccgcttagtctgccatggcccacccaacttctccagcagactcctgtaggactccactggagcaggcagcaggaaggaccccaggccctgagctactgggagtcgggggatggcacaggaacaaggctgctgagaaaggaggggtcttggcctgtccagaatgtggccgatggcccagcatggtggctcatgcctgtagtcctagcacttggggaggctgaggcagacagatcacctgaggtcgggagtccaacaccagcctggccagcatgacaaaagcctgcctctactaaaaatacaaaaattatctggatgtggtgttgtccgcctgtagtcccagctgctcgggaggctgaggcaggggaattgcttggacccgggatgcggaggttgcagtcggccgagatcgcaccactacactccagcttgggtgacagagcgagactccatctcaaaaaagtt

SEQ ID NO: 1166 - DNA, 2040 bp, Homo sapiens
ttaaagccactcaaagctgagtggtatgggagaagtctgtggtattatacaatttgaggaattcaaaaagttccacattactgccaggcctgctaaagtaatttggaggaatttatttactatcatgcttccttgctaccatttacaatcactgatttgttaaaactagatgttttgcagtggaagtggagattgtatttagcctctgaggtccagccacggttctgctggtgccggcaatccaggggttttggctcctggggtctcttgtcaacatcatctctgggtagccagttacccccaatgtcctttttcagggcacagggtgtctggccagaatccccacttagcccaggacctggccccttcacctattccctcttattctgcatctggagacattgccttctcactggttttgtctcatcccagaaacagtctaaagtctttcaaattcagaatcaccatctgcttattggatattttctcctgaagatattctgagacactcccggaaccagatatttgtcactgaaaattttaatttattccatattttccaaatgccataatggagtgtggagatacaaagatgaataggatttacccctacccaccagaggtgtgcaatctagtgtgggacacagcgctctaagtatggaatagtgatagcagctagcacctattgagccctgaccttggtaggtacggcagtaagcccttgacataacttactccttgtaatcctagccagttctgtaggtatcagtatctccatttcctaaatgaggaaagcaaagcacaggaaagttagataacttgcccacagtttttctggtgacaagtggcaaagcagagacttaaaaccaggcaatccaggggctttaagtgattcttaaatattaagtgataaatgcatttaaaatgtgtccggaatgggctttgtgaattccagaaagggaactaaattctgcttaaaaagagaaggcttctcaaagggagtaatgtttgacttgagacccagagaaggagaaaggaaggaagcttgcagaggagccttggtgacaagaggcatgctctattgtgtggacagtaggaataggggagaagccttggccttgtcactttctgctttttggtttatgcagttgtctctgcctaagatttttttctacctttgtttctgcctccagttactccccctggaagtgtcactctcttttaaattcagagagccttgtttatggcactgatgtggtgcccagtgcattctgctttgtactaaatatgctgtatctcacctttgtgtcagcaccaaactgtgttctttataattctgcagcttctagtacatttgtgcatagtagcaactcaatgcacatttgttgaatgttgaatgaatgctagtcaaggcaagacaagcaaaattctcaaataagtcaaaataatccctaattatttccagatggaatggtaatcaatttgcttcaggaataaattagccaatggatgtttgataacataaccgaccctaagtaactcgatttagctgctgaagccagcttttaaagatgcagtttatccactggccatgggatatcggccatgattactggagcaagccctagtaatacaatctttatataataaatataatcttactaaatgtcagtgagaattatctttatataataaatacagtctttaaaattgtatttatatttggcatttatgcctctcagcactatgtaatttcttattagaagtacactttaacttgagaattccattagaatcattaaattttctgaatagaaagcttaacagtgtttaaaaataaatttttagtggcttcatgatgtcaaaacaatcacttgaaagctgaaaaatatgttaaacctacttttgtatttatgtcccagtttgcttttttcaattcacaaaaaaagatttgacttgattacaaagaagaaaacacagaaagagcaaaaaagaaaagaaagatgaaaggaaggaagaaagggagacaaaaaaagaaac

SEQ ID NO: 1167 - DNA, 2192 bp, Homo sapiens
gatgccgctggacaagatggtggatctgagtgggagccagttacgccgcttccccctgcacgtgtgctccttcagggagctggtcaagctctacctgagcgacaaccacctcaatagcctgcctccggagctggggcagctacagaacctgcagattctggccttggatttcaacaacttcaaggctctgccccaggtggtgtgcaccttgaaacagctctgcatcctctacctgggcaacaacaaactctgcgacctccccagtgagctgagcctgctccagaacctcaggaccctgtggatcgaggccaactgcctcacccagctgccggatgtggtctgtgagctgagtctccttaagactctgcatgccggctccaacgccctgcgtttgctgccaggccagctccggcgcctccaggagctgaggaccatctggctctcgggcaaccggctaactgactttcccactgtgctgcttcacatgcccttcctggaggtgattgatgtggactggaacagcatccgttacttccccagcctggcgcacctgtcaagtctgaagctggtcatctatgaccacaatccttgcaggaacgcacccaaggtggccaaaggtgtgcgccgtgtggggagatgggcagaggagacgccagagcccgaccctagaaaagccaggcgctatgcgttggtcagagaggaaagccaggagctacaggcaccagtccctctacttcctcctaccaactcctgaggagcttcagttgcaagtcaatgccaaggacccaactgcagcatgttctggaagcctctccattggagtggaaaggatggctctgggtcatttgggagtggctctgctagtagagactgatggagagagccaggtggaatgccataaatcacactgagaaaatatttctggcaaacagctcctcttccagaggggagttgtgtgccaatgatggcatgacaatccagagatcataacttctttgcaagaaaacagcttctccacacatgtattttgaaacactgaagagcaaaaggggctgggacactctgaactcctgcactctccagaagtgactggtcatgaggctcatgagctcctcaaataaggtatttgccatagaactaaatattctggtggtctgtctctttgcaggacatattttctttactgtaaatgaccataaacagtatcaatgtatcactgaggccaccgaaaaggacatttctacctaggcaatcagtcagattcacagaaaaaagttgtttgttgttgtaaaggctcaagatgaaactctttccccagcagtttagtgcctgctgaaaagatccctgatggacaatacttcttggtggactccagctgccccttttattattattagagacaaggtctcactctgttgctaggctggagtgcagtggcacaatcatggctcactgcagccccgaactactgggctcaagccttcctcccgcctcagcctgcccagtaactggtactacagatgtgcacacctggctaagtctttaattttttcgtagagatgaggtcttgctatgttgcccaagctagtttcaaactcctgggctcaagcgatgctcctgcttcagcctcccaaagtgctggggttacaggcatgagccaccacacccagccttcagctgtcaccttaaacttgacagtggctcatgctgatttagttcattttccctaaaaggtttgtcccaagatctgctcccaacagttgactgtcactgacaatgttggaagtcatctggaaaagagaacctctgtggtaatgtggtctcattaaagtcaagccttgttgtgattcctgtctacctccctgaagcaaagcccttctgtttattcacactaatgagccagagctgagctaaattgaatccctgtccttggaggaaaaccacatttccagaagcatgttagtttaaaggtagtaggtgagaaatgtgttctcttgaaacaagcactttgaaatttgaataggaagttgtagtgtatataggaagtctccgcctctttcgcctagtatctctgcctttgtttcaatttgttttgatttttacagactgttttgacaatgtataaaccaaggtattttgttttttggaagtatgtaaattgtgaccttcccacaaatatataaactttaaag

SEQ ID NO: 1168 - DNA, 2915 bp, Homo sapiens
tattcaaccaataccaggtgcactctgtctcccctcggccatccttcccttgcttcagacctaatgacaagtgtggcacatatgtccactttcaggcctcacatctgccaccttagcaagacatcacctcatccccttgtcactaggaagagggcttcttccccacatgtcgtcatagtgctcacctctgggctgaaggggaaagcatccctccgcttaaggccacatctacctgtcattttccatcccattcctctcccacgtttactgggtctttcctcctgtagtattccccctttcgctgtctcagtccctccctttcccccaggctcttcttcctcagcaatgtgcagtctccctttcttactgaaaagaaagacttaacccagaagggccaacaagtcctggctgcctatccttcctccccagtttttactccctcactctgggtcagttttcttttctttttttctttatgtgtgtatatattatatatatatatacatatatacatatatatatacatatatacatatatatatacatatatacatatatatatacatatatacatacatatatatatatatatatatatatatatatatatatataaaaaatactttaagttctagggtgcatgtcagttttctatgcttcaccggactatttccaagctgccacaatctcccagtgaccaaatatgatgatctatttgcagccttcattttgcttaatctctcccttgaaattgctctcttggtaggtggatcctgtttttccttcaaagaattccttttcctgttgcatactggttcccagtttttccataggcctcttttttttcttatttttttatattgaaaaattccacacatccagaaaaagttgaaaggctagcacaatgaatactcagatacatactctccacttggattgaatagttgttaacattttgccagatttactattctctccaccccatgcatgtgtacatagaatgacatttcgacccctgagtattaccacatagatttcctgagcacaaagacaccgttctacatgattacattaagatgatcatgcctaaaaatataaacagtaacttctttatagcctctaatacagagcccttaatcagtattcaacaattgtctccagaatgtttgtctttaaaaacaacgacaacaaccaggtcccatcaaggttcatacattcttttggtttcaactctagtcactttcagtctacaacaaccccgacatattttcccatgatactttttgaagcatccaggccagctgtcttagcaaatgtcctctattctggaagtgtctgattgcttccttaggcctatgtctacactccactcgtggctcatatccctgcagagttgtaatctcctctgggccagggactcctgaatatctccaggccgagtgttctccccgggcctggagaaaaccttcatgcccaatcccttgctgcatgtctccacccctccttgcacatcctgcctctatgagtggacgaggcaaatctactcaaccccacatcccacccctcacctgataactaacatttactgggcactaacaatgtatcaggcacatactacacacttaacatgcattgctttcacataccagctccatggtaacattgcgctggctttacagctaaagaaactgagctagaaaggggttaagtatcctgtacaagatcacagctggccagcaatagaggtgggatcccactgcagacagtctcccccacagatgccatgctcccactgtaccaccatgtactgcttcctgagatctctgcttccttcagtcgacccagctgacacctgtttccttcctaactccaactaattaattccagttaatggaattgactggaattagtgacattaatatttactgagcattccccatgtgtcatcagagctgtgctaaatgctttacaagaataattacctgccataaagcaaccctatgacataggtgctactatgcccattttgtagatgagacaggttcaggggagttagtatcaccttcaagtcatacagtggctaagaatctgtggtctcgctgaatgctgggcgcctgctctgctaagtctatttctacaaaacattgcactgccttcctgttgcctgccaagctcagggcccatttatcatgcatcttcccatccttgtctcccccaactgtcccttacctgagtcacaatttcgccaaagccaaagggattgtcctaagccaatgttgatttatcactcttcctgctcaaaagcccccaagatcacctatcaatcacctccttgagtgcaagctttgactctgtcacctgacattcaagtccccctctgcccccatgccagtcttatcccctcccctacatatgccctatcctgcagccaaattggactctgttcttcctgacaagacctggtattggcatctctatgcctcagtttgccttccctccactttaaaaagcctcttcagtctcgatacaaaaaacatcccacacatgttctaaaaccatgctttccttgatttctcctcatgtcaagacatttcttacttctctagtctcctagcattttgtgcctcacaaccctcaggacaggccagctagtgtatggctgtgggtttttatctcacctcccctgcctgaccctgagcccttgtggggagtatactcaccctactcctacagtgccttgcattccgtagctgctcagtacattaacccattcaatgtctttaagatttttacaagttagttttcctgtaattactaatcatttatctttaattctgagtaaaattcacaacaacaaataaaaggaaatagtagtaattttttaagctgtttagtcaataaagatttaatgcgtc

SEQ ID NO: 1169 - DNA, 1809 bp, Homo sapiens
cttgtactgagtgacctttcaggcagaatgtagactgagcgctcctgctactgctgcctgttgctgagaggaagaccgcagaaaattctggattcaaacatttattgctttttttgttttgctttgtttttgttttctttccttttgccttcagaagatgaacaatgaaaccacaaccctgatatccttgaaggaggcaatgaaaagagtagaccacaaactccaagcgttagaaacacagttcaaagaactagacttcaccaaggataacctgatgcagaaattcgaacatcatagtaaggctttggcaagccaagcagcccaagatgagatgtggacagcagttcgggcactccagctcacttcaatggaattgaatattttatacagctacgtcattgaagtacttatctgcttgcatactcgtgtgcttgagaagctgccagacctggtgagaggtcttccaaccttagcctctgtactcagaagaaaagttaagaacaagcgcgttagagttgtatgggagtccatactggaggagtgtgggctgcaagaaggagacatcacagcactttgtaccttctttattgcacgtggtaacaaggcagaacactatactgctaaagtgaggcagatgtacatcagggatgtcacgttcctaattactaacatggtaaagaaccaggctctgcaggacagtttgctgagggctgtgcaggtaattgagaaggggaaagcagttaggacccctgaaaagcaaaagtcatccctcgaagagttgataccatctgtcaaaaactaacctgttaccctatgacccagtgattccacctacagtaatttatcttggaaacagcaaaaagtatgcacaatttattatagtcttatttttatagcaaagagtgagaggatgttaaataaattatgacaaattgatacaatagatactttctttgcagccatataaaagaatgaagaagctctttgtgtaatgatatgaagtgatcaccaaatgtattgttgttttcaaatgtttatttccaatatacattgctaagtggaaaaaaggtgacaaatatatatatataaatatatatataacacatattagtttacatatccataaacttcttctgcagagatacacaagacagtgataacattagttgtcaggaaagaaagctaagaggctaggggtcaaagacaagaggaagtcttttcactgttaatccattttttacattttcaattttgaaccatgtgaatgtattacctatttaaaaaataaacaaggccggacatggtggctcatgcctataatccaagcaccttaggaggccaaggtaggaggatcacttgagctcaggggtttcagaccagcctgggcaacacagtgatagcaataggaggcaggtaaattcctaggcagacagggaggggtccctggtgaaactcaaccttcaagccaaggacagtctaaagcctgaaaaccaagctatgagttctggataaatccatgagccagactgagagctcccattctcgtctggcaccctctctcctgattggtccttacccttcacctattttatacatacctacccttccgcgattggtcctctacactatcgtgcctatttctgaatggtgctttgtcaagcatagccacagaccaatcagcatgcacttgcccatttctagcccacaaaaacccatagactcaggctcgtggccagcaacccaccttcgggtcccctctcactgccaagagccgttctgtcactcaataaattctactttgccttactc

SEQ ID NO: 1170 - DNA, 2770 bp, Homo sapiens
atttctttccagtgttgtcgtgtatctattatgtctcgtgtgtatcctcgtgtaactattatgtattacgcatgtcatgtatgcatttctagatatgaaattatacagtttggtgtattattttcttcccttagccattctagaaattttattcaattactgacaactacaaattatcattttcaatggttttgtaatattttgcagtgtgaacatatcctaatgtatttagtcatcgccctgtgattgacatttgggttgtttctaattcatatcactttgaaaactttggaacttgactcttctgccagaatatggctggcagggggctgggctgcctccacactctggggagagaggccaacacttgttgccaggactagggcagaacttagaactgcaaggaggtggcagagtcccctgcatagtctcctgggtttgtccatcacagcttggactgaggctgactgccctgatcaagtgttcatagttggctcagtaggtacatcaggggtgtcactggccaggcatgtgggtgtgctgagggctggtcacctctggtccgcagaacctggttgaaggggatcctggcacagccaggtagaggcagatttctcagtgggagagtgctgccactctgtggaaacatttcagaagtgcatgtcacaagggccacattctgctttcactctgatcagaaagcagagatcaaaagtcaggtcacagaactcacacacacactctcttgcacacacagcaggcaccttcaaaggcataaatgccccttgctgctaacctgtgggcgaggaatgctgtgacgttcatgggtgtgtttatttctattagccttgatctcagttcctaaatccaggtcacacaacaaagagggtagtatgatggcatacttcgaattttagatattgtaaaatcgtggcctttttagagttaaaaaaattttttaaagttaatcccagtctaactttgtacttacagagaagctgtttcctttgcctacttccataaagcttaacggcagaggcacggccgggagttcagcctccttattctctaactacctctttcctgaatggtgatgccactcaaatgctttcaggggctttaccactggaggcttttgaattaatgtgtagcattggcatagatctttaatttttccatgtagggaagcaatttctacttttttagatggtgccactttattttccttgtattgctacatttctttaaaatgtcttatggcataagtgtagaaatatacacattttcaaggaacattgaaattctaatttgtaactttttcatgaaataatgttgtgacactcagtaaagattcatctggaaccagaaatctctgacttagggccacagtgactaaagtgattttggtccttgagctttttttggaagttgtgagtagagtgactttatgtctagtagcattaataacgttaaaaatgagctggcattgcactgtgcacagagggtcacacagacagagtgaaaaatgtcacagagagaagtacccgaaaggacatgcagatgggagatgaattccttcacacactggtctttctcccttttgtgaatctcacaacaaatgtcctcagttatagaaaaatgtgtgtgagggtgtgtatgagtgagtgtgtgagggtatgtgtgtgtgcatgttgtaagaacatgttagagtgtgagtgtggagtgtgtctgcatgtgtgtatgtgtgagtgcatgcatgcacgtgtgtgtaagagtgtgcatgtgcatgtatgtgagaccacaggcatgagatatgtgagaatgagtgtgtgcacatgtgtgagtatgtgtattgtgtataatgtgcatgaatatagtgtgagagcatgagtgtgtggatgcgtgtgcaaacatgtgaagtatgtgtgaaggtgtgtatgcatgagagtgtgtgaaggtgtgtgtgcatgagtgtgtgtgaaggtgtgtgtgcaggcacatgtgagttcatgtgaaagtgtgcatgagtgggcatgtgtgtatgtgtgagggtgtgtgtgtaagtgcatgtatgcaagggaatgtgacagtgtaaaagagtgtgagtgtgcgtgtgtgagtggtgaggatgtgtgtgcgggcacatgggtgtgaagcatgtgtgagtgtgtaggataatgtgtgggtcagtgtgtatgcatgtgtgccatgtatcctctccccaaacagaccatagactcctcaagggcagagactatgattttctaactcttttcctaatttaagggtaagcatagactaataagttgatcataaaaattggtaacaattggccgggtgcggtggctcacgcctgtaatcccagcactttgggaggctgaggtgggtggatcacctgaggtcaggaattcaagaccagcctggccaacatggcaaaaacctgtctctactaaaactacaaaaatttagccaggcattgtggtgggagcctgtattcccagctctgcgttccattggcttgaaatgcctggagcacctcttcttcttcaagctcatcggggacacccccattgacaccttcctcatggagatgttggagaccccgctgcagatcacctgagccccaccagccacagcctccccacccaggatgacccctgggcaggtgtgtgtggacccccaccctgcactttcctccacctcccaccctgacccccttcctgtccccaaaatgtgatgcttataataaagataaacctttctacacatg

SEQ ID NO: 1171 - DNA, 2293 bp, Homo sapiens
ggagtggggaggcggcaagaggacctgcggcaggccctcttcggcagtctctccggcccggtttccctcggcgtgctactgtgcgctcgatccagcaccatggggaagcgggacaatcgggtggcctatatgaacccaatagcaatggcgagatcaaggggtccaatccagtcttcagggccaacaatacaggattatctgaatcgaccaaggcctacctgggaagaagtaaaagagcaactagaaaagaaaaagaaaggctccaaggctttggctgaatttgaagaaaaaatgaatgagaactggaagaaagaactggaaaaacacagggagaaattgttaagtggaagtgagagctcatccaaaaaaagacagagaaagaaaaaagaaaagaagaaatctggtagggtgagcaaaaattttccatttttctaaacgttacaattaagagccaacaaaaaaagtaagaataatttgtttaacctgtatgctaaaggtagcttaaactccagatgagtcaaggaacttagaggttctttgattgtgaagagtgattttgttctatcactgacataaaaaacggtgccaaccaccttataacgtagtacattttctgttgctatttaaagagaaagattggtgaccatggccacatatgttaacttgttgagcttttgtacagggaacaagtatgacattttatattttcatatttatgacttatgaatatggcatctgtttctcagacactagattgatttcactaagtatttgagagactttgtaaaagaaaaacattctcgcatctcacaggctttaattgttttgtgcttggtcaagtattcatcttcttcttcatcaagctctgattcttccagcagttcttctgattctgaagatgaggataagaaacaaggaaaacggagaaagaaaaagaagaaccgttcacataaatcttctgaaagctccatgtcagaaactgaatcagacagtaaggatagtttaaaaaagaaaaagaagtcaaaagatggaactgagaaagaaaaggatattaaaggactcagcaaaaagagaaagatgtattctgaagataaacctttatcatctgagtccttgtcagaatcagagtatattgaggaggaaaaaacaaaaaagaaaaagaagcataagaaacacagtaagaagaagaaaaagaaggctgctagttcaagtcctgactcaccataacattaagaaaaatcaggattcccttataaagaaagtgcaatgtctgaggaaatttcaactgtgaaaactacaacatatttactaaaatgcatgaattttcttgtttttggaattattcctggactattcagtagccactcagatgccactgtgtgaaagggccataaatgttgcctgctgcttgaacatctatttttttctcttccagtgcttgataactctgggagataatacactgcagtcgtactagtggttaagatatttgggaataaaattaatacttttgactagaagcgtctaaggataaaccaacagaaattgaatctggatacatctttaagatgtaatcagaaatgaccagatgactctagttagaatttttgaaggagggattacattaatatttcaaaacccttactctgtagataagtgtattttaattttttcccctcgtatacttttatttacctggggaaggagcttttagggttggggggtggtttgctatctctttagctagcagaatagtgtgcctttgatcctcacacatcctgtattatggacacagtagccatgcttcacggggaggtcagagctggctaccagcagtcttgccctttactgagcttagtgtcatctttggatgctgtcatatgctgctttgagtgaaccagagaaacagccatttgcagcatgagaaagccccaaaagctctgggatttacctccactttagtaataatgaatattttttagcattagaatgtgttatgtcatttgaattaattttgactacactttggcttgggagaggaattattttaaatagacattggtactttttgaacttgatagctaaagattctaaaatgcatgttttatactaagttttaaccagtcaggaaaattttatgtaactagtgatagtttatttttttgtatgaattttgtttaggctgcaatgtttagcttttgttaactcctcactcttgctgtcttaagttcattactatgtttaatggcctacttgccaagatatttagcatgtaaaaagcagggttttgatt

SEQ ID NO: 1172 - DNA, 1985 bp, Homo sapiens
tttatagccttccagccttcccctttgctttgatcaactagctcatacaattcatgtaaggttgttttgtggcatgaatgtttggccatgccaagaaagacataggacacagtgggttactatgggattcctaggtagatttgaaacatgttaattgtattaaaccatagagaaaaaacgttacactgcagtggaaagtcctatgagtgttattgggcctcgtttaaacatcacatgaaaagctttttataatacttctatatttgctctgtctttaatcttctaatgttcaatgtacctgaaatcatgtatgtattcttggtttgtgtctttacttttgaatgctttcttctttgtcacatgtgcatagtaattattttaaaagctggcctatttgatatatatactaaaacatggaaagtgggcgtctttattttctcattcaaacttctaaacattgctttttatttttttgctaatatgcatattttcccattgaaataattttgcagtaaccagcatttaaatgcagtgcaaaatactgatgaagtaaaaaagcaaaaatctttcaataatggataaactgaaatcattctttctaaaaatgattaggaccttcgggagaaaaactgggaagcaatggaagcattggcatcaactgaaaaaatgctgcaggacaaagtgaacaagacttccaaggaaaggcagcaacaggtggaagctgttgagttggaggctaaagaagttctcaaaaaattatttccaaaggtgtctgtcccttctaatttgagttatggtgaatggttgcatggatttgaaaaaaaggcaaaagaatgtatggctggaacttcagggtcagaggaggttaaggttctagagcacaagttgaaagaagctgatgaaatgcacacattgttacagctagagtgtgaaaaatacaaatccgtccttgcagaaacagaaggaattttacagaagctacagagaagtgttgagcaagaagaaaataaatggaaagttaaggtcgatgaatcacacaagactattaaacagatgcagtcatcatttacatcttcagaacaagagctagagcgattaagaagcgaaaataaggatattgaaaatctgagaagagaacgagaacatttggaaatggaactaggaaaggcagagatggaacgatctacctatgttacagaagtcagagagttgaaggcacagttaaatgaaacactcacaaaacttagaactgaacaaaatgaaagacagaaggtagctggtgatttgcataaggctcaacagtcactggagcttatccagtcaaaaatagtaaaagctgctggagacactactgttattgaaaatagtgatgtttccccagaaacggagtcttctgagaaggagacaatgtctgtaagtctaaatcagactgtaacacagttacagcagttgcttcaggcggtaaaccaacagctcacaaaggagaaagagcactaccaggtgttagagtgaagtaattgggaaactgttcatttgaggataaaaaaggcattgtattatattttgccaaattaaagccttatttatgttttcaccctttctactttgtcagaaacactgaacagagttttgtcttttctaatccttgttagactactgatttaaagaaggaaaaaaaaaagccaactctgtagacaccttcagagtttagttttataataaaaactgtttgaataattagacctttacattcctgaagataaacatgtaatcttttatcttattttgctcaataaaattgttcagaagatcaaagtggtaaagacaatgtaaaatttaacattttaatactgatgttgtacactgttttacttaacattttgggaagtaactgcctctgacttcaactcaagaaaacacttttttgttgctaatgtaatcggtttttgtaatggcgtcagcaaataaaaggatgcttattattc

SEQ ID NO: 1173 - DNA, 1914 bp, Homo sapiens
aaacagttaagtgtgaagaattactctcttgcattattttcatccttcccttttgtttgtttgggatgcgggggcccgagagctacaggtaggtgctgggctatggccgccgccaggacccctcccggccagcagcctcggctcacgtcccctcctcctcccagcatcagtcccgcagcgtggcggtgggaggctgcacctcgaggccacggcccttctccaaaagcacacactcctgctttccgacggcaccctcccctgaccacagctcgggaggtggcacgtgtgagaactctccatccacaggatgtggctctcgcgggacctccaggctcaggctgtctccgctgggtgtgggacctttcctgtggggttttcgatggaggttggctggggagggaggcatcctcagtgggtagaggaccccggggtcctggtgctgctgtcgtcaagatgcggcgacatggtggcagaggaaaggcaccgttacccagcagcacgccagccccgggtgactgtttcctgtactaactaggttatttgcagcgccgagtgaagaggcagcttcaccacccaacccacctgtgggttctccggggtctgcagtctgaggaggctgcaggatgaccagacgccggtcagggagttcctcctgtccagagaagcaggaggtgaactgggcccacctcaggtccgatttcgccacgagcaagaatgtaagatgaattggacagaaaacaaaaatagatgtacaagttgatacccaaagaaagcagaagattctacagtttatagggaggggcacaaaacgtgcagggagtaatgtgccggggggtgggggcaggggccgatgaacgaggccttgatgctgtgtggagacctctgggaaaggctgggagaccttccctccttccacagtggtttctccctgaaggcgattctgcgtgtggttggtcctgctgggaccaaggtggccccttgttctgctcttggccgagtcccctctggcttcatgggggtgttaatgaggctctgcaaggcctccttaaacacagtgtggaaatacaggtggtgctgcaggggcagcgagaacggggacctctgctgctgggtctggcctaggggtgaagaggacgggaggagggtggcgtggtagctggctgcgcggggcctggtgacgggaggggccagaccgcatgcagcattcaggaccagcgtggccctgggtgttccgcctgttctgaccgtgtggtcgagtgaacagagcatgcaggggagatgcagcaggttctccccgacgcggaagagcaaggggtccccggttcctggaggagcagcgggattgccccaggctctgggatcgcccacgggggcagcgggccagcacccccagccgcatctctgcacagccgtgctgcacaccttctccgtcacgtgttggaggtgggtctcagcaccagcacatccacattgatagcttaaaatgggacttttctcccgcctgtcttactgttgacccgcccccatgcagcggtggggaccccactgcagggactccaagagccccatcctgtcctcggctccagcctccatcagcaccagccgtgtccttgcagccctgactggagcaactcccaaactctgctgcccggcaggtcttctgaccctgcccgcggtgatggcaccctctggaaggctggcccaggacggcacctccatgctggcagcccctgagtgtagtgtgtgttctacacaaaagagccaggaagtcatctgtgatcattgtttaagggactgtgattaacgtttatgaaatgttctgtgctatgcgaagaaaccactgaatgttagggaaaatattaaatactgaataattatacaactgttccaaataaagtcttaagaagaaacttg

SEQ ID NO: 1174 - DNA, 2479 bp, Homo sapiens
cttcctgcaactgagtccatcccgcctgtgactctgtcctcgcctgtgactgactctgcccctgccctgtgactgtctcacctgtgactgactccgtcctgcctgtgactcagcctcttactgactctacccctgcctgtgactgactctgccctctcctgtgactgactctgtccccacctgtgactgactctgtccccacctgtgactgactgtcctcctgcaactgactctgtccccgcctatgaatgtctttcatgtgacctgcctcaggcccagagggcagtgagtgtttcgcgattgctgctggtacctggctgtgccggggtatgaatgagactcaggccccctcccttgtcccctctttgtggaactctgggcgagagggctggcgtgcttgcccactgcctgttcctaggtgccagcagaacgtccctgctgggtggctcttgtcctgcctggagaggttgcgtggccggggagagggcggcgggcgacggagccactctgtgcctgtggtcctggtgctggaggccggggtgagaaggcgcaggcttcttgtctccaccgaggcctcagtggggctgtttagctgtcgagtgcagcacttcctgtgcctcgaaagacagccccgtgtagtcagcatggcgcccacatagccagaagggcacgcagcccagggcagagtggccacagggggctgggctcaccccggctgccctgagtggcccccaacccttccttgacccgatgctcagacagtgctacaaggaggacggcagctccaagagccctgactgccctgtgtgcagccgctccctgaacaagctggcgcagcccctgcccatggcccactgtgccaactcccgcctggtctgcaagatttctggcgacgtgatgaacgagaacaatccgcccatgatgctgcccaacggctacgtctacggctacaatgtgaggggggcagggcaggggggccaggctggcacgcatcgccatcgggacagggctgtgtgggacgggcagggcaggggggccaggctggcacgcatcgccatcgggacagggctgtgtgggacgggcagggcggggggccaggctggcacgcgtcgccatcgggacagggctgtgtggggcgggcagggcagcggggccaggctggcacacgtcgccattgggacagggctgtcctctcgccccaccctgccttagcttcgttcgaaatggatgaaggggtgggaaggacaggcgaggtggccccgggatttctttggcaggtgtgccttcgggaaggaactttgcctgagaggatgagtcattccctggtggttcattgtggggattttccatggaaatccgtgtgtacgttgtagtcgcttgccttaatgcattcccggttttatttttcagtctctgctttctatccgtcaagatgataaagtcgtgtgcccgagaaccaaagaagtcttccacttctcacaagccgagaaggtgtacatcatgtaggccccacgtcgtgaagcgcacgcctcggggacgggctgcagtgggcggggaggccacgccttcctcctgtcccacgctccagcctgccgcggcgtttctgtttcttgcgaccaaagatccgtgagcaacgataaatactcttaggaagagagaaaataaggtttcataagtttgtacttgaaaacatttggattggtaggattttgtaacacgtcaaccatttgatgcttctgaaaagtactttcaacttgcgaaggaaactcttctttaaagactgacctaaacaccgagggaaacttaagaacgtttaaaatataggagtccgtgatttccctgtgttttcagtttctttccttctgtgaacgatgagacttggagaacgggctggtccttcaccacttcctgttggccctggcctggccggggaaggtggcagcggcaccggactgacctgcagtgacccgcgatgccgcgccacgagggacacttatggcttcattcgagagctgctgccaaaacgcctggcgccgccaccgtcgggggctggcttcgaggacgcccgcctgcctcgcgggtcgtgtccgcgggactgtgttcgtacgtgcatagtttcgatatcacatcgcggggctgtgttcgtagctgcgtcgtttcgatatcacaccctctgtgtgccgccttacttcctgcttcgagaatgtataacgtggaaatccacgggaccaaatttctgcagaggccttgccggatggttccataactgtagagtctaattgctatccattacagaaattaatcgttcagttgaaagaagtactgatgacttttcaaaacaaatgaaccaccgtagctgacagagaaccgtatcgtagaggtttgtagttagtgcttatttttgcatgttgatgttgactagctaataaactgtaaatgtaaaccatgcgaataaaatggttttctatttctcaaaaac

SEQ ID NO: 1175 - DNA, 2328 bp, Homo sapiens
tataaatactgcagtgtatgtatatgtgtagatacacacaaagctaaagtatacattcaccaagataaactgtgcttgccagggctttaatctccccaggaggctgttattactggagtccggccccagagcgccagctgaggagaggaagtgagactctggtgttgggaggctgggcggcgctcctctttgtctactctttgctttttagaacatatacatagctagcattcacatgtggccacagatgaaatgatatgcttgactcccctaaaggtgcctttcttgtcagtgtgttacttcacggagatactttaaccttgatcgtccgcagccatactggattcccatggaacaagagagcaggaagtgcttccatcatattttccccgttcagtttgagcaatccaaaatggagggatcatgacaaaggaagaaagcttcctctcgtgagcttgcattgttttagttctccttggcatctagtctgacttctacttatggtctggaccagtggttctcagacttgcacaagcatcagaaacacccagaaggctcattcaaacccagattcctaggcctgattcccacagtttctgactcgtgaggtgtgcatggtgccccaaatttgtttttctaacaagttctcatgtgacgctgatgctgctggcctggtttggggaccatactttgagaaccattggttcagaacatgaggctgcagcgcgccaaggtttttgcattgttttctattaaggaatagcctataagaaataggtttctagctttttaattttgttaccagcctagactctatgattgacagggtgaccagctgtcccagtttgccctggggcacaggattattcgtgctgaaaatgagaaagtcctgggcaacctgggatgaattggccaccttcactattgatccaacttcccaaatgctttgtctacattgctggtatctggctcggaggaagccctgtgggaaaggctgtgagtgtgttgccccaggttccacaggacacttagagtttgggggacacctgccgtcaacgcactgcaacaatctttagggatgttaattgttcctcaggaggcatacgtaggaatcacatccaccttaaacatgcccacttatggcatttgggctcacacagccaaacagctgccattgtctgaagtaacgcatgggctgttgggctcctacggtgtgacagacatacttctctgcatcatccatgtaccagcctgttttcttctcactgcagcccaatcagctaattatcatcatttccatctttcaaaaacaaatgcttaaagatgccattatttaccccagggtcacagatggtaaaagtgacagaaccacaggccaaacacttgttgttttaccatgtgactccaaggagcatgaaatctgaggctcttcatccatgagattttccagccactcacgtcccttcctctgttggagatgaagcctctccagagtggaaggcagtggacctagcttggatcaggatgcctggactttgctcctgcttcttccagataccggctctatgacttgtatcaggtcatcttttaacccctctgagcctcactttccgcatctgtgaaatggacatcatgatgtctgccttaccttctgccttagcttgtcttgaggagaaatagaaatcatgtctatgaagctgtcagtaacgtgtgaaagcgctgtccctatgagcatatatgtgttaaaccttctgttattccaaaagagaggtttggcacatcaactcgaggaatatttacttaagtggaggagaaacaaagcaactaaagtagccaaaattagcagtgaacagaagaaaattctcaggaggaaaatggttcttcagctggttttgcaaggattagcaacatgtgtgtcccattccagagcagcaaatcacggcgtaggccctagccattttgctcagggaggactgcgctcttcgggaaaagttctgttgcaagtcacagattataggtgtgtggtagaaggccaagcctgagctgtcacttcctcagtgtcaaagggtctcattacatttcattacagtgattttctttttgctgaaacattaggaaccctggagcactgagccaagatcatggaacagaatcaccctctcctgcatgtttttgtttctgtctcctgcttttctgttctttttccactttctctatgtgtgagttgacttggctgcctgtagcttcatcgtcaaagctggtccacgtgggttcaacttggtgctctcactctcctccagcattgtttttgtcatcaaagctaaaatt

SEQ ID NO: 1176 - DNA, 1873 bp, Homo sapiens
atagttatttgtttgatcagttcccctcctgtcatcaccactggcccctctcctatgtggagccttcctcaccctacttggactcttgactccacatgttacgctgctgccccagcgtgggcgtctttctcaccccgcacagactctgacatcccacactgctcaacgaccctacatggacatcctcctcatcctgcttgggctctgacaccctacagcaggccaccccctgccatgagtggtcaccctcctcaccctagttgggcctgtaaactccatattacttgtccccatgcatggatacccttttcaccccacatggcctctgacaccccaccttggacagccatcttacaagggagcacttcttcccctgctcaggcctgctggcccccagcatggatgctcttcttcactggtcctgctctgacacccccgggagcttcctgtgcaggcgtcttcctcaccctgcttgggctttgacaccctgcacagacatccttctctccttcttcaggctctttccttctctgagccaccatagctttctcctccacatacctgatggctttagtctgatttgttagggaaaggagggctacataggcctggccttgagtcttgactcttctgtttaccagcagggtaatgttggcaagttgttgttcttctctgagccttgattctgtctttggaagatggaactgataatagcctcttttacagtggcatggcgggggggtactaaatgcaaagcacccagctacacaaccatataaaggaggcattcaactactaaccgttgccatctttttaattttccctgggcttagcctcaactaaggctgccgaagcctttatctctgactcttgcccttctgttaatcttgcaggtctactttgaggatgaggacagggcagaactataccgggtgcctgccaagagcaccttgctacaggttctacagcaccagaggtactttgtaaaagccctgacaccagcatttttggtctgtgtaggatcctctcctttttgcaagaattttctccgggggagaaaggtgtaccagatacgatgactaagccagggcccctggatctcctcccttaccctcctctgctgggaacctagcacacctgaatcagctggacatactgctggagtccagtgctttctttccgtcaccctggggatagtccttcctggcatcgtggtgggggaggagcctctggcttccctaaactgcagcctctctggctggtcttcactttcctcagttgatataaaactctgggtcttggccatgatgtccttggactccatcgctaaagggaccatctgctgcagttaccacagcaactgacctgagcggcaccctggtctgtggagatggactcaggatccagtgacatgattctgaacttttgtggagtttgacaccttagagaagctacccctcaaactgcacatctacacacaaacaaacaatgcataggattccaaggctttaaagctgagagaccctggcctcaagttatttcatgcgcacagagggaagccatgtggggttgctgaagatgccttgaggtgaaatgggggcaggaaagccacatcttgctctgcatttataaagaccgtacaaactgagatccttggtacccctaaaaagattgccaattttcttcatctttgccatatggaggactgtgacagactttggacagtggcctcttgagttcctctgcagttttgacatttaggattttgtgtcttttaaactggaaaatcttctagcatgttgggttgttacagagtatatttttgtctgcagctgtttgttgccccattcctaagaggagtttatccatcctg

SEQ ID NO: 1177 - DNA, 1834 bp, Homo sapiens
ttctctgtgatatggaccctgtggccagcagcagcatcaggcccgagccagactctcattacctccagtttcaaactcagcctcacgtcctctggaaccggcttcctgaagcctgggacaggtctgagtccctggattcctcctggggaggatgggttggggtgaggggcagagttcctgaaggtcctcattcaaccttgagctggagtgccggacagcaggaagagcaggcttgggggtggctgtggtcactaccaccgagatcagaggcagtgaggcaggagaaaggtgagaaggagccaagcttcttggaaagcgattcagatccttctcgccattcccagctggtttctggagatttgagtctgactcattaactcactttttggcatggccacccttcctctcagcccccagagggcccctaggctctgtggacacctgtgacagccctgtcacccatcacactctgccttgcctcttgcgtgactggctaccctggttctgtcctggtgctctccggcccaggaacaaggctgacggctcgtcacccctcagcgtcccctgcattcaccggcccctgcttgcctcccctcgaaggtgccacccagccagagccgtgttgctgtggatgcccatgaggaaggctccgatgtctgggcagttggtgtcccaccgcacctgcactgggctgggctccctgctggggtagagggtgctctgggtcgctgtcggtgctgcctgtcctgtgggactgtggttctgaccccttgaaggaggtagcagaacgccctagatgtggcctcgttgatgagagagcccacagtcactcccggccccatcagacactgcctgccccgcattcagccatccttcctcattaagaccggcctggcctccaacccctgctcaccaggcaacagccagctgagagtgaggcgatgcgctgcagccccggggaggggcccagctggggcggggcggagatgcagtcgtcctagcaaccggcagaggtggaccccgcatttctgtggctcatcaccctgacttcatccagactccctgtattttatctcatagatttctcattctgatgtctgtctcccctactgactgtaacctcttaaggctatagttcatgtattcattcaactggtatttactgggcaccagccatgggctgtgcagacgtcagggaaatggatggggagtgacccctccttcctgcagcgcaaaccatcctttaatatgaaagagacagagaccattgcaaagagtgtgctgggtgcggtgactgtggtgcgacccaggacaatggacgggcgccagcagggttggggtggtctgggggggctgtctgggatgtctcgagtgggacctggaggttgagtcagggtgatccaggtggaggaggcaggcactgcttcagaccagggagctagcggcgctgggaggcccacaggccggaggacacccaggactccagggggtcaggctggctgagccagagccgggtgggggcagagcctgggctgtcggcacagggggctgaaggtgagtgcagggagatggagacagcggcagctgttggtggtgactcactgctactccgatgattggaaacacatgttcccgccgagaggcgcgtttattactcacagccgagggttcttggacgacatggacgtcaacagggagaggggtggggagggagagtggtcggcggtggggtggtggggaggggctccagggtcccttacttgtcgctgctcaccgactctgccccttagagtctgcgacaggatgctctggccatattcctacttgctacttt

SEQ ID NO: 1178 - DNA, 2109 bp, Homo sapiens
atagcatcatgaaaagaaccacaggccagcaatgccacagaccaaagatgagggtggggggcggtggggagtgggagggctgtcaaacaaggtgtggtgttgcaggactttttctttcttcttctttttcttcttcttcttcctcttcttcttcttcttcttcgtcgtcgtcgtcgtcgtcgtcttcgtcttcatcttcttctttcttctttcttcttccttcttccttcttccttcttcttccttctttcttcttctagtctcactgtgttacccagcctggagtgcgttgaggcaatctcagctcactgcaacctccacctgccaggtttaagtgattctcccacctcagcctcctgcacagctgggattacagatgcatgctaccacacccagctaatttttgtatttttagtagaaacagggtttcaccatgttggccaggctgatcttgacctcctgacctcaagggatcctcccgcctcggccttccaaagtgctgagattacaggtgtgagacacagtgcctggcctagactttttcttagttcagtcagagacggggttctttgtcccatggccatgaaaattcaggctcgcagacaatttgaatggtgactaaaacagggttttattgggtgaaaaggaagaaaaggggggaaacagggtctctcactaggccagagtccctgctagagtgcttcccacctggcctttggaatctcagtttccacatagaaagagggggggccaggctcctccccaatgcaaactgtgcaaacttctcaaggttccaccccagtgtgcattcctcccagtgcacaggctggttagagattctctggggaccctctcccgcctggctgtctcagtggtagctgagccaagttttggaaaatgaaaaggagcctaccaggcagaccatggggggaaaccttctagaacatgggggcagttcaggaactctgtagtcttagtgagagtcacacttttccttaaagggtgaaggaaagggcaaagctgggcaggaggggagggagagagggtaggagagagtgccaggtagtaggtcctgaaggaacttgtccaggaggaggaaagacggcctcacagtttcccatctgctagatgggctagtggcaaactagagggctgagtggcaaacataattttagtttgagaggtaaataaacaaataaacaaaaatctcctttcttctcccaaaatttatgccaagaggagagccaccatccacctaggcaacttaagaagaaagtttgatgtaatcttcattaattacctagagatctcatgctatgcatataagatatggaacataatagtaatatcagacacttccatggtgtttaccatgtgcaaggcattgtcccaagggctctatacacaggtgcatttgtagaactcatttaattctcacaaccatcctatggttgtgtaactcatctatttctctttgtagttaagcgacttgcccaaatgtcatgtagcttataagtgacagaaacaggcatggaacctaggcaggctgcctctaaaggacatatatctatttctaccatgtcacaatcctcaccaaaggctttggaaggcagatagcaaacctccagcaaccagagactgtgctgctgtgtctgtataaaactatctctctggcgttgttgagagtaaaaattaaaagtgccaatcaccagagaccccaccttaattcaaagggcaatgggagctgcacattaactgtggctgccctctgcatactgctggctgtgatgtcaacactgtgtttatatgaaatccttcagccaatggcagcatctttaaggcatcagccgtttgcttgcagaatgggcttctcagttttttacgcattttttttttctttctagaactgggttcaggtggataggctctaaatagaataccatgccaatgccaattatattcagaaagtattgcaatttctctttgatgcttatttacattaattaagagcaaacttagataaagaagggtacaagtttaaatgctaaaatcctgaagtgagatactttatagtctggaaaaatatacagaactgactttccttctgag

SEQ ID NO: 1179 - DNA, 2671 bp, Homo sapiens
caggtgctggcttgccttccttctaatgagggtgctatccaggggtggctttcaaagagtgaagggcaggcacctacctcagctcatgccccagtcagctgctcctcaggtggctgaggagggcctgttcccaggaatgatactgcagacaaatataaaggccattgttcccctaggtctctgcctggggaggttgaaactccggaagctgcccaaagtggctgtgcttatgagcgcggccttgaagcccaaggatatgcaattttttttttttttttttgagatggagtcttgccctgtcgctaggctggagtgcagtggtgtcatcttggcccactgcaacctccgactccctggttcaagcgattcttctgcctcagcgtcccaagtagctgggattacaggcacatgccactacacccagatagtttttgtatttttagtagagatggggtttcaccatgttggccaggatggtctcgatctcctgaccttgtgatccacccgcctcagcctccaaaagtgctgggattacagtcatgagccaccgtgcctgcccggatatgtgaatattttatctagcagtgaatgaaggtgtggggtgcccagcaaggagctctaggggtctcagttatgaggacatagcaggaaaaggacagacgagaatggcagcatgtgcatggtcagtgctgcccaaaggcagggcaggcaggaggatggggtgggatggtgggggtcccagcaggctggggggcagggcacctgcccgcctagcacagttgggcgcagcaagctgaggggccagaagaaaactaaagggtgtggtgattccagcaaacccaaggtcagatttcagagcagaaagttgtcacttggagagcagcaagcatctgtcctgttgatgtagtctaggagatgctgtcacatcacctgatactctggagtctttctgagataggttggcatcccatttaccctgtaacacccaaaacttcttatgtcctgttctctacctgggcgttgtgcgtgggctgggaatgggaaaactcgggcagagcagagacacagagggggcgcctgctagagactgcgtgaggagcccactaggagaaccgtgggatgccgggcaagtctgcactgctgcgctctgaagtcagccacagacacatgggtttccaagcgaagctccctccccatgtgatggaggtcacagtcgccctccctgtcatgcctcctttcaccctcccagctgggtcaggtccccagtcagaggcagaggtgagcacagtcttgggaagcaacctgcggtccacccccaccgctcagccccgcctttacagctgcgtgcgcttcagccctgggagggctgattctcacagagctcgagctccttggtggtcctgggactcagctctcctgggtgccggtcaggacccccatcgcagtcccgtgtgcatttgggaaccaagtccttggggcttgagtgtaaatggtccttctgtaagaaagctgattctggcaccaacagagaggctgcctcagatgaagagtgttagcacccgaagggacccccaggcctgtcctgaccctcccacccctgctgtcggcccaacttgtgtccctttcctggaagaactgcttccggcggccagtgtgctatgcttcctcctggctctgccctgcacccccagaacagcccctgggcttacgggagacactagtctctgggcttctgcagccaatcaagctgctgggccctccctcccaagcactggaggaggtactcgttctgtgggccggggcccctccctcctgagcactggaggaggcacttgttctgtgggccacggcccctccctccccagcactggaggaggcactggttgtgtgggccctggctcctccatgtctgagggaactgctctgcttctcctacagtccctgagattctgcagctcagcgatgccctgcgggacaacatcctgcctgagcttggggtgcggtttgaagaccacgaaggactgcccacagtggtgaaactggtagacagaaacaccttattaaaagagagagaagaaaagagacgggttgaagaggagaagaggaagaagaaagaggaggcggcccggaggaaacaggaacaagaacactctgaatctgagggcttggaagcaagttgagggctggaggtatgagcagatgtcgttcacagtgcggagccccaggtgctgctcgggggcagtgactgtgccgtgttgcgtgttctaggcagcaaagctggccaagatgaagattccccccagtgagatgttcttgtcagaaaccgacaaatactccaagtttgatgaaaatggtctgcccacacatgacatggagggcaaagagctcagcaaagggcaagccaagaagctgaagaagctcttcgaggctcaggagaagctctacaaggaatatctgcagatggcccagaatggaagcttccagtgagggggcacaggactgactttttaaaccattgtggactagtggctgctgtctgcctcagtgacaatgtcccagcgctcctatcatgtttacagtcacccttgggtcctaaattaagagttgtgttcatgtaggttcgtgtcgtcgttggctctgagacattgataataaatttttctcaacagtg

SEQ ID NO: 1180 - DNA, 2942 bp, Homo sapiens
tgaagttctacaatgaacccatcagagatgcaagggaaggcacctccgcagagacagagaacccgcaatcgaacatcattgacccgcagggtgaacaaaatggtgatatcagaagaacagatgaagttgccatccaccaagaaagcggggccgccgacctgggcccagctaaagaagctgacacagttagctgaaaaaagcctggaaaacacaagggtaacacaaactccagagaataagctgcttgcagctttaatgattgtatcaacggtggtaagtctccctatgtctgcaggagctgctacagctaactatacttactgggcctatgtgcctttcccacccttaattcgggcagtcacttggatagataatcctattgaagtatatgttaataacagtgcatgggtaccaggacccacagatgaccgtggccctgcccaacctgaagaagaaggaatgatgataaacatttccattgggtatcattatccttctatttgcctgggaaaaacaccaggatgcttaatgcctacaatccaaaattggttggtagaagaacctactgtcagtgccaccagtaaatttacttatcatatgataagtggaatgtcacttgggtcacaaatgaataatttacagaattcttcctatcaaagatcattaaaatttaggcctaaatggaaaccatgccagaaggaaattccagaagaatcaaaagacccagaagtcttagtttgggaagaatgtgtggctgatactgcagtggtactacaaaacaataaattcagaattattatagactgggcccctcgaggccaattatattatgactgtatgggccagacccactcatgttcacaggctccatctgtctggcccactaatctggcctacgatggtgacttaactaaaaggctagaccaggtttatagaaggctagaatcaccctattcatggaaatggggtgaaaaggggattccatcaccccgaccaaagttagttagtcctgttgttggtcctgaacacccagaattatgaaagctcactgtggcctcgtaccacattagaatttggtctggaaatcaagttatgggaacaagaaatcataagccatattatactattaacctaaattccaatctgacaattcctttgcaaagttgtgtaaaacccccttatatgctagttgtaggaaacatagctattaaaccagattcccaaactataagctgtgaaaattgtagattgtttacttgcattgattcaacttttgactgacagcatggtattctgttagtaagggcaagagaaggcgtgtggatccctgtgtccatgggtcgacggtgggaggcttctccatccgtacatatcttaacagaagtagtaaaaggagttctaactagatctaaaagattcatttttactctgattgcagtgattatgggtcttattgcagtcacagctactgctgcggctgctggaattgctttacactcctctgttcaaactgcagaatatgtgaataattggcaaaagaattcctcaaaattgtggaattctcagactcaaatagatcaaaaattggcaaatcaaattaatgatcttagacaaactgttatttggataagagataggctcatgagcttggaatatctttttcagttacagtgtgactggaatacgtcagatttttgtattagacctcgagcctataatgaatctgaacatcactgggacatggttagatgccatctacaaggaagagaagataatcttaccttagatatttctaaattgaaagaacaaatttttgaaacctcaaaagcccagttaaatctggtgccagaaactgaggcaatggtaaaagctgttgacagcctcacaaatcttaaccctatcacttgggttaaaaccattggaaattccactattgcaaattttgtattaattcttgtatgtctgtcctctctattgttagtctacagaggtatatccagcagctccggagagacagcgaccagcgagaatgggccatgatgacgatggcggttttgtcaaaaagaaaagggggaaatgcagggaaaagaaagagagatcagactgtcacagtgtctatgtagaaaaggaagacataagagtctccattttgaaaaagacgtgtactttaaacaattgctttgcttagatattgttaatttgtagccttgccccagccactttgctccagccactttgacccaacttgaaactcacaaaaacatgtgttgtataaaatcaaggtttaagggatctagggctgtgcaggaagtgccttgttaacaaaatgtttacaagcagtatacttggtaaaagtcatcgccattctctagtctcaacaaaccaagggcacaatgtactgtggaaagccagagggacctctgcccttgagagcagggtattgtccaaggtttctccccatgtgatagtctgaaatatggcctcatgggatgagaaagacctgactgtcccccagcccgatacctgtaaagggtctgtgctgaggtggattagtaaaagaggaaagcctcttgcagttgagatggaggaaggccactgtctcctgcttgcccctgggaactgaatgtctcgctgtaaagcccgattgtacatttgttcaactctgagataggagaaaagctgccctgtggcgggaggcaagacaagtttgcagcaatgctgccatgttctttactccactgagatgtttgggtggagagaagcatgaatctggcctacatgcacgtccaggcatagtaccttcccttgaaattaattatgatatagattcttttgctcacatatttcttgttgatcttctccttattatcaccctgctctcctactacatttctttttgctgaaataatgaaaatcataatcaataaaaactgagggaactc

SEQ ID NO: 1181 - DNA, 2103 bp, Homo sapiens
atgccgcggcgcctgcagccccggggcgcgggcacaaaaggccctccggccccggccccggcagcttcgggggccgcccggaactcccactctgccgcctcccgggaccccccagcgtctgccaagccgctgctgcgctgggacgaggtgcccgacgacttcgtggagtgcttcatcctgtcgggctaccggcgtctgccgtgcacggcccaggagtgcctagcctcggtgctgaagcctaccaacgagacgctcaacttctggacgcacttcatcccgctgctgctgttcctgagcaagttctgccgtctgttcttcctgagcggcggcgacgtgcccttccaccacccgtggctgctaccgttgtggtgctacgcgtcgggagtgctgctgaccttcgccatgagctgcacggcgcacgtgttcagctgcctgtcgctgcgtctgcgcgccgccttcttctacctggactacgcgtccatcagctactacggcttcggcagcacggtggcctactactactacctgttgccaggcctcagcttgctggatgccagagtcatgactccatacttgcagcagcgcctgggctggcacgtggactgcacgcgccttatcgccgcctaccgcgccctggtgctgcctgtggccttcgtgctggcggtggcttgcactgtggcctgctgcaagagccgtaccgactggtgtacctacccgttcgcgctgcgcaccttcgtcttcgtcatgccgctcagcatggcctgccccattatgctcgagagctggctcttcgacctgcgtggggagaaccccacactcttcgtgcacttctaccgccgctacttctggctggtggtggccgccttcttcaacgtgagcaagatccccgagcgcatccagccgggtcttttcgacattatcggccacagccaccagctcttccacatcttcaccttcctcagcatctacgaccaggtgtactacgtagaagagggcctgcgccagttcctccaggcgccgcctgccgcacccactttctcgggtactgtgggctacatgctgctgctggtggtctgcctggggctggtaatcaggaagttcctaaacagctccgaattctgcagtaaaaagtgagcctccgccttggaggagactactggttcgcccatctgtttggagtttctgttgttgctattgttggtttgttttcaaatttcattgtgttttcttctttgctcaaggaaggtgctgcaaaaccatagggaaaaagttcactgctacaaagggatcccaacccactggaggctttgaagtagggaggttggcaggggtggtcaagcgggagggagatagtcacttgttcttgcccctggaaaaaattcaggtgatgtctttgacatccagggatttctcaaaggcagtgagtaaaatcccaaataaagccccaaagagtttgcttttccaatcatctgtgccattggtaataaggagtagcccctgtgaggtcaggtacacagtaaagagggtaaatagaatccttgggaacttctgtttcagtctgaggaatgcttggatttgtcaaaagaatggagctttgtaggaaacaggcacaaagacgcaaacccagggcttaacctgctagaaaatgcatggaatgtgaacacaagttaattatttcaaaatgtttttcagatgttatttaaatagtaatatatacattgatttttcataatttatcaaagcctgtggtacgcactgaattttctttgtcacatagttttgaatttcacagccttctgcattgcatacacttgaactggacatcaggggaagctgcttgagagttctcaattactttcttaaacagtgttttctgaaggcgtgtgtcatgatacaactgtgaattctaccttagggactctggttaaactattggtgaggagctcgagtggtttgtatagaccccagatttttgtttactttaatgtattccacaaaacccatcctggtttttgttagtttgttttgtttttaatctttttttttccttctctacttatttaaattgccactggaataaatgtgccttttgaagcaaagtcc

SEQ ID NO: 1182 - DNA, 2379 bp, Homo sapiens
aggagggaccttgataaactagagttcatccaccagaggaggaggctgcaggccttgggcactgctcagcaggatgaggggccactgcagttgagcatgtctagcctggagtcttctgaagaacatgattactgactttatgtataggaatggctgccaatgaagaagagaatattgaaagtcagaagcatgctatcacataactctgcatttcatcgggccgagaaagcacaggttttcaggaccacagttcccatttctcctgttctgcagtcctcgtctgattggccaacactatgggcactccctgctctggtggccactggcagtgggccagggtgagggcagctcacagcccgtctcctctctgttaccttgggacgtcactcagcagttgcatcactggctgctctctccctctgaaacacgaagcccttcctttcttattccaccttagggaagcctgggcctgcgacagaccagaagacctcacattccacagagaagacctcggtttccccccaagctctgtccagtatggagtgacaaatcgctgtacttatgagacaaaggcatgaagtccaggtcaaggcatgacttttcggcagcaacttttctagatgtgaggtatcagtaaacatttatggtgcttctgttatggatacaatacaaggatgtaaaagaaaataagtatgaggctcatcctcctgggaactcacattttcactggggctacaagacccccggagcaaatgccaggcacaagatcggggataaaagcctaactttgagaagcttgctttggctaaaaccgaaatcaattatgaagcaaaggaagtggattagagggagatcttatgaaatcccatcagatttggatcatgctactgagtttttttcttcctggctgtattttaggttttctctcccactgaaactgattaatcgttgtcaaaattcctcccttgtacccttctctctatgggagggctgtcccttggctggcctgggatgcaggaatagcttttgtgcaccctttggtgtccacttctgtgtgtctctcttggtggcactgcttccctatctctgcttgctctgactaccttcaggctcctaggaccctaccctctcaaatttcctcctcccctgcgtccccctttcccattcaaagcccacagcacatctcagttagtgctatggaaaaaactagcctcagaaacgaatattcactgacatgtcaaggtctagtagtttgtagagccattttattggaagggacttcagaaaggaattagtttacctactcatcaggtgaggagacccacagaggggaagtcacctgcctgactcccagagacagaaacagtgctgggactaaaacccaagaagggtcctgactcccaagtcccaggaacttaattttcccccagggaatggcccaccacccacccagatgtaaaaactagagactctgggcagcattctatctctatgccagcctccagtctcctgtctattttgcctccaagatacatctctaatttgcccacttttcttgaacttcacatcaccgatctggtacaagccatcatcatctccttgcttgggcctaccaagacactaatcactgttctttttgtttcgttttgtttgtttttgagacagagtctcattcttatcacccaggctggagtacagtggcatgatctcagctcactgcaacctctgcctcccatgttcaagcgattctcctgcctcagcctcccaagaagctgggattattggcatgcgccaccacaccaggctaacttcatatttttagtagagatggggtttcaccctgttggccaggctggtcttgaactcctgacctcaggtgatccacctgcctcggcctcccgaagtgctggcattacaggcatgaaccaccatggcaggctgactttcattctttctctagtattattagaatattcccaaataatattccattgtgtatatattccacattttgctcattggtttctcatggtccgatctgagctttgggtagatctggctataggcagataatccctgagacatactgctaaatgggaacagcagatgcagaacagtgtgtatgatacgctaccacttctgctggaaaacgtcaaacaggcacgtgtgcatacatatgtacgtggacttggaaaggcatagaccgtctttgagaatactcaagaaatggttatcttgggtaggagagctggtggcgggggacagaaatggaaaggagacttatttttcactggatatacttttgtacattttatggcttattaataatgattttataattatattaccatgatcaaataaaacccttggtgaatcttc

SEQ ID NO: 1183 - DNA, 2885 bp, Homo sapiens
atttttataaaatgatagcaggaggagagatcctgctcttgagtcctcacaacctgtgggtccaactgcagccaggccctgagtgcggtcgtggaggtgacgctggagggaggggagcgcttaggctttttgcaaacagccgggctgtacttgcttctggtgaagcctgtgatgcagtctggatttcagtcagccatcacctttcttctcttcgccttcctttgtctgcattgggaggagtgggaaggaggagggcggtttctggcctggcctttcacctggcttttctgatttctgactcttaccttggtgtggattattccttctacctggaaggtttctgaaaaatgtttaggaaaactacctctttttttttttttttttggagacagggtcttgctctgtcacccaggctggggtgcagtggcgtgatcttggctcactgcaacctccgccttccaggttcaagcgattctcctgcctcagcctccggagtagccgggattacaggcatctgtgaccatgcccgactaatttttgtgttttcagtagagacagggtttcaccatgttggccaggctggtctcgaactcctgacctcaggtgatccacctgcctgggcctcccagagtgctcagattacaggcgtgagccaccgcgcccagtcggagaactacctttattattgttcttgcatcttaaaaaattccctaaggccttaaagccaagcgatggtcctgcacaggcaaggctggtttctgcttgcttgggctgtggaatcgctgggctctcctccccagccaagggcacctgagcagctgttctgttggcaactgtcctctgcgcgaactttgaaggagacacgtgctttcccaatcatctcagttactttctgggatgtaaagaatcatttaaactatgaacacagagtctttaatagtgaagaatttctcaaaaccagggctccaggggaccatcagttttataagcaggtcttagacacctacatgttccattcttttcttaaagcccggctcaataggaggatggacgcctttgctcagatggacctcgacacccagtcggaggaggacagaataaatggaatgcttctaagtccaaggagaccgaccgttgagaaaagagcctcccggaagtcctcgcacctgcatgtcacccacaggcgcatggtggtcagcatgcccaacctgcaggacattgccatgcctgagctggcacccaggaactcctcgctccggctgacggacaccgcaggctgtaggggcagcagcgcagttctgaatgtcacgccgaagtccccgtatacattcaagattcccgaaatccactttccgctggagagcaagtgcgtgcaggcataccatgcccactttgtctccatgctgagcgaggccatgtgctttctggcccccgataactctctgctcctggcccgctatttgtacctccgagggctcgtttatctgatgcagggacagctgctgaacgccctcttggacttccagaatctgtataaaacagacatacggatctttcccactgatttggtgaagaggacggtggaatccatgtctgcccctgagtgggagggggctgagcaggcgccggagctgatgaggctcatcagcgagatcctggacaagccgcacgaggcctcgaagctggacgaccacgtgaagaagttcaagctgcccaagaagcacatgcagctgggcgacttcatgaagcgggtccaggagtcagggatcgtgaaggacgccagcatcatacaccggctgttcgaggccttgactgtaggacaggagaaacaaatcgacccagaaacattcaaagatttctacaactgctggaaggagacggaagcagaagcccaggaggtcagtctgccgtggctggtgatggaacacctggataaaaacgagtgtgtgtgtaagttgtccagctccgtcaagacaaacctaggcgttggcaagatcgccatgacccagaagcgcctgttcctcctaaccgaaggaaggccaggctacttggagatttccaccttcagaaatatagaggtaaggacagcacaggcagacggcgccagaccccacctgtgtttaggagacagatggctggagtgggccctgagcggtctgccagccatgccaagtaccagctgcagcccttctgcagaccgaatgccttcctgtccctcagtttgctcatctgtaaagtaggaataaggctgataccttctcagtgggtggtggagattgaatagtttgcatatggagcatgcttagaatggtaactgattctctgtcacagctgacttgcatctgggaggcaggaagtaagaatgtgggctgacattctcattagggacagtaggacgccttcgttcatccatgagatgtttactgagaaactgccatgtgccagccacggtgagctacagtagctcacattttctagtcacagtcggacctggttcatataaaacataacaagcttattttataacaattaaaaaatcttcaaacagttttaacattatattctaaaggtagtcattttccctgtcgaggaaatctgaatttcatcctgattcctcttacgccttatagttgttttcccagatttaaggggactgtaagaggcatgtcagatacacaaatgttttatgtgatcacctgctgagtggtcatagaagccagaaaggcagtcaagccacagccgcagcccatagtaaatgctcggccagtagatccccctcttgctgttggccttcagtttatgcttttttccacacctgcttttccagacttccttctagaattccaaagaaatgtaaataaatataaggaaagggagatggaagt

SEQ ID NO: 1184 - DNA, 2258 bp, Homo sapiens
aacaacctgcagcagcccacgtggggcgcggcgctgaccgccttcgcgcgcctgctgcagccagcctaccgggacggcatccgcgcgccccgcgggctcggccttcctgtgggctcccgccagcccctcccgccgcccgggctggtcgccacagtgtgggcgcgcgcggcggccgtcacccccgaccacagctacacgcgcatgctcatgcactggggctggtttctagagcacgacttggaccacacagtgcctgcgctgagcacagcccgcttctcggatgggcggccgtgcaactccgtctgcaccaacgaccctccttgtttccccatgaacacccggcacgccgacccccggggcacccacgcgccctgcatgctcttcgcgcgctccagccccgcgtgtgccagcggccgtccctctgcgacggtggattcagtctatgcacgagagcagatcaaccagcaaacagcctacatcgatggctccaacgtttacgggagctcggagcgggaatcccaggctctcagagacccttcggtgcctcggggtctcctgaagacaggctttccttggcctccctccggaaagcccttattgcccttttctacaggcccacccaccgagtgcgcgcgacaggagcaggagagcccctgtttcctggccggggaccaccgggccaacgagcatctggctctggccgccatgcacaccctgtggttccgggaacacaacagggtggccacggagctgtccgccctgaacccccactgggagggaaacacggtttaccaggaagccaggaagatcgtgggcgcggagctgcagcacatcacctacagccactggctgcctaaggtcctgggggaccctggcactaggatgctgaggggttaccgaggctacaaccccaacgtgaatgcaggcatcattaactcttttgctactgcagcctttagatttggccacacattaatcaatcctattctttaccgactgaatgccaccttaggtgaaatttccgaaggccaccttccgttccataaagcgctcttttcaccgtccagaataatcaaggaaggtgggatagacccggttctccgggggctgtttggcgtggctgctaaatggcgggcaccctcctaccttctcagtcctgagctgacccagaggctcttctccgcggcttattctgcggccgtggattcggctgccaccatcattcaaaggggtagagaccacgggatcccaccatatgttgacttcagagttttctgtaatttgacttcagttaagaactttgaggatcttcaaaatgaaattaaagattcagagattagacaaaaactgagaaagttgtacggctctccaggtgacattgacctctggcccgcccttatggttgaagacctgattcctggtacaagagtgggaccaacacttatgtgcctgtttgttacccagtttcagcggctaagagatggagataggttctggtatgaaaaccctggagtatttaccccggcacaactcactcagctgaagcaggcgtccctgagccgggtgctttgtgacaatggtgacagcattcagcaagtgcaggctgatgtctttgtaaaggcagaatacccacaggattacctgaactgcagcgagatcccgaaggtggacctgcgagtgtggcaagactgctgtgcagataaacaagctggaggcacgcctgaggcaggcagggtgtacagatgttagaggggttccaaggaaggccgaggagcgctggatgaaagaagactgcactcactgcatttgtgagagtggccaggtcacctgtgtggtggagatttgtcccccggctccctgtcccagtcctgaattggtgaaaggaacctgctgtccagtttgcagagaccgaggaatgccaagtgattccccagagaagcgctaataaaagttttgtgctgttgagccccaaatgggaaatttctcaggaagagacatttaggacttcagaacttttaacttgtagtcacattgttgatatggaaaccactgacttaagcaacttagttcatctaatcttacatatacttacgatcttttattttttcattttctaacataccttgaaataattcaaaactaaaagcaataaagtgcatatgaagtgtttgatcataagaaatatttcttactgtaagctgtcagttttatatgccacacctggaaataaaaagaatatcatggaatatttaaaaaat

SEQ ID NO: 1185 - DNA, 3812 bp, Homo sapiens
cccatccactcaaccagccactccctcaaccactctcatccactctcccatctgctctcccatccgctcacccatctgctctcccatctgctctcccatccgctctcccatccactccctcaaccactctcatccactctcccatccgctctcccatccactcaaccatccacttcctcaaccactctcatccactctcccatccactccctcaaccactctcatccgctctcccatccgctcaaccatccactctctcatccgctctcccatccgctctcccaaccgctctcccaaccgctcacccatccgctctcccatccgctctcccatccgctcaaccgtctgctctcccatccgctctcccatccgctcaagcatccgcactcccatcctctcacccatccacttcctcaactactctcatccactctcccatctgctcatccatccgctcaaccatctgctctcccatctactcacccatccgctctcccatccactcccatacactctcccatccactcaaacatccactcccctcaaccacactcatccactttcccatccactctctcatccgctcacccatccactctctcatccattctcccatccactctcccatccactctcccatccactcattcactctctcatcactccaggcccatggggtcgctgggttggtcactgctgggacctggcaagctcaagcctgccacacacatacaggggagacacacacacacacaggggagagcctgcatgggacgagcagaggatgggaggaagctgcccagagctacacggctcctgctgccgggagaggacgctcaaatggtgagggcagggcctagaagggtgtgggacactgccggcgggagcagctcataggctgcagggagggcgccaaccctcgctctcccgaaactactcgcatggcgttatccctgaaacccccaccccagcgggcagtgtctgccgctgccctgcaccagcaacccagtctccctgtagggactagcaggctccatgcgcccagaggccactccaggacagcggccactcggtggtcatagtggcccctgggctcagccaggctgggacacctgtctcttcttctctatagagctgaacagagattgtggctccagtggggaccccatgctgccgcagatgccactgctggctgggagggcagtggctgggagggccatggctgggagggttgggagggccgtggctgggaggccctgactgggagggccatggctgggagggctgggagggtagtggctgggagggctgtggctgggaggctgggaggccccagctaggagggccatggcaggcgcctggctcgtactgatgctccctggatcccggtgggtacattgaggtctgctgggagctggggaggcccccatgcacatgcacaccccacgcagcacccacctggctggtacaggcactccacaggtacacgcaggtgcctagccccacgctgagcacattgagggacgaccagtccaccagattgaggtagaagtcgtcctgcagctcgggcgcgtccagcaccttgaaggggatcttggagatcttgcgggtgggtttccggggggaccggagcagcttctggctgcagaggcggccacgtggcatccgtgagccacggcacttgggtcacctcttgcaaacgcttgggaagtgtctccttccctgccagccccaggagcccagtccggcccctccaatcaccaccgccaccatgtgatcctaaacccagggacagccccacaggccttcaccctcgggtgtctggctgccctggcctcccttccacagctgtgctggctctgctccccacacctcctccaggcagcccttcctgactaccctgccccttgtctgaggccagcactgccaggccatggtgtgccctcagcaaggggatctctgggctgctctaggcctggactacacttctattactgaccatggcctcatggggggctggggcccctccactctaaggactctgggggaggacacagtcacagctccaggccactatgccctgggaagcccccttcagcctcgcccaccaggacccgcagggacagggctgcggaggaagctgggacccacctcttgctgatgacgggagacagggagtagggagggctgcggaggaagctgggacccacctcttgttgctgacgggagacagggagtagggagacacatcgttgccgtcatcggggctggagcgcttggtgctaagggaatactgtggagcgggggacatgccagctgagcgcacgcccaggccgcaggaccctcagagccccccagcagcccacgctcccggtacagctcatagccctaaggcaggtgctgagaccctgtgtggagcagctgtaaaaaggcaggcgccttcctggcggggactgcggaccccccacccctcccgccctctctcgagggacccaagccaggctccgtgtgatcctgcctttgagctcccggatcatgtggacagagtggggccctgtgggaggacccagtgctgccccctacgggcaggacccccaccggcttgggtgttcgggaccccaggtagcattggtgtggggagaaaaagcccaacaggctgagcctggattcctcccgcacccccacatcccagtttacctgctagacctccagcctcagatcccagggcccctgacctggctaaggaacagggtcagggcgggggtgctgagccgtggctgggcccgagaaccgggctcggggaggcagagctggtgcccgggaggtggggggccggggaggctgcactgggagccagctcccgggtggggggtgccgcaggcttaccgtgaacagacccttcttctcaggcgtggagggctgcagcctgcggtcctcagtctgcgggtcctgcaccttctcgatgccggcacccagcagctcattcttgagcagggcagagtaggccaggccgtctgcgggcaccaagcacagtgaggcggggcaaggcagggtgggggcctgcagggcggatgggctgggaccctaacctttgccgttgtctgaggtggcgtccttggctttccggttctgactgggagacttctcattctcctgcaggcaggagagcagagagggaggggtcgaggagcccgcttgttcccggccctagagcaaggaggctgggaggggccctgggcttcccggggggtcccatctcctgcccagccagcccctcacgttaatcctgtggaagttcacgctccagttggctccggctctggaggggatgaagcggtctccgtgcttgctgggcgaggacactggggagctggcaggcgtcagggtccgccgcatctctgtgacctgaagggcatcagcagagggcttgctctcagcaccgagagccccccgagagtgcccccaggccagcctctctcagcctctggccactgagcaaagggggctttgatcttgaaaacccaaggggtgggccaggcgcggtggctcacgcccgtaatcccagcactttgggaggccgaggcgggcggatcacgaggtcaggagatcaagaccatcctggctaacactgtgaaacctcgtctctactaaaaatacaaaaaatcagccgggcgtggtggcaggcgcctgtagtcccagctactcgggaggctgaggcaggagaatggcatgaacctgggaggcggagcttgcagtgagccaagattgtgccactgcactccagcctgggcgacagagcgagactccgtctc

SEQ ID NO: 1186 - DNA, 3253 bp, Homo sapiens
agagaaggagggaagcgggagatttttcttgactgccccctttccttcaaacattttataggcttcagggagagagaggaggaggagagagggaagaaaaaaagaggagagcgagaggggtagagagcgcgcgccgttccctccggagttcccgagctgctgaggagtctggattgtgtctgtccccagtgtcagatgaaagggcgctgaggctcttggccgctgccccgcgcccagctccgcgcacgcccctctgcgagtccggccgcccagcgcctcttcccgcccgagccgccgcctgcgctccggggcagccgctctgtctccagcgcgatgtggcctcgcctggccttttgttgctggggtctggcgctcgtttcgggctgggcgacctttcagcagatgtccccgtcgcgcaatttcagcttccgcctcttccccgagaccgcgcccggggcccccgggagtatccccgcgccgcccgctcctggcgacgaagcggcggggagcagagtggagcggctgggccaggcgttccggcgacgcgtgcggctgctgcgggagctcagcgagcgcctggagcttgtcttcctggtggatgattcgtccagcgtgggcgaagtcaacttccgcagcgagctcatgttcgtccgcaagctgctgtccgacttccccgtggtgcccacggccacgcgcgtggccatcgtgaccttctcgtccaagaactacgtggtgccgcgcgtcgattacatctccacccgccgcgcgcgccagcacaagtgcgcgctgctcctccaagagatccctgccatctcctaccgaggtggcggcacctacaccaagggcgccttccagcaagccgcgcaaattcttcttcatgctagagaaaactcaacaaaagttgtatttctcatcactgatggatattccaatgggggagaccctagaccaattgcagcgtcactgcgagattcaggagtggagatcttcacttttggcatatggcaagggaacattcgagagctgaatgacatggcttccaccccaaaggaggagcactgttacctgctacacagttttgaagaatttgaggctttagctcgccgggcattgcatgaagatctaccttctgggagttttattcaagatgatatggtccactgctcatatctttgtgatgaaggcaaggactgctgtgaccgaatgggaagctgcaaatgtgggacacacacaggccattttgagtgcatctgtgaaaaggggtattacgggaaaggtctgcagtatgaatgcacagcttgcccatcggggacatacaaacctgaaggctcaccaggaggaatcagcagttgcattccatgtcctgatgaaaatcacacctctccacctggaagcacatcccctgaagactgtgtctgcagagagggatacagggcatctggccagacctgtgaacttgtccactgccctgccctgaagcctcccgaaaatggttactttatccaaaacacttgcaacaaccacttcaatgcagcctgtggggtccgatgtcaccctggatttgatcttgtgggaagcagcatcatcttatgtctacccaatggtttgtggtccggttcagagagctactgcagagtaagaacatgtcctcatctccgccagccgaaacatggccacatcagctgttctacaagggaaatgttatataagacaacatgtttggttgcctgtgatgaagggtacagactagaaggcagtgataagcttacttgtcaaggaaacagccagtgggatgggccagaaccccggtgtgtggagcgccactgttccacctttcagatgcccaaagatgtcatcatatccccccacaactgtggcaagcagccagccaaatttgggacgatctgctatgtaagttgccgccaagggttcattttatctggagtcaaagaaatgctgagatgtaccacttctggaaaatggaatgtcggagttcaggcagctgtgtgtaaagacgtggaggctcctcaaatcaactgtcctaaggacatagaggctaaggctctggaacagcaagattctgccaatgttacctggcagattccaacagctaaagacaactctggtgaaaaggtgtcagtccacgttcatccagctttcaccccaccttaccttttcccaattggagatgttgctatcgtatacacggcaactgacctatccggcaaccaggccagctgcattttccatatcaaggttattgatgcagaaccacctgtcatagactggtgcagatctccacctcccgtccaggtctcggagaaggtacatgccgcaagctgggatgagcctcagttctcagacaactcaggggctgaattggtcattaccagaagtcatacacaaggagaccttttccctcaaggggagactatagtacagtatacagccactgacccctcaggcaataacaggacatgtgatatccatattgtcataaaaggttctccctgtgaaattccattcacacctgtaaatggggattttatatgcactccagataatactggagtcaactgtacattaacttgcttggagggctatgatttcacagaagggtctactgacaagtattattgtgcttatgaagatggcgtctggaaaccaacatataccactgaatggccagactgtgccaaaaaacgttttgcaaaccacgggttcaagtcctttgagatgttctacaaagcagctcgttgtgatgacacagatctgatgaagaagttttctgaagcatttgagacgaccctgggaaaaatggtcccatcattttgtagtgatgcagaggacattgactgcagactggaggagaacctgaccaaaaaatattgcctagaatataattatgactatgaaaatggctttgcaattggtaattaaattctgtggcatcggtagttggcaagactaatctgcaaaataagaataattccagaaaagtgaggcaaactagaaacattaacttctattaatttattcatcaagtattttaggatggctaaataatttgataatgtgctgaaagatcattaaggttatatcaaattttagtaacaaataaattatttaaaattatttgccaggattcttaaaaatgacaaaaactaagaaaactaagtcacatatgctggtaaaattcaaatgttgatgtatcctaaaagagaatagtaataaagtcctaacagcaactttt
